United States Patent Application Publication US 2017/0114356 A1 - sequence listing, part 66

SEQ ID NO: 91713 - DNA, 1954 bp, Zea Mays
cccaggccaacaaaatcacctcccgcacctccgcgattcttctcgaagactcgaaccgcctggaatcagaatcgccgttgtcgggaatcgctccgatgcccgcggcgatcgggaggcggccgcccgaacgccgggtctagacctcgcgtgcgatggcgaggtcgaggcctagggtttggctcgtggcgggctgcgccgccgtcatcctgtgggcctccgtcgcgcagctcgtcgccgtcggccgctttctcctccttttcggcctcgtgggcgacgccgatccctcgccgccaccttccgcgcttccgcccccgagaatatacatgagcaatggttatctgaagatatcttgtaatgggggtctgaatcagatgcgctcagagatttgtgacatggtggcagttgctcgtcttctaaatctcactatggttgtccccgaacttgacaagagatcattctgggctgatcaaagtaattttggagatatatttgacgtgaggcatttcatcaactctttgagagataaggtgcacatcattgaacagcttccagagaagcttggtccaagagattcaaacattattatacttgaaatgccacctgtgagctggtcagatgaaaaatattacttgcatcagatcctaccgctgttcaacaaatacagcatcatccattttaacaaaacagatgctcgcatagccaataatggtatcagtacagagcttcaattgcttagatgccgtgttaattttcatgcactgaaattcacacctcaaattgagggattagggaataaactggtacataaactgcgagccaagggatcatttgtagccttgcatttacgctatgagatggatatgctggcgttttctggttgcaaccatggcctttcacctgaagaagccgaggagctcaaaaaaatgagatatgcttatccatggtggagagataaagaaattgattctcaagccaagaggtcgcaaggactgtgcccacttactcctgaggaggcatcacttgttttgaaagctctaggatttcaaaaggatgctcttatgtacatcgcagctggtgaaatttatgggggagataggagactagaaccactacggtctgcttttccaaaccttgtacgaaaggagatgctgctagactctgaagttctgcatcaattccaaaatcactcttcccagatggctgcacttgacttcattgtatccacagctagcgatgttttcattcccactttcgatggtaacatggcaaagcttgttgaaggtcaccgaaggttcctgggttttcggagaagtgtggtgctagaccgccggaaattagttgaacttctagatctgtacaccaacaagacaatctcttgggacaaatttgcatcttctgttcgggaagctcataaggaccgtgtagctcaaccatcctgcaggcgaaaacttgaaaacagaccaaaagaagaggattacttctatgctaacccccatgaatgcctagccaattcaaccttgtgcagctaaactgagtttctggtttctgttaggtgaccagatgtgagcgtgaaatcattaccaggcaggaattggcacacggttgttttgatgtcgtgttgtcgagggaccgaagccagatttacacagcccatcacgatcttttgacttcgaattccttattatcctgttgtataggtcagtttttagcttctgtattgattcgttcgctttccaacatgccaaaaggggcctgtttggagcatgtaaattttggtttgttgtctaccatttttcttcatcggtgtctaactcgtgctgctaggccgaagggttagctgtttcatcttttggttttgtttctctaattttacaaattcttagtggaattatcacctttttaaaactgtgctgtttcaatacaggagtgctgaacctgtctcatttgtctctct

SEQ ID NO: 91714 - DNA, 2036 bp, Zea Mays
cccaggccaacaaaatcacctcccgcacctccgcgattcttctcgaagactcgaaccgcctggaatcagaatcgccgttgtcgggaatcgctccgatgcccgcggcgatcgggaggcggccgcccgaacgccgggtctagacctcgcgtgcgatggcgaggtcgaggcctagggtttggctcgtggcgggctgcgccgccgtcatcctgtgggcctccgtcgcgcagctcgtcgccgtcggccgctttctcctccttttcggcctcgtgggcgacgccgatccctcgccgccaccttccgcgcttccgcccccgagaatatacatgagcaatggttatctgaagatatcttgtaatgggggtctgaatcagatgcgctcagagatttgtgacatggtggcagttgctcgtcttctaaatctcactatggttgtccccgaacttgacaagagatcattctgggctgatcaaagtaattttggagatatatttgacgtgaggcatttcatcaactctttgagagataaggtgcacatcattgaacagcttccagagaagcttggtccaagagattcaaacattattatacttgaaatgccacctgtgagctggtcagatgaaaaatattacttgcatcagatcctaccgctgttcaacaaatacagcatcatccattttaacaaaacagatgctcgcatagccaataatggtatcagtacagagcttcaattgcttagatgccgtgttaattttcatgcactgaaattcacacctcaaattgagggattagggaataaactggtacataaactgcgagccaagggatcatttgtagccttgcatttacgctatgagatggatatgctggcgttttctggttgcaaccatggcctttcacctgaagaagccgaggagctcaaaaaaatgaggtctggcagcgtctgcttcaagcatcttatctggtccaggtcgttcagaattgatcacagaccccataatcctctctaaaagatatgcttatccatggtggagagataaagaaattgattctcaagccaagaggtcgcaaggactgtgcccacttactcctgaggaggcatcacttgttttgaaagctctaggatttcaaaaggatgctcttatgtacatcgcagctggtgaaatttatgggggagataggagactagaaccactacggtctgcttttccaaaccttgtacgaaaggagatgctgctagactctgaagttctgcatcaattccaaaatcactcttcccagatggctgcacttgacttcattgtatccacagctagcgatgttttcattcccactttcgatggtaacatggcaaagcttgttgaaggtcaccgaaggttcctgggttttcggagaagtgtggtgctagaccgccggaaattagttgaacttctagatctgtacaccaacaagacaatctcttgggacaaatttgcatcttctgttcgggaagctcataaggaccgtgtagctcaaccatcctgcaggcgaaaacttgaaaacagaccaaaagaagaggattacttctatgctaacccccatgaatgcctagccaattcaaccttgtgcagctaaactgagtttctggtttctgttaggtgaccagatgtgagcgtgaaatcattaccaggcaggaattggcacacggttgttttgatgtcgtgttgtcgagggaccgaagccagatttacacagcccatcacgatcttttgacttcgaattccttattatcctgttgtataggtcagtttttagcttctgtattgattcgttcgctttccaacatgccaaaaggggcctgtttggagcatgtaaattttggtttgttgtctaccatttttcttcatcggtgtctaactcgtgctgctaggccgaagggttagctgtttcatcttttggttttgtttctctaattttacaaattcttagtggaattatcacctttttaaaactgtgctgtttcaatacaggagtgctgaacctgtctcatttgtctctct

SEQ ID NO: 91715 - DNA, 818 bp, Zea Mays
gggtaaaacggaatggtaaactgaagccaactgccaacccaacgaaggccagaactgcgcgcgcggaacctgttcgacgaattggcgcactggctatggcgctgctacgcgccgcgctagcccagccgttatcgccgcgccccgcgctcccggtccgccaccctccgacctcgctgacaggctccaggtttatcctcgacttctcgcttccgccacatccaggccccggcgcgccccggcgcgagtaccccaggatcgaggcgacggcgaggcgaggcgcgcgaactgagagcgccaaggtcaggaaccgtcggctgcagaagaagttcaacggcacggcgacgaagcccagactctcggtgttctgctccaaccggcagctctacgctgtgctcgccgacgaccacaacaagaagatcctcttctatggcagcacgctgcagaagtccatctgcggcgacccgccctgtggcaccgtggaggctgcccggaaggtcggggaggagctcgtcagggtgtgcaacgagttgggcatctccgaggtctcctacgaccgcaacggctttgctcgaggcgacaagatgatggcgttcgaggttccggtctcacagcacgggttcctgccaagataggctgcaactgtagtgtcgcccccagaaaggaggcaccagggcttgcattgacagttctcaggagacagggaagttggtcacattccatgcggattctgtattctgtattctgtatgatccatcagtccttgatcaacaggcagttcatatttcactaacaaggacagtttctccgtactctataca

SEQ ID NO: 91716 - DNA, 1448 bp, Zea Mays
gctcaagacccctcctggaaggtcagtgaccgcgagagcgcagctgggttcccctgcaagaacggcaagccgctgatggctgccgagtgaggagttgccgtccttgccgcctcttcgttctgctcaaaaacccttgcgagcttgcagcctctgccgccatctttgcctgccttgtcgccgccgatcccgattagcgacaggatagagctcctggccacctcgtccacgtcgtcgatccggatcgtcttgggcacccacaccttgccatttcctttggcgcctccttcctcgtcgcggtctctagggtgctttcctggcgtgaagcagatgttggacttggtggatgctgctggagaggcggaggtaatggacgagcccgtctcggactggccggagtgaggcggccatgcgccactccaagctcctggaaccatgcaaccccagtaggcagcagcagcagctgctgccgggtagaacgggattgcgatgctgcctgggccgtaacaggcagaggccggtactggtggcgcacagctaaatggccacatggccaccccgttcgtcatgcatggatgctgaacaactctcgcggatttatctgctgtaacattctccttccggtccgggtcttctgccttggcagaaggtccttgagtgcgagacccaactgagcgctcgtcccccgctatcgggacgagcttttccttgagctgtttcatctgctccgtgaggtctaagctggacatggcagagccgaagctgagcaccgtgccgttagtcttggctgccgcgcagacgagcgggtcgacgggcagaccggccctgaccctctggaggaagtgggaagtggccgacgcgctcttgctcttgcgccggcctgcgcccacgggcacgttgcgcatggcaccgccggcagtccagtacctctggcagttcttgcagaagtggcgcggctggttgatgttgtagttgttgtagtagcagaacttggtgtccatgctgttgcaccgcgggcacggcaggatcttgtcgggcttcttgagcttctcctttgggttgcccgcctcgccctgctgtttgtctgccgacgagtcttcggtgtccgcgacctcctgctgcggaggcgagcctgtggagtcctgaacgttgttctcttgccctttcggatcagtcgtaccgctgccgctgccgccgctttgttgcatgtcctgcaatcatgcatacaagctcgctgagttcttgacctactcaaagctctcgcaagagttttcaggtttcagctttgtttgttgtagaaaaaaaatactagttcacagccaaaaggtcatacatgaataattttttccggttggacctatgaactctaatgctatttattttcttttttttcactcttgatcgctaataaagcagctgttgatcgtgtgactttaacactaatcaaaaca

SEQ ID NO: 91717 - DNA, 832 bp, Zea Mays
atgggtaacatgtatatccgcaaggcacccccgagcggctcatctcatcggcgactaccaaagagcaatggtgggacggaagccgatgcgccggcgccgaagtgaccggcaaccgccgccgcaatccttcggcgccacggctcgcccgagttccccacgctcgttcgactccacaaccgccgccgctgccgcagttgccaccgacctggacgagctgctgctgacggcgccgccgccgtccgcgtcggagccccggagcttctcctatgcggtgaaacagcagtgctgggagaaggcggagcggctgcccggacgtgacccggagaggtggcgccgcgatgcgctcggcaacatcgtcttccgcaagctcgtgggttgccccggctgcctttgccacgactacgaccacatcgtcccctactccaagggcgggaagagcacattggagaattgccaagttttgcaggctacggtgaatcgatctaaaggcaacaagactgagatatccaaatctgagctcatacagaagagtgcatactgtagggtttcaggacgggacatggatcttgttgaactttctgcctatggaaatgtccggcgagggccagattcagggggctgcaaaatccaatgaagtagatatatctgaatggcgtcaaagttggaagtagttgcctcaaagttggaagtagttgcctgaggctcaatggagaaagcttgattcattgttctgtcaaatatctccaatcatgtttatactatgtagcttaacacttcaaatgatttatcccagaaaagaaatcgtgatatatttgaatcaatgattgtctgc

SEQ ID NO: 91718 - DNA, 1140 bp, Zea Mays
atgggtaacatgtatatccgcaaggcacccccgagcggctcatctcatcggcgactaccaaagagcaatggtgggacggaagccgatgcgccggcgccgaagtgaccggcaaccgccgccgcaatccttcggcgccacggctcgcccgagttccccacgctcgttcgactccacaaccgccgccgctgccgcagttgccaccgacctggacgagctgctgctgacggcgccgccgccgtccgcgtcggagccccggagcttctcctatgcggtgaaacagcagtgctgggagaaggcggagcggctgcccggacgtgacccggagaggtggcgccgcgatgcgctcggcaacatcgtcttccgcaagctcgtgggttgccccggctgcctttgccacgactacgaccacatcgtcccctactccaaggtccctgattccaacgacaatcccaaatcacttgttccgagttccgacgcttccccttgctattagtctattattttttgtggagattgatgcaaaaccctgggaacccagcggttcctggacctcgataagacactaatatatgttcttccaaattttagtgcttttagatggtattccctccgttatttttcagatgtcgcgttttagttcaaaaatgaactagtggacggcaaatatttgagagcggaggtagtatatacgctgagtttttttgtgctgttgtatcagaaaatcactgaccctgttaaattgacagggcgggaagagcacattggagaattgccaagttttgcaggctacggtgaatcgatctaaaggcaacaagactgagatatccaaatctgagctcatacagaagagtgcatactgtagggtttcaggacgggacatggatcttgttgaactttctgcctatggaaatgtccggcgagggccagattcagggggctgcaaaatccaatgaagtagatatatctgaatggcgtcaaagttggaagtagttgcctcaaagttggaagtagttgcctgaggctcaatggagaaagcttgattcattgttctgtcaaatatctccaatcatgtttatactatgtagcttaacacttcaaatgatttatcccagaaaagaaatcgtgatatatttgaatcaa

SEQ ID NO: 91719 - DNA, 672 bp, Zea Mays
ccgtgacgtgatttcttccccaatccttacgtgcgcgcttcaccagtcatttcccgctttatttttcacccttgcgctcaggcggaggagtggaaagcggcgacagcgggagagaaagcagaggtggtggttggacggttgaagtctcgagatgcagccaccacgatcatctgctatgaatgcacaaccacaagtacgttgtgacagccagctaatacgggaggtgttgtccttcggcggcgggatcccgcactggcagatggccacgaccagagaactagatctcgacgacggaagcgagctgcatccaattggtggggccttgttcaacgacgacttatgtgcaacaatggatgatatgtggtttttgatgttttctttgtccccccatacaccaatgaaaagcgacgtctggccctgagtctgtgcaactgtacaaggctggggtaaacagctgattcttcagttaacaggcacgtcaatctttggttcattgttgaagaacaaccgtgtgtattcctgccgtgtgtgtactagtcttgtcatgtgtattcctcttctgaagaagaaaccaaaaggtcctcactaattgctcaggcaggtcgccaatgttttcagttttccttgatttgtgactaacgaaatcaattaggaatacatgtttttaatgtt

SEQ ID NO: 91720 - DNA, 1790 bp, Zea Mays
cactctgggtcctggtcttctcagcccattcccaccggccagtcggccacccaccgtgcctcgtcgtcgccgcagcccgcacctgcagccgccatgtggaggggcggcgccaccaccgccttcgtcgctagggccctccgctcgcgcctcctcctcgaccccatccaccacccggtcacgtcgctcgctcctatttcttcggcgcgtacctcttcctcttccacctcgtccactgccgcggcgaacaccatcgtggaagaagcggcggtggcggcggctgtatccgtttcgcagcataccggatccatctccgacgcgctacggcactatgggaagtgctaccgggagctctcgaaagtccgcctcagtgctcttgttgtggcaacttcgggggctggttatgtgcttggtagtggcaacatcgtggatattgctggactttgttgcacatgtgctggtacaatgatggttgcagcatctgcaaataccctcaaccagctgcccccccaaaacaactcagtattctctctgatcaataacaacgcctactttcaggtgttcgagataaaaaatgatgctaaaatgaaaaggacaatgcgacgtcccctgccatctggtcgcatcagtcctgcacatgctgcaatgtgggctacaagtgttggagttgcaggaacagctttgttggcctggaaggctaatggcttggcagctgggcttgcagcttctaaccttgttctgtacgcatttgtttatacgccgttgaagcaaatacaccctgttaatacatgggttggggcaatcgttggtgccattccaccacttttggggtgggcggcagcttcaactgaactgtcactaaatgccatgatactccctgccgcattgtactattggcaaatacctcattttatggctcttgcgtacttatgtcgaaacgattaccttgctggagggtatcgaatgttttcttttgctgatccaactggtaaaagaactgcatgggtgtcgctaagaaattgtctgtacatgctacctttgggtttatttgcatacaactggggcctcacatctgagtggtttagttttgaagcttcactcctaacattaggccttaccattggatctctatcatttgtgctgaaaccaagtccaaagactgcgaggagaatgttctatggtagcctgctgtatctccctgccttcatggctgggcttctgttgcatcggctgccaaatgaacaaaaggcgcacaacttggctgagaaaagtgaactggacggagttctgtacggggccgatctgcaggacaaagaaagagccacacagaaacgccaagacaggaatccttccagcatgcaatcacgccctccggttgcatatgcttctgtggctccattccctttcctaccggtgcccatatatgactcatgaaaagtttccctggttcttcctgcagcagtgggacagtcagagcaatgtattcatgcacttttggcttacatgaatttctgccaccaagagttctttggtgcgtctgttgttaaaattataggatagttttttaatggattgagctttttgcggctcacctaaaagtaaaaaaaaagtgctgtggacactcgttctgatgcctcgggtaacacggatatgctgatgtactcttgtgcttttcttgtaagattcgatgtccggaaacatgcaataattgaccgtagacagaagtaacatggtaatggacatttagggcgtgtttggtttgaggaatgaagtgatttatcttcttctcactt

SEQ ID NO: 91721 - DNA, 1733 bp, Zea Mays
cactctgggtcctggtcttctcagcccattcccaccggccagtcggccacccaccgtgcctcgtcgtcgccgcagcccgcacctgcagccgccatgtggaggggcggcgccaccaccgccttcgtcgctagggccctccgctcgcgcctcctcctcgaccccatccaccacccggtcacgtcgctcgctcctatttcttcggcgcgtacctcttcctcttccacctcgtccactgccgcggcgaacaccatcgtggaagaagcggcggtggcggcggctgtatccgtttcgcagcataccggatccatctccgacgcgctacggcactatgggaagtgctaccgggagctctcgaaagtccgcctcagtgctcttgttgtggcaacttcgggggctggttatgtgcttggtagtggcaacatcgtggatattgctggactttgttgcacatgtgctggtacaatgatggttgcagcatctgcaaataccctcaaccaggtgttcgagataaaaaatgatgctaaaatgaaaaggacaatgcgacgtcccctgccatctggtcgcatcagtcctgcacatgctgcaatgtgggctacaagtgttggagttgcaggaacagctttgttggcctggaaggctaatggcttggcagctgggcttgcagcttctaaccttgttctgtacgcatttgtttatacgccgttgaagcaaatacaccctgttaatacatgggttggggcaatcgttggtgccattccaccacttttggggtgggcggcagcttcaactgaactgtcactaaatgccatgatactccctgccgcattgtactattggcaaatacctcattttatggctcttgcgtacttatgtcgaaacgattaccttgctggagggtatcgaatgttttcttttgctgatccaactggtaaaagaactgcatgggtgtcgctaagaaattgtctgtacatgctacctttgggtttatttgcatacaactggggcctcacatctgagtggtttagttttgaagcttcactcctaacattaggccttaccattggatctctatcatttgtgctgaaaccaagtccaaagactgcgaggagaatgttctatggtagcctgctgtatctccctgccttcatggctgggcttctgttgcatcggctgccaaatgaacaaaaggcgcacaacttggctgagaaaagtgaactggacggagttctgtacggggccgatctgcaggacaaagaaagagccacacagaaacgccaagacaggaatccttccagcatgcaatcacgccctccggttgcatatgcttctgtggctccattccctttcctaccggtgcccatatatgactcatgaaaagtttccctggttcttcctgcagcagtgggacagtcagagcaatgtattcatgcacttttggcttacatgaatttctgccaccaagagttctttggtgcgtctgttgttaaaattataggatagttttttaatggattgagctttttgcggctcacctaaaagtaaaaaaaaagtgctgtggacactcgttctgatgcctcgggtaacacggatatgctgatgtactcttgtgcttttcttgtaagattcgatgtccggaaacatgcaataattgaccgtagacagaagtaacatggtaatggacatttagggcgtgtttggtttgaggaatgaagtgatttatcttcttctcactt

SEQ ID NO: 91722 - DNA, 1853 bp, Zea Mays
cactctgggtcctggtcttctcagcccattcccaccggccagtcggccacccaccgtgcctcgtcgtcgccgcagcccgcacctgcagccgccatgtggaggggcggcgccaccaccgccttcgtcgctagggccctccgctcgcgcctcctcctcgaccccatccaccacccggtcacgtcgctcgctcctatttcttcggcgcgtacctcttcctcttccacctcgtccactgccgcggcgaacaccatcgtggaagaagcggcggtggcggcggctgtatccgtttcgcagcataccggatccatctccgacgcgctacggcactatgggaagtgctaccgggagctctcgaaagtccgcctcaggttcagtgaatcttgtgattcaggattcaaccttgcctactaattttgggccccttgtaactgatgactgaagatataatttctaatatcgatccaacattcgtatttagtgctcttgttgtggcaacttcgggggctggttatgtgcttggtagtggcaacatcgtggatattgctggactttgttgcacatgtgctggtacaatgatggttgcagcatctgcaaataccctcaaccaggtgttcgagataaaaaatgatgctaaaatgaaaaggacaatgcgacgtcccctgccatctggtcgcatcagtcctgcacatgctgcaatgtgggctacaagtgttggagttgcaggaacagctttgttggcctggaaggtttgtgcaggctaatggcttggcagctgggcttgcagcttctaaccttgttctgtacgcatttgtttatacgccgttgaagcaaatacaccctgttaatacatgggttggggcaatcgttggtgccattccaccacttttggggtgggcggcagcttcaactgaactgtcactaaatgccatgatactccctgccgcattgtactattggcaaatacctcattttatggctcttgcgtacttatgtcgaaacgattaccttgctggagggtatcgaatgttttcttttgctgatccaactggtaaaagaactgcatgggtgtcgctaagaaattgtctgtacatgctacctttgggtttatttgcatacaactggggcctcacatctgagtggtttagttttgaagcttcactcctaacattaggccttaccattggatctctatcatttgtgctgaaaccaagtccaaagactgcgaggagaatgttctatggtagcctgctgtatctccctgccttcatggctgggcttctgttgcatcggctgccaaatgaacaaaaggcgcacaacttggctgagaaaagtgaactggacggagttctgtacggggccgatctgcaggacaaagaaagagccacacagaaacgccaagacaggaatccttccagcatgcaatcacgccctccggttgcatatgcttctgtggctccattccctttcctaccggtgcccatatatgactcatgaaaagtttccctggttcttcctgcagcagtgggacagtcagagcaatgtattcatgcacttttggcttacatgaatttctgccaccaagagttctttggtgcgtctgttgttaaaattataggatagttttttaatggattgagctttttgcggctcacctaaaagtaaaaaaaaagtgctgtggacactcgttctgatgcctcgggtaacacggatatgctgatgtactcttgtgcttttcttgtaagattcgatgtccggaaacatgcaataattgaccgtagacagaagtaacatggtaatggacatttagggcgtgtttggtttgaggaatgaagtgatttatcttcttctcactt

SEQ ID NO: 91723 - DNA, 1713 bp, Zea Mays
ccatcccgtccggacacgccaaccgctcgctcccttgcgcgcgactgcgctaccgccggcgccgccgcgtcggcattagcttgccgcgcgatggacatgtgtgccccacgccgcctgctcctcttctcactccccaccccgaagctctctccggagcatcctttgttcaggcaacggcgcaggggcaggacctggcccggcatcgctcgctgcgccactgaggttggcactggatggggaggcatcgtcgaggacgacctttctgagctcctgcagattctcccgagagatttgcgagataatctacagaatgagcctagaaaggaccaacttctggaggtcattctggatttgggaagacgaccagaggcacgattccttggtgactccggtggccaatatctacgggacagtgagatctcacaaaaagagttggaggatgctcagaaggctgtaggagagtttggaggtgacaaccgtgcaggaattgaaggtactttacataggatatctgctataaggagtaggaaaggaatggttgttggtttgacctgtcgagtcggccgagctgttactgggcatgttgacatggtccgtgatctcctaaattacaaagaaagtatcctatttttgggaaggcctggggtcggcaagactactgttatgcgtgagattgcgcgtgttttagcagatgaatttcagaaaagagtgggcaggtaattgtggacacaagtaatgagattggtggggatggggatgttcctcatgctgcgattggtggagcaagaaggatgcaagtacctgaaccatcaatgcagcatagggtgatgattgaagcagttgaaaaccatatgcctgaggtggttattgtagatgagatcggaactgaagcagaagcacaagcttgtcgatcaattgcagaaaggggtgttatgcttattggcactgcccatggagaacgacttgcaaacatcattaagaacccaaccttatctgacttgattggaggtgtagaaactgttacccttggagacgatgaggctcgtgctcgacggagtcagaaaagtattctggagaggaaagctcctccaacattccctttccttatcgagatgagggagcggcattactgggtaacacatcggacagaaaggagcgtagatatgctactgcatggtaagaagccgctggttgaggttaggaaaagggatagcgagtttcaggttgtaattgaaagatgggcaacatatgatggcgatggactctgaacttgaaaccctgtcgtcataattgcttctatcaaagttcttaatttagtacttgatgtttctgtggacaagtgtgatctacactaccaagcctcttgttctgaggtcgtacggtacagacttatcctaatccaaaaagtttacaatgttgttgttttcctggtgaaattactttgcccattttgtggattgcatgggcgaacattcgactgacaagtgacaactatccgaagcctgttcttacactgaaggcagcccacgaagcaattttgacatttcagctactttttagcggtcgaaaattgatgtcaattctaatgtatatatattttcctgtaagagaaggaacctaatgtatgtcagtgcttctaaattgtatgagatgtgtacatatgcatatgcatatccttattgttgttaatatactcattcccccttttctttc

SEQ ID NO: 91724 - DNA, 1650 bp, Zea Mays
aagcaaagcgttatccatcccgtccggacacgccaaccgctcgctcccttgcgcgcgactgcgctaccgccggcgccgccgcgtcggcattagcttgccgcgcgatggacatgtgtgccccacgccgcctgctcctcttctcactccccaccccgaagctctctccggagcatcctttgttcaggcaacggcgcaggggcaggacctggcccggcatcgctcgctgcgccactgaggttggcactggatggggaggcatcgtcgaggacgacctttctgagctcctgcagattctcccgagagatttgcgagataatctacagaatgagcctagaaaggaccaacttctggaggtcattctggatttgggaagacgaccagaggcacgattccttggtgactccggtggccaatatctacgggacagtgagatctcacaaaaagagttggaggatgctcagaaggctgtaggagagtttggaggtgacaaccgtgcaggaattgaaggtactttacataggatatctgctataaggagtaggaaaggaatggttgttggtttgacctgtcgagtcggccgagctgttactgggcatgttgacatggtccgtgatctcctaaattacaaagaaagtatcctatttttgggaaggcctggggtcggcaagactactgttatgcgtgagattgcgcgtgttttagcagatgaatttcagaaaagagtggtaattgtggacacaagtaatgagattggtggggatggggatgttcctcatgctgcgattggtggagcaagaaggatgcaagtacctgaaccatcaatgcagcatagggtgatgattgaagcagttgaaaaccatatgcctgaggtggttattgtagatgagatcggaactgaagcagaagcacaagcttgtcgatcaattgcagaaaggggtgttatgcttattggcactgcccatggagaacgacttgcaaacatcattaagaacccaaccttatctgacttgattggaggtgtagaaactgttacccttggagacgatgaggctcgtgctcgacggagtcagaaaagtattctggagaggaaagctcctccaacattccctttccttatcgagatgagggagcggcattactgggtaacacatcggacagaaaggagcgtagatatgctactgcatggtaagaagccgctggttgaggttaggaaaagggatagcgagtttcaggttgtaattgaaagatgggcaacatatgatggcgatggactctgaacttgaaaccctgtcgtcataattgcttctatcaaagttcttaatttagtacttgatgtttctgtggacaagtgtgatctacactaccaagcctcttgttctgaggtcgtacgtggattgcatgggcgaacattcgactgacaagtgacaactatccgaagcctgttcttacactgaaggcagcccacgaagcaattttgacatttcagctactttttagcggtcgaaaattgatgtcaattctaatgtatatatattttcctgtaagagaaggaacctaatgtatgtcagtgcttctaaattgtatgagatgtgtacatatgcatatgcatatccttattgttgttaatatactcattcccccttttctttc

SEQ ID NO: 91725 - DNA, 1758 bp, Zea Mays
aagcaaagcgttatccatcccgtccggacacgccaaccgctcgctcccttgcgcgcgactgcgctaccgccggcgccgccgcgtcggcattagcttgccgcgcgatggacatgtgtgccccacgccgcctgctcctcttctcactccccaccccgaagctctctccggagcatcctttgttcaggcaacggcgcaggggcaggacctggcccggcatcgctcgctgcgccactgaggttggcactggatggggaggcatcgtcgaggacgacctttctgagctcctgcagattctcccgagagatttgcgagataatctacagaatgagcctagaaaggaccaacttctggaggtcattctggatttgggaagacgaccagaggcacgattccttggtgactccggtggccaatatctacgggacagtgagatctcacaaaaagagttggaggatgctcagaaggctgtaggagagtttggaggtgacaaccgtgcaggaattgaaggtactttacataggatatctgctataaggagtaggaaaggaatggttgttggtttgacctgtcgagtcggccgagctgttactgggcatgttgacatggtccgtgatctcctaaattacaaagaaagtatcctatttttgggaagactatatggaaaaagttctattcaggaataggcctggggtcggcaagactactgttatgcgtgagattgcgcgtgttttagcagatgaatttcagaaaagagtgggcaggtaattgtggacacaagtaatgagattggtggggatggggatgttcctcatgctgcgattggtggagcaagaaggatgcaagtacctgaaccatcaatgcagcatagggtgatgattgaagcagttgaaaaccatatgcctgaggtggttattgtagatgagatcggaactgaagcagaagcacaagcttgtcgatcaattgcagaaaggggtgttatgcttattggcactgcccatggagaacgacttgcaaacatcattaagaacccaaccttatctgacttgattggaggtgtagaaactgttacccttggagacgatgaggctcgtgctcgacggagtcagaaaagtattctggagaggaaagctcctccaacattccctttccttatcgagatgagggagcggcattactgggtaacacatcggacagaaaggagcgtagatatgctactgcatggtaagaagccgctggttgaggttaggaaaagggatagcgagtttcaggttgtaattgaaagatgggcaacatatgatggcgatggactctgaacttgaaaccctgtcgtcataattgcttctatcaaagttcttaatttagtacttgatgtttctgtggacaagtgtgatctacactaccaagcctcttgttctgaggtcgtacggtacagacttatcctaatccaaaaagtttacaatgttgttgttttcctggtgaaattactttgcccattttgtggattgcatgggcgaacattcgactgacaagtgacaactatccgaagcctgttcttacactgaaggcagcccacgaagcaattttgacatttcagctactttttagcggtcgaaaattgatgtcaattctaatgtatatatattttcctgtaagagaaggaacctaatgtatgtcagtgcttctaaattgtatgagatgtgtacatatgcatatgcatatccttattgttgttaatatactcattcccccttttctttc

SEQ ID NO: 91726 - DNA, 977 bp, Zea Mays
gaaaccagctggattttctttccacttcggtgtgctggtcgacgtggtccttctctcctctcgtctccacagtccacacacaccgtgtgcggcggtagctgctgctgcccgtgcctaccgaagaagacaagtccaacactgttgttctgttccgtgattgcggaatttgcttcaccacaccttcatcagagagccgagacgacacgctcgagacccagcaaggcaagaagaacacgagagagacagcaggcaccaggcagggatcaatcatccgtccatggagaacctaaaggagcagcggggccacgacgcggcgggcgccaacgcctggatgacggtgccggcgttcggggactgggacacgaagaacggcgcgctgccggactactccatggacttctccaagatccgcgagatgcgcaagcagaacaagaaggagctctcccgcgccagcctcggcggcgacgacgacctcctcgcccacgcccagaagccgcagcccagtatcgccccgcccaagctcggccgcccccgccccggccccgccgacgaccactccccaacgggagggaagaagttcctgagctacttccggtgttgtatcaaggcctgaagaggtgctgctctagtgcctgcagtccctgtgtttttttttcgcagcagaacacttgtgagcaatcaggcctcggttttgttaagtaccccgtgtccaaaaacgtgtaatatatttgtccttatggatcagtcgttgggcctgtatgaagaacagaccagtttatggggtaagcaacgttctttttgtacacatacatcaccatcgatttgtccttgatacgatcaaggggcatggttcgaatgaattggttttgtaattatgatgggaaaatacgtacggaaagcacaaatgactcctggcacctttttctataggagcacacaattttttatatatagaagtgtggagacttctcagcgaa

SEQ ID NO: 91727 - DNA, 823 bp, Zea Mays
acaccgtgtgcggcggtagctgctgctgcccgtgcctaccgaagaagacaagtccaacactgttgttctgttccgtgattgcggaatttgcttcaccacaccttcatcagagagccgagacgacacgctcgagacccagcaaggcaagaagaacacgagagagacagcaggcaccaggcagggatcaatcatccgtccatggagaacctaaaggagcggggccacgacgcggcgggcgccaacgcctggatgacggtgccggcgttcggggactgggacacgaagaacggcgcgctgccggactactccatggacttctccaagatccgcgagatgcgcaagcagaacaagaaggagctctcccgcgccagcctcggcggcgacgacgacctcctcgcccacgcccagaagccgcagcccagtatcgccccgcccaagctcggccgcccccgccccggccccgccgacgaccactccccaacgggagggaagaagttcctgagctacttccggtgttgtatcaaggcctgaagaggtgctgctctagtgcctgcagtccctgtgtttttttttcgcagcagaacacttgtgagcaatcaggcctcggttttgttaagtaccccgtgtccaaaaacgtgtaatatatttgtccttatggatcagtcgttgggcctgtatgaagaacagaccagtttatggggtaagcaacgttctttttgtacacatacatcaccatcgatttgtccttgatacgatcaaggggcatggttcgaatgaattggttttgtaattatgatgggaaaatacgtacggaaagcacaaa

SEQ ID NO: 91728 - DNA, 1032 bp, Zea Mays
gaaaccagctggattttctttccacttcggtgtgctggtcgacgtggtccttctctcctctcgtctccacagtccacacacaccgtgtgcggcggtagctgctgctgcccgtgcctaccgaagaagacaagtccaacactgttgttctgttccgtgattgcggaatttgcttcaccacaccttcatcagagagccgagacgacacgctcgagacccagcaaggcaagaagaacacgagagagacagcaggcaccaggcagggatcaatcatccgtccatggagaacctaaaggaggtaagtaaacctagtgatctctgcctccctggaccctctctctcttgattcctttcccgaggagctcagctcgctcggctagctaggcaccgggttcctgttcctgccgcgaggcgcgtctcacacgcggcggtcggtgcgcgcatgcagcagcggggccacgacgcggcgggcgccaacgcctggatgacggtgccggcgttcggggactgggacacgaagaacggcgcgctgccggactactccatggacttctccaagatccgcgagatgcgcaagcagaacaagaaggagctctcccgcgccagcctcggcggcgacgacgacctcctcgcccacgcccagaagccgcagcccagtatcgccccgcccaagctcggccgcccccgccccggccccgccgacgaccactccccaacgggagggaagaagttcctgagctacttccggtgttgtatcaaggcctgaagaggtgctgctctagtgcctgcagtccctgtgtttttttttcgcagcagaacacttgtgagcaatcaggcctcggttttgttaagtaccccgtgtccaaaaacgtgtaatatatttgtccttatggatcagtcgttgggcctgtatgaagaacagaccagtttatggggtaagcaacgttctttttgtacacatacatcaccatcgatttgtccttgatacgatcaaggggcatggttcgaatgaattggttttgtaattatgatggg

SEQ ID NO: 91729 - DNA, 1211 bp, Zea Mays
tacccgacgctacgatactcaagctgggacttgggaccatgccatgccgtgcagcagtaccatgaatctcgcatcaagcctgtactagcagctagtagctgctagctaggctagctgcagtgaaccagtgctcactgattagacgatcatctctccggaactcgattgacatcaacacagacaatgccccattgatataatatgccgcattgtgtgcatttacgcttacagccaaaaactgatcggttccgatgcagatactgtctctgaagggcagggaggcagggggctcgtcggagctgatcaacctcaacaaggagacggaggcgtcctgcagcaaccgcagcgagaacagctccgagatcaacctcgacatctcgcgcgcgccggcgtccgaggcccccctggaccccacaccgccgcccggcgccggcggcggcggcatgatccctttctacccgccttccgtcggcggccgtcctgcttctgctgctggcgtggacatcgaccagctcctgcacacctccgcccccaagctggagcagcacggcagcggcggcgccgtcgtcgtccaggccgcggaaaccgccagcttcggcaacctcctgtgcggcgtcgacgagccgccgccgttctggccgtgggccgaccaccagcacttccactgatagatcgcctcctcttgtccccgccacaagaaataataattctcaatgccacaattgcgatcaacgttcgatgcagccagatggaacagcggaggatcgattcttggcgagtggagcagcgagggagagagagagagagagagagcgagtaagcaaggttgtgtatgatctgatcgatcggcgaggtcgtagctgcgagatatgcgatggagctagtagctgatcatggtggaaagtggggtttgtaagcgcaataagcggagatgcggtgtaatttaattaggtaggttttggtttgagttttgatagtatctttatttttgcgtcttcattttttttttggtcttcgcgttttgttcgcttttttttttgttcacacatatataaatttgtgaattgtgatgaagcggtgttgcaagtttgttttttttttctcttttagcatcagcaaagcgtcgtgttactctatttatttctctaaaaaattggagtgggttgtttctcgacatgtgaccaatgatgcagtttcagacaatgtctccg

SEQ ID NO: 91730 - DNA, 1705 bp, Zea Mays
tataacaaccaccaccagtgctatagttgcattgcatttccttgccactctctatttcccccagtgctagctctctctctctctctctctctcaaatactgcccatgcggcttgccctcctcgtttgatgaggccaatggccagcaatggcatggcgtccgcaccctcgcccttcttccctccaaacttcctcctccaaatgcagcagacaccctccgatcatgagcatcaagaacagcatcaccaccaccaccaccacaagcaccacctcgctgctcctccccttcatcctcaccacaaccccttcctcccctcttctcaatgcccctcgctccaggacttcagaggtatggcgccaataatgctggggaagcgtccgatgtacggggcggacgtgcaggtcgtcggaggcgaggaggtgaacggctgcggcggcgtgaacgaggacgagctgtcggacgacgggtcccaggccggcggggagaagaagcggcggctgaacgtggagcaggtgcggacgctggagaagaacttcgagctcgggaacaagctggagcccgagcgcaagctgcagctggcgcgcgcgctgggcctgcagccgcggcaggtggccatctggttccagaaccggcgggcgcggtggaagacgaagcagctggagaaggactacgacgcgctgaagcgccagctggacgccgtcaaggccgacaacgacgccctcctctcccacaacaagaagctccaagccgagatactgtctctgaagggcagggaggcagggggctcgtcggagctgatcaacctcaacaaggagacggaggcgtcctgcagcaaccgcagcgagaacagctccgagatcaacctcgacatctcgcgcgcgccggcgtccgaggcccccctggaccccacaccgccgcccggcgccggcggcggcggcatgatccctttctacccgccttccgtcggcggccgtcctgcttctgctgctggcgtggacatcgaccagctcctgcacacctccgcccccaagctggagcagcacggcagcggcggcgccgtcgtcgtccaggccgcggaaaccgccagcttcggcaacctcctgtgcggcgtcgacgagccgccgccgttctggccgtgggccgaccaccagcacttccactgatagatcgcctcctcttgtccccgccacaagaaataataattctcaatgccacaattgcgatcaacgttcgatgcagccagatggaacagcggaggatcgattcttggcgagtggagcagcgagggagagagagagagagagagagcgagtaagcaaggttgtgtatgatctgatcgatcggcgaggtcgtagctgcgagatatgcgatggagctagtagctgatcatggtggaaagtggggtttgtaagcgcaataagcggagatgcggtgtaatttaattaggtaggttttggtttgagttttgatagtatctttatttttgcgtcttcattttttttttggtcttcgcgttttgttcgcttttttttttgttcacacatatataaatttgtgaattgtgatgaagcggtgttgcaagtttgttttttttttctcttttagcatcagcaaagcgtcgtgttactctatttatttctctaaaaaattggagtgggttgtttctcgacatgtgaccaatgatgcagtttcagacaatgtctccg

SEQ ID NO: 91731 - DNA, 1887 bp, Zea Mays
gcatgtgcaggcgtatctggcaggtttgatctgactctggggctctcacatgccctcacttcattcatgtggctatgcggtcctattgctggcttagtggtccaaccgctggttggcctgtacagcgataggtgcacagcaagatggggaagacgcaggccatttatcctgataggatgcatgctcatctgccttgccgtcattgttgttggcttctcgtccgacatcggagctgctctaggggacacaaaggaacactgcagcctctaccacggccctcgttggcatgctgcgatcgtgtacgttctggggttttggctccttgacttctccaacaatactgtgcaaggtccagcgcgtgctatgatggctgatctgtgcggtcatcatgggcctagtgcagccaactcaatcttctgttcttggatggcgctgggaaacatcctaggctattcctctggctccacaaacaactggcacaagtggtttccgttccttatgacaaacgcgtgctgtgaagcctgcgcaaacctgaaaggcgcgtttctggtggctgtggtgttcctagtcatgtgcttgactataaccctgttcttcgccaaggaagtgccctacagaggaaaccagaacctccccacaaaggcaaacggcgaggtcgagactgaaccttccggcccactcgctgtgctcaagggcttcaagaacttgcccacggggatgccgtccgtgctcctcgtaactggactcacctggctctcttggttcccgttcatcctctacgacaccgactggatgggccgtgagatctaccacggcgaccccaagggtagcaacgctcagatctcggcgttcgacgaaggcgtcagagttggctcgttcgggctgctgctcaactcgatcgttctaggattcagctcgttcctgatcgagcccatgtgccggaaggtcgggccgagggtggtgtgggtgacgagcaacttcatggtctgcgtcgccatggcggccaccgcgctgatcagcttctggtcgctcaaggactaccacggatacgtgcaggacgccatcaccgccagcacgagcatcaaggccgtctgcctcgtcctcttcgcgttcctgggtgtccctctcgccatcctgtacagcgtcccgttcgcggtgacggcgcagctggcggccacgaagggcggcgggcaggggctgtgcaccggcgtgctcaacatctccatcgtcatccctcaggtgatcatcgcgctgggcgcgggcccgtgggacgcgctgttcggcaagggcaacatcccggcgttcggcgtggcgtcggggttcgccctcatcggcggcgtcgtgggcgtgttcctgctgcccaagatctccaagcgccagttccgcgccgtcagcgcgggcggccactgatcgcggccgccgcgccggagcacggcacggcggcacagcccagccgtgctagagctgtatgttttgaaagttgaaacagaataagaagcgggcgaaacgagaaaaccatgcatgtcatgtgtgtgcttttgttgtgtgtggggtggggcaagcgaggcgaggtgtgtggaggtgaagtgaaggtgagcatatccagcaccagctggtaccaaggtcgggtctctgtgctagtgctattagctagtgtaaggagcgagtaggtcagttaaggctggtgcgtcgtgagggctgtcttgtgtgtagctacagcagacggttcatcagaaggattattcgtgcagtatatacagtacaactagacaatgatgttgatgattggtctagagctagaggcctatagccctatactactgtgtattgtccgccgttttagttttttggtcccatcccatcaatgcaaccgccttgttttgctcc

SEQ ID NO: 91732 - DNA, 2263 bp, Zea Mays
acccacacccacaccacacctcacgtctcctcactacccgcgctctcaggcagcgcacctcgctcctcctcccccacagcgctttccattttcgtctatctcccgagaaccctcctgcgcctcccaaagctctcttctatcgcggccgcgcgcctgatcgacgtacgaccggtctggtacgtacgtgtgctcgcccgccatggctcgcggcgacggcgagctggagctgtccgtgggggtccgcggcaccggcggcgcggcggcggcggcggcggaccacgtggcgccgatcagcctcggcaggctcatcctcgccggcatggtcgccggcggcgtgcagtacggctgggcgctgcagctctccctcctcacgccctacgtgcagactctggggctctcacatgccctcacttcattcatgtggctatgcggtcctattgctggcttagtggtccaaccgctggttggcctgtacagcgataggtgcacagcaagatggggaagacgcaggccatttatcctgataggatgcatgctcatctgccttgccgtcattgttgttggcttctcgtccgacatcggagctgctctaggggacacaaaggaacactgcagcctctaccacggccctcgttggcatgctgcgatcgtgtacgttctggggttttggctccttgacttctccaacaatactgtgcaaggtccagcgcgtgctatgatggctgatctgtgcggtcatcatgggcctagtgcagccaactcaatcttctgttcttggatggcgctgggaaacatcctaggctattcctctggctccacaaacaactggcacaagtggtttccgttccttatgacaaacgcgtgctgtgaagcctgcgcaaacctgaaaggcgcgtttctggtggctgtgacacgtttttatgtcttccaacaggtgttcctagtcatgtgcttgactataaccctgttcttcgccaaggaagtgccctacagaggaaaccagaacctccccacaaaggcaaacggcgaggtcgagactgaaccttccggcccactcgctgtgctcaagggcttcaagaacttgcccacggggatgccgtccgtgctcctcgtaactggactcacctggctctcttggttcccgttcatcctctacgacaccgactggatgggccgtgagatctaccacggcgaccccaagggtagcaacgctcagatctcggcgttcgacgaaggcgtcagagttggctcgttcgggctgctgctcaactcgatcgttctaggattcagctcgttcctgatcgagcccatgtgccggaaggtcgggccgagggtggtgtgggtgacgagcaacttcatggtctgcgtcgccatggcggccaccgcgctgatcagcttctggtcgctcaaggactaccacggatacgtgcaggacgccatcaccgccagcacgagcatcaaggccgtctgcctcgtcctcttcgcgttcctgggtgtccctctcgccatcctgtacagcgtcccgttcgcggtgacggcgcagctggcggccacgaagggcggcgggcaggggctgtgcaccggcgtgctcaacatctccatcgtcatccctcaggtgatcatcgcgctgggcgcgggcccgtgggacgcgctgttcggcaagggcaacatcccggcgttcggcgtggcgtcggggttcgccctcatcggcggcgtcgtgggcgtgttcctgctgcccaagatctccaagcgccagttccgcgccgtcagcgcgggcggccactgatcgcggccgccgcgccggagcacggcacggcggcacagcccagccgtgctagagctgtatgttttgaaagttgaaacagaataagaagcgggcgaaacgagaaaaccatgcatgtcatgtgtgtgcttttgttgtgtgtggggtggggcaagcgaggcgaggtgtgtggaggtgaagtgaaggtgagcatatccagcaccagctggtaccaaggtcgggtctctgtgctagtgctattagctagtgtaaggagcgagtaggtcagttaaggctggtgcgtcgtgagggctgtcttgtgtgtagctacagcagacggttcatcagaaggattattcgtgcagtatatacagtacaactagacaatgatgttgatgattggtctagagctagaggcctatagccctatactactgtgtattgtccgccgttttagttttttggtcccatcccatcaatgcaaccgccttgttttgctcc

SEQ ID NO: 91733 - DNA, 2239 bp, Zea Mays
acccacacccacaccacacctcacgtctcctcactacccgcgctctcaggcagcgcacctcgctcctcctcccccacagcgctttccattttcgtctatctcccgagaaccctcctgcgcctcccaaagctctcttctatcgcggccgcgcgcctgatcgacgtacgaccggtctggtacgtacgtgtgctcgcccgccatggctcgcggcgacggcgagctggagctgtccgtgggggtccgcggcaccggcggcgcggcggcggcggcggcggaccacgtggcgccgatcagcctcggcaggctcatcctcgccggcatggtcgccggcggcgtgcagtacggctgggcgctgcagctctccctcctcacgccctacgtgcagactctggggctctcacatgccctcacttcattcatgtggctatgcggtcctattgctggcttagtggtccaaccgctggttggcctgtacagcgataggtgcacagcaagatggggaagacgcaggccatttatcctgataggatgcatgctcatctgccttgccgtcattgttgttggcttctcgtccgacatcggagctgctctaggggacacaaaggaacactgcagcctctaccacggccctcgttggcatgctgcgatcgtgtacgttctggggttttggctccttgacttctccaacaatactgtgcaaggtccagcgcgtgctatgatggctgatctgtgcggtcatcatgggcctagtgcagccaactcaatcttctgttcttggatggcgctgggaaacatcctaggctattcctctggctccacaaacaactggcacaagtggtttccgttccttatgacaaacgcgtgctgtgaagcctgcgcaaacctgaaaggcgcgtttctggtggctgtggtgttcctagtcatgtgcttgactataaccctgttcttcgccaaggaagtgccctacagaggaaaccagaacctccccacaaaggcaaacggcgaggtcgagactgaaccttccggcccactcgctgtgctcaagggcttcaagaacttgcccacggggatgccgtccgtgctcctcgtaactggactcacctggctctcttggttcccgttcatcctctacgacaccgactggatgggccgtgagatctaccacggcgaccccaagggtagcaacgctcagatctcggcgttcgacgaaggcgtcagagttggctcgttcgggctgctgctcaactcgatcgttctaggattcagctcgttcctgatcgagcccatgtgccggaaggtcgggccgagggtggtgtgggtgacgagcaacttcatggtctgcgtcgccatggcggccaccgcgctgatcagcttctggtcgctcaaggactaccacggatacgtgcaggacgccatcaccgccagcacgagcatcaaggccgtctgcctcgtcctcttcgcgttcctgggtgtccctctcgccatcctgtacagcgtcccgttcgcggtgacggcgcagctggcggccacgaagggcggcgggcaggggctgtgcaccggcgtgctcaacatctccatcgtcatccctcaggtgatcatcgcgctgggcgcgggcccgtgggacgcgctgttcggcaagggcaacatcccggcgttcggcgtggcgtcggggttcgccctcatcggcggcgtcgtgggcgtgttcctgctgcccaagatctccaagcgccagttccgcgccgtcagcgcgggcggccactgatcgcggccgccgcgccggagcacggcacggcggcacagcccagccgtgctagagctgtatgttttgaaagttgaaacagaataagaagcgggcgaaacgagaaaaccatgcatgtcatgtgtgtgcttttgttgtgtgtggggtggggcaagcgaggcgaggtgtgtggaggtgaagtgaaggtgagcatatccagcaccagctggtaccaaggtcgggtctctgtgctagtgctattagctagtgtaaggagcgagtaggtcagttaaggctggtgcgtcgtgagggctgtcttgtgtgtagctacagcagacggttcatcagaaggattattcgtgcagtatatacagtacaactagacaatgatgttgatgattggtctagagctagaggcctatagccctatactactgtgtattgtccgccgttttagttttttggtcccatcccatcaatgcaaccgccttgttttgctcc

SEQ ID NO: 91734 - DNA, 2364 bp, Zea Mays
cgcgccacggcctttaaatgccacaccatctcccccgctccaaacacccacacccacaccacacctcacgtctcctcactacccgcgctctcaggcagcgcacctcgctcctcctcccccacagcgctttccattttcgtctatctcccgagaaccctcctgcgcctcccaaagctctcttgttcgttgctccccccccccccccccgtgctggttaatcatccccttcgatttcgatcacatacatataatctctctcagctatcgcggccgcgcgcctgatcgacgtacgaccggtctggtacgtacgtgtgctcgcccgccatggctcgcggcgacggcgagctggagctgtccgtgggggtccgcggcaccggcggcgcggcggcggcggcggcggaccacgtggcgccgatcagcctcggcaggctcatcctcgccggcatggtcgccggcggcgtgcagtacggctgggcgctgcagctctccctcctcacgccctacgtgcagactctggggctctcacatgccctcacttcattcatgtggctatgcggtcctattgctggcttagtggtccaaccgctggttggcctgtacagcgataggtgcacagcaagatggggaagacgcaggccatttatcctgataggatgcatgctcatctgccttgccgtcattgttgttggcttctcgtccgacatcggagctgctctaggggacacaaaggaacactgcagcctctaccacggccctcgttggcatgctgcgatcgtgtacgttctggggttttggctccttgacttctccaacaatactgtgcaaggtccagcgcgtgctatgatggctgatctgtgcggtcatcatgggcctagtgcagccaactcaatcttctgttcttggatggcgctgggaaacatcctaggctattcctctggctccacaaacaactggcacaagtggtttccgttccttatgacaaacgcgtgctgtgaagcctgcgcaaacctgaaaggcgcgtttctggtggctgtggtgttcctagtcatgtgcttgactataaccctgttcttcgccaaggaagtgccctacagaggaaaccagaacctccccacaaaggcaaacggcgaggtcgagactgaaccttccggcccactcgctgtgctcaagggcttcaagaacttgcccacggggatgccgtccgtgctcctcgtaactggactcacctggctctcttggttcccgttcatcctctacgacaccgactggatgggccgtgagatctaccacggcgaccccaagggtagcaacgctcagatctcggcgttcgacgaaggcgtcagagttggctcgttcgggctgctgctcaactcgatcgttctaggattcagctcgttcctgatcgagcccatgtgccggaaggtcgggccgagggtggtgtgggtgacgagcaacttcatggtctgcgtcgccatggcggccaccgcgctgatcagcttctggtcgctcaaggactaccacggatacgtgcaggacgccatcaccgccagcacgagcatcaaggccgtctgcctcgtcctcttcgcgttcctgggtgtccctctcgccatcctgtacagcgtcccgttcgcggtgacggcgcagctggcggccacgaagggcggcgggcaggggctgtgcaccggcgtgctcaacatctccatcgtcatccctcaggtgatcatcgcgctgggcgcgggcccgtgggacgcgctgttcggcaagggcaacatcccggcgttcggcgtggcgtcggggttcgccctcatcggcggcgtcgtgggcgtgttcctgctgcccaagatctccaagcgccagttccgcgccgtcagcgcgggcggccactgatcgcggccgccgcgccggagcacggcacggcggcacagcccagccgtgctagagctgtatgttttgaaagttgaaacagaataagaagcgggcgaaacgagaaaaccatgcatgtcatgtgtgtgcttttgttgtgtgtggggtggggcaagcgaggcgaggtgtgtggaggtgaagtgaaggtgagcatatccagcaccagctggtaccaaggtcgggtctctgtgctagtgctattagctagtgtaaggagcgagtaggtcagttaaggctggtgcgtcgtgagggctgtcttgtgtgtagctacagcagacggttcatcagaaggattattcgtgcagtatatacagtacaactagacaatgatgttgatgattggtctagagctagaggcctatagccctatactactgtgtattgtccgccgttttagttttttggtcccatcccatcaatgcaaccgccttgttttgctcc

SEQ ID NO: 91735 - DNA, 2357 bp, Zea Mays
cgcgccacggcctttaaatgccacaccatctcccccgctccaaacacccacacccacaccacacctcacgtctcctcactacccgcgctctcaggcagcgcacctcgctcctcctcccccacagcgctttccattttcgtctatctcccgagaaccctcctgcgcctcccaaagctctcttgttcgttgctccccccccccccccccgtgctggttaatcatccccttcgatttcgatcacatacatataatctctctcagctatcgcggccgcgcgcctgatcgacgtacgaccggtctggtacgtacgtgtgctcgcccgccatggctcgcggcgacggcgagctggagctgtccgtgggggtccgcggcaccggcggcgcggcggcggcggcggcggaccacgtggcgccgatcagcctcggcaggctcatcctcgccggcatggtcgccggcggcgtgcagtacggctgggcgctgcagctctccctcctcacgccctacgtgcagactctggggctctcacatgccctcacttcattcatgtggctatgcggtcctattgctggcttagtggtccaaccgctggttggcctgtacagcgataggtgcacagcaagatggggaagacgcaggccatttatcctgataggatgcatgctcatctgccttgccgtcattgttgttggcttctcgtccgacatcggagctgctctaggggacacaaaggaacactgcagcctctaccacggccctcgttggcatgctgcgatcgtgtacgttctggggttttggctccttgacttctccaacaatactgtgcaacgcgtgctatgatggctgatctgtgcggtcatcatgggcctagtgcagccaactcaatcttctgttcttggatggcgctgggaaacatcctaggctattcctctggctccacaaacaactggcacaagtggtttccgttccttatgacaaacgcgtgctgtgaagcctgcgcaaacctgaaaggcgcgtttctggtggctgtggtgttcctagtcatgtgcttgactataaccctgttcttcgccaaggaagtgccctacagaggaaaccagaacctccccacaaaggcaaacggcgaggtcgagactgaaccttccggcccactcgctgtgctcaagggcttcaagaacttgcccacggggatgccgtccgtgctcctcgtaactggactcacctggctctcttggttcccgttcatcctctacgacaccgactggatgggccgtgagatctaccacggcgaccccaagggtagcaacgctcagatctcggcgttcgacgaaggcgtcagagttggctcgttcgggctgctgctcaactcgatcgttctaggattcagctcgttcctgatcgagcccatgtgccggaaggtcgggccgagggtggtgtgggtgacgagcaacttcatggtctgcgtcgccatggcggccaccgcgctgatcagcttctggtcgctcaaggactaccacggatacgtgcaggacgccatcaccgccagcacgagcatcaaggccgtctgcctcgtcctcttcgcgttcctgggtgtccctctcgccatcctgtacagcgtcccgttcgcggtgacggcgcagctggcggccacgaagggcggcgggcaggggctgtgcaccggcgtgctcaacatctccatcgtcatccctcaggtgatcatcgcgctgggcgcgggcccgtgggacgcgctgttcggcaagggcaacatcccggcgttcggcgtggcgtcggggttcgccctcatcggcggcgtcgtgggcgtgttcctgctgcccaagatctccaagcgccagttccgcgccgtcagcgcgggcggccactgatcgcggccgccgcgccggagcacggcacggcggcacagcccagccgtgctagagctgtatgttttgaaagttgaaacagaataagaagcgggcgaaacgagaaaaccatgcatgtcatgtgtgtgcttttgttgtgtgtggggtggggcaagcgaggcgaggtgtgtggaggtgaagtgaaggtgagcatatccagcaccagctggtaccaaggtcgggtctctgtgctagtgctattagctagtgtaaggagcgagtaggtcagttaaggctggtgcgtcgtgagggctgtcttgtgtgtagctacagcagacggttcatcagaaggattattcgtgcagtatatacagtacaactagacaatgatgttgatgattggtctagagctagaggcctatagccctatactactgtgtattgtccgccgttttagttttttggtcccatcccatcaatgcaaccgccttgttttgctcc

SEQ ID NO: 91736 - DNA, 963 bp, Zea Mays
cacacctcacgtctcctcactacccgcgctctcaggcagcgcacctcgctcctcctcccccacagcgctttccattttcgtctatctcccgagaaccctcctgcgcctcccaaagctctcttctatcgcggccgcgcgcctgatcgacgtacgaccggtctggtacgtacgtgtgctcgcccgccatggctcgcggcgacggcgagctggagctgtccgtgggggtccgcggcaccggcggcgcggcggcggcggcggcggaccacgtggcgccgatcagcctcggcaggctcatcctcgccggcatggtcgccggcggcgtgcagtacggctgggcgctgcagctctccctcctcacgccctacgtgcagactctggggctctcacatgccctcacttcattcatgtggctatgcggtcctattgctggcttagtggtccaaccgctggttggcctgtacagcgataggtgcacagcaagatggggaagacgcaggccatttatcctgataggatgcatgctcatctgccttgccgtcattgttgttggcttctcgtccgacatcggagctgctctaggggacacaaaggaacactgcagcctctaccacggccctcgttggcatgctgcgatcgtgtacgttctggggttttggctccttgacttctccaacaatactgtgcaaggtccagcgcgtgctatgatggctgatctgtgcggtcatcatgggcctagtgcagccaactcaatcttctgttcttggatggcgctgggaaacatcctaggctattcctctggctccacaaacaactggcacaagtaaagcccaccgctcccacacgaactctacctgtttttttttaaattattctggaactggttttacttaacacgggcgcgttctgaatttctggtgctatcacatgcacaggtggtttccgttccttatgacaaacgcgtgc

SEQ ID NO: 91737 - DNA, 1063 bp, Zea Mays
ttatttccccccaaaacaaaccataaccggccaattctcacgcactcgccgcctaggagcgttcacgttgactgcgggcgacggctcgcttcctctcctccaccgcacctccaagaatccacccctgcctcactcgcatggttcactgtccgatgtctcgcgtccacacctgtcggctgccacagatctagccctgcctacagtgctagcaccaccatgcgtcccgttcacctcgtcgtccgcccctggcccttgcctcaccgacttgtggccgccgcggctccatgtgggacacggccatgcctgacgcctccaccgccatgattgagctaacgactccactccatgggatggtccacggtgggccatggcagctcgccggctccaacctccccctctagcctacagtgctccaccgtccggtcgctagtgctcctccatggaccacggctgacggttgcacgcaccggtatgcatccttgctgctctattcccgacgttctggctcatgtacctgttgtgcagcctatcgcctagccatgctctggtgtgaaggacatccgcttctgcccctgcacatcccgcccttagtcgcgcacctcagcctgttccttggaccgacggctattgtcttgaggcgtatggtggccgcccacctcgtacccagtcaccagatctcaaggcttcaagctcttgtttattgtttcattgatggccatgcccaaaatcaagcgatcacatgctgcaagggttgtgggagcaataggtgaaaagaataaagtcatatatgaggatgtcttgtactattgttttcacatacgagatctttctaccaattagttttttttgtctacctcatgtatatataggattttgttattctaggctctaaaatagtgcattctggtgtaatgcagatgttacactgatattctaactgtatattgagctaggttcctacgtagttgtgtcattcaaagagcaattcttgttagttctttcatgtatcagattgttctaagttataactacctgaaatctttatcattttaagaaaagtaaa

SEQ ID NO: 91738 - DNA, 1193 bp, Zea Mays
gggcgccggaagacacgggctcttggtgccagagtatcggatagaccagtctgcagctgtagcagaacactgctgaatctgatatacagtgtgaggtcaagtaacatggcttgggtggttccttctgacagtcctggcctccaaaccggctttctcactggcatttcttcgtatcccgttgatcagaggctctcccacttgcagcgctacgcaacacaacagtgacgcgagctcgttggtatgggtacggcctctccctctctcttctctctcctctctgtctctaacatattcacagtctatctttcactaaagaatatcctacatatgaatctacaatttgggccacctggtactttgtccctatgggtcagggacttgagctggaatttacagtctagtggtgccacgggaagctcgcttcaccgatcttgcctgctacttggggttctcctatgcaactagagctagtagcactatttaacaccccaccacctgcccatttcttctcccgtgcacttggtcttcctcctccagtagcttctctccactccagtccttgactaccatttcatcatcatctgtgtatctcaaacttgcttgcattgcttgccctcactcctaccatccaagtttctttctcggtctctggcaagacttcgttcaccaatatctccggcccagacagccacaccaaccgagatgtcgaaccggaggtcacggtccaggcagtctggttcgtcgaggatcactgaggagcagatcagcgaccttgtatcaaagctgcaggacctcctccccgaagctcgccttcagagcaatgcaagagtgccatctgcgagggtgttgcaggagacatgcaactacatcaggaacttgcaccaggaggtggacgacctgagcgagaggctgtcggagctgctggctacgtccgacatgagcagcgcgcaggcggctgtcatccggagcctgctcatgtagctcagacatctcgcagcattcgtagcctaagtagagtgatttttttttgtacttgttggagaggcagcaggtcaattacctaatacgcccgtgtacttcgcctacgttgtccgtctctcgctacctgagccagaggccagagctatcttttttttttctgtgtacttaatcccatcgttattggcgcaatgcttacttatatcatttcgtgt

SEQ ID NO: 91739 - DNA, 786 bp, Zea Mays
gattgattcatgtgattgatttggttgccctcccggaccctataaacggggatgagggttgcctatatatttgtatccttgtacaacaggatgaatcaagtctacaattcccacatattcatttaccttcagtatcttcttcattcactatatctcaatattttgcacattcacttgtattttgatttaaccacagtccacaaccacgcgcggcgggggagattcggacgtcgctgtcggtgattcttgcggagggggagaaggtggcgccggcggacagtctggcggccgttgctgcttgggtgctgctgccatggcgcctagcgagcgaagacggcgaccggagtacaagtcacaggggctcggacagtcacgggttctgcagctccgaggagaaagtcagagcggggcactataatcattcactcggcaagatcagagcagacaacgacattacaagtgaaaggctccatttctgaacttgggaatacttgattctataagtgaaagctgtgttgttgtgtagactcgattctataagtgaaagttgtgttgttgtgtgtgtcatgatcgtaaaaagctccgattaaagtgtcctaaggttgcaatcgtgtttcagtgaaataaactgcaacagcaactgggataggtgaccttcaagtggatcctataaattctctgaactgcacttggatgcttcggtcataggtcttggatttcacagaactgggtgtatattttgacagtattttcaattaaagacagctgaccttcagtatctccaga

SEQ ID NO: 91740 - DNA, 2472 bp, Zea Mays
cacagtctcgtatctttggaatcacgatcagctgatgaaaatgcaaaatgtaggaatggattagcagggaaacaggagtattagaacgtaatggttacatgagactgctgacaatcagccgatgtccagttaattccggaaccgcgcagacggcagaaatcgctatgaagaagaataagggctgaagcaattggacaggctgctgcctctgtgcatagatagcatccttcataaatacgaggaagtccacttcacttgtatctttattcagtggactcagcaacccatcacggcgcagttatacacgaagttcccagatggccgcctggcaatcaaattccacacgggcggccgctcatctgggatccacgagttgagctcgatggtaccaccggtataggtcctcggacctccgatgacaatcaagcggtcaccgcacgctcggaaggcaagcccccacccattcattgacacggaccgctcaggcagttttccgagggtgatccacctgttgttcttcttgtcatacttcttgagatccttctcgccgtaatcggcggcgtagagctcgttgctgacaaccgcaataaggggaggagcaccggtcactccattgaggcctccagacatgttctcgattgtcctccaagaacccctcttcaagtcgtactcctccccgcaggtcagcactctgttgctgttggccacaccacctatcacgtagaacttgccatccatgaacaccccagaacacatcttcctcgccgtgttcatgctcgggaggggcgtccaggtatgtgtctcagagtcatacatctctgcagagctcagtatgttgccgacacaatcagtgcctccggcgacgaaggccttcccgccgacactcgttgacccgaacaggcaccgcggagagttcatcggatcagccctgctccatgagttggtcaggatgctgtatcggaagacgatacgcgccatcccgaacacaagcagctcagtgcccaccgcaagcgattccttgtcggagcacttgaagcattcatcaggcggcatcttgggcacttggatccaccgctcccggtatgggtcgtaggcatcccattcgagaacgttgcaggagaagtagacccaatgctcggccaccccgttctggcgccgcagccggtagatctccccgctgcggaccatggagcggaagtcccggctgagggaggccaccgagccgtagtcggaccgagatagccggaggaggcaattgagggtcaggtcacgaccgatcgaagtcatggggttgctcccggtgatccgctgctctccggaaccggttgcgtggcggttggagccgtggccctcgcagatgtccggcgtgtgcggctgcggagatggcggcttgctgcgcttgccgccgctgccagtttcgtccgggtcttcgacctcgacgtcatcttccggcgccgggcgcttgccgctgaggaccgcgtgggcgaggtactcccactccgcctccggctcgcaggagctcggcacggagcgtgacacaaggtaggacttcccttccagcatcatgccttctcccccaaaaatctttctattcttgctttatttgctcctcctaatctgagatcgatccaggggaaaaaaagttgaaatcttatcttgcttagcaatatcgttgttgcgatctgcaggcgacataatcgaatagaaaaaaaaataagcggggatgatatcaacgggaacaaagggatcaagaacaggtgaagacgtgagatctggggagcacgaacctcgtgaataaaacaggcacaaaaatctaatcttgcagcgcgaacccgaccgatctcaccaaatctgtgaagaagaaaacaaaaaaaaaaaacaaaatctctttctcagctcggcgataagtcggatgacaggaatccgggccagccaagcaagacgccaaaataaggaaaaggaggtcaccttaaaccaaatccatggcagattgcgggcaccaaatctgcgttcaaagatcgcgcactggagcccaatcagaggtcctggccgccactccacccccgagaaatcccctccggttcccggtcctcccctcgccccctaccgatgcgcgaggatttatacctgtagagctagatagatggatagacggatggctggctctatcttctgatgccacttggttacaactgccgcttctaatgcttctggcctctgctgcagcctctgctgtctccctcgacctccctctctcgtagcgtgctcctctgctcccccctctctctctttctctcgtgtagggcttggggaaatgggactctcccctccttcactcccgctttcgcttggcaagtggtggccggtggggaaggggcatgggaaccctatcgaatttctctctcctgctctgccctgcccctctctctcctccctttcgcttttgtgtgcgtccgtctgttttggctcgtc

SEQ ID NO: 91741 - DNA, 1313 bp, Zea Mays
attcccccagccgctccttcctccgctgtgcatcctgttgcctggctcgctctgcagttcttgcgcgcgcgtccctctgcccctgcttccatggctagccgccgagctcccctcccgcggcccttagctcttccttggcccttgccagtgccgcgccccacagctcagattcccggtgtccctccatcctccctgcgcccctacacatctcctgtgcgccctggttttggtcccaagctccatggccggagcttcttcccgcccaagctcgccggccatcttcctctccctgccgagcggctttagctcccgcgccgtcgaatcgcctgcttgctgtccgcgccgccgaagtcccctcgccatgcgcactggcgtcggctgccgccgattctgccattgaactttcaagctcgccaacgcttcaactcgttgttgtcgccaagtccgaatatcatagttcgttctagtggccatgagttcttccctgtgcgcatgcgagctcttctgtttggcccatcgtcgttctccagctccttaccgcactcggctgtttgtcgtcgtcgctcggtcgcgcgacaggctgactgcgtgtcgtgtgtcgcacatcctaggtcctcgacgtcacgttgttcgtcttcgcactgtgtgcgatagcatcatcgttttctctgtccagtgctcgcgcagtttcctgctcgccagtgtgtcctctaggctcgcttggctttaaaatccctatctcgtcgttcgtcgatgcaatttatgtgtgcggatgaagaaagcgaagccagtgtacatagctcgcgggtgttcagctgaaggtcgtcgtcgttccgcgcgtcgtcaagaaatcccaagcgtcggatgaagacaaagctagcagggtaatattcaccaagtgcgcgacaaaaactcgagctaggatttatcgccattcgtacgagtattgggtcgcgtttgatgctggtgagccaatttataatttttgtaagtttatctgatgattggattaactagaattattagtcgtaataattctcgtatttagcgcaagcgtattgtggtagtattaaaaataagtgaagtacgatgggtttagcaatgcgaaaggtagattaatttaggtgatatctgggcgaggtgacgacgtaaaggatagatcttgtttagaatttaatatttcatgatatttggtttagatccggttatgttagaaaagcgagattattgtgcctaggcatttatcgacatctagcgtttactcatgagtgttgtaatgcctcgccattaagtgttttatttctttttgtata

SEQ ID NO: 91742 - DNA, 276 bp, Zea Mays
atgagctcgttgatctcgtcgtcgctgatcctgccacgtcgccccgacgacatatttccggcggcgacgacggcagtagcttgctcggagacaccagccgcgctcggaagctacagcccctggatcgtttcgtcctcgtcgtctctgcctcagcctctctcgcggctcgcctatttgtgcagtgtacgtgtgcgacctcgggtcaagagcaagcgtgcaaacggagataggagtgaacggccggagaacgaaaaagaaaaggtgagagagacctga

SEQ ID NO: 91743 - DNA, 618 bp, Zea Mays
atggccacccaagcagcaatctcctcccaaatccgtttggtggaccgccattccacgaatagatgtagccccgattctaggacagcctggcacaaagcacaatgtcgggtggctagcatttttgttccaattgtcatcacattgtctatagtaacattttctgcgtggtttttgtgtggatggttgggtgcatatccaaattcatgggttgctgaaaatagcaattgctttgtcttctctctcatgtttgccatatctgttgttgttattgcttgcccttgtgcccttggtttggcaacaccaactgctgtgatggtagcgactggaattggggctaatcatggagtacttgtaaaaggcggagatgctttggagagagctcaaccacaaggaaaggctgttgtaacagctgcaaaggttttctcaggaatggacctaggagatttcctcacgctggttgcatcagcagagcttccttcatcaaaagatggcattgatcaacgaaaagacaaggtattatcccagtggctgcttgaagctgaagacttctcggcagtacctgataaaggagttcagtgctcgatcaatgggaagcatgttttggttagtcataggtga

SEQ ID NO: 91744 - DNA, 1880 bp, Zea Mays
ctagtttatagaaagttttagagatcctaattcctcatcctcttagacgtcacctgtcctttcatagacaaaacgaaagagggagcaaacaagaatgagccagtttcatgggccgttctcccaaactaattagccttttttttgcgtccaacggcggaacaagaaaaatcaaaacaaaaaagacagatcagcccagagtatcgttcgacgaggagaagccgagaagagccccccgggaaagccctcgctcatacggtcatacctgtttgctgtacgtttttcttttcccgttcgcgtcgcttgcgcgacacctagggcgaccgccgccggcctatgcccagctgcccaaagtactcgtcggaccctttgccggcgacgagcaccgaccacaccagccaccaggtcttggacgacgcacctgcgtcgccgacggcggcggtatcatcggtgagcggacgcgcggccggccaggcgagcgtgatcctcgatccaagaggtcggtagggatcgagatgaccgggtgcctgtggccgtgcgtgggagcggcggtggctgggcatggggccggccatcggaaggcggggctgttccgctccaagcccaggacccccgcggaggtggtgcagcacgccagggacctagtcacctacatcctcgacaacaaggacggctgcggcgccggcaagcgcgacgccaagcatgagcacaggatggtagaactaagcaaagaagtcaaggagatgaaaggcattctgtatggtaatggcgaagaagatccttgtgaagaagcatgcaagcaattgactaaggagttcttcaagaaggacactgacaccttccgtcaactaattgtttgccttcaatatgtggacctggaaacgcaaaaggatattacacaagtgatagcaaatttgcaaaggcaaaaggttgattcaagattggttgcctctgattacttagaaaccaacttggatcttttggatattttgatgtctgggtatggaaacttggacattgcaatacattatagtactctattgagagattgcatacgccaccaagttgctgcaaggtacgtactggaatctccacactttaggactttctttgatcatatacagtttccagacttcaatgtgcaatcagatgtttttaaaacttttaaggaactcatgacacggcataaatcaactgctgctgagttcttttccaagaattatgattggttctttgcggaattcaactcgaaactgatattatctgcttccaattacttcatccggaggaaagccattcagctcttgcgagacattcttttggaaaggtcaaacgctgcagtgatggtgcgctatgttagttcgaaagagcatctcatgattcaaatgaaccttctaagggatgaaagcatagccattcaagtagaggctttccatgtcttcaagctgttcgtcgctaacaaggagcaggcacctgagatcaccggcatactgctcgccaacagaagcaagctcctgaggttcttgaaagacttcaccaccgtcgagaaagacgacaagaagttcgaagccgataaagctacggtcatctcggagatcctagcgctaaatggtgctgaaaagtaatagaaagacaagttgaaagcatcgcgagttcgcgacgtgcaaagagcagtagccagctagtgtctgtctccctgtgtttgtgtttcatgcatgcataatcgagtgtgaaggtgaaagcccggtgcgggctcattggtttcttttaatttgggcccacgcggcgccgcgccgcgccacaattgagcgcgcagcgtgatgcagtgctgacaggttgttgtctttgcgacaaattgtcttttaatttatctgttgcttcag

SEQ ID NO: 91745 - DNA, 1311 bp, Zea Mays
gtcttccgttccactcaaatctgctgtgaacacaggctagcaggtgaaagatcgatgtcgaacgctgccatcgcgatcggtaccatcatattcgtcattttcgtcgccgcgataattgcctgcgcctacaggcgggccgaggcatgcgccggcggcgtcgcgaggagctacgcggtggtgtcggaccaacagatccggcacgccaccatcgagaaattcctctcggagatcaggcacgagaagcccttcaggttcacgtcgcagcagctcgccgggttcacgggcaactacacgacccggctcggcgccggcggcttcggcacggtgtacaagggcgtgctccccaacggcctcgccgtggcggtcaaggtcttcgaccgcagcctcacgcagaggtcccaggaggagcagttcatggccgaggtgggaaccatcggccgcacgtaccacgtcaacctcgtcaggctcttcggcttctgcttcgacgacgtcgcgcgcgccctggtgtacgagtacatgggcaacggcgcgctcgacgcctacctcctgggccggggccgcggcgccggcctcccggcgctacgcgacatcgccgccggcgtcgccaggggcatccggtacctgcacgaggagtgccagcagaagatagtgcactacgacatcaagcccgggaacgtgctcctcgacgccgccctcacgcccaaggtcgccgacttcgggctcgcgcggctggtgaaccgcgccgacacgcacgtgtccgtctcctgcgtgcgcggcaccccgggcttcgccgcgccggagatgtggatgctgtcgggcgtcacggagaagtgcgacgtgtacagcttcggcatgctcctgctcgagatcgtcggccggcgccggaacttccacgaggaggcgtccgagagccagcagtggttccccacgctggcgtggaccaagtacgagagcggcgagctcgtggacctcgtcgcgtgcagcagcggcaccggcgcggatggtggtgcggccgccgcgccgggtgaggagaaagaacatgagctgcagcgcgacaaagagatagtggagaggatgtgcaaggttgcgttctggtgcgtgcagcagcagccggaagcgaggccgcccatgggtgcggtggtgaagatgctagagggtgagatgagcatcgctgctcctgtgaaccccttccagcatctaatggcgacgccggtgatggccaacctgtggacgacgacgatggcgagtagcgcaaacgctgtgtcagcaactgccatttctgagactagcatcgagatcgtctcgctttga

SEQ ID NO: 91746 - DNA, 514 bp, Zea Mays
atgagatcgccggtgctgacccgcctgctcgccgccgcgctcctcgtcgcgtcgtcgtcggcggcgctgtcgcaggccgcgtgggtgcccgtcctggacgtgaacgacctggtgatcaagcaggtggcgcagttcgcggtgctggtgtacggcctggcgcaccacagggacctggcgtacgtgggcgtggtgcgggcgcagacggagcaggccgtcggcggcggcaccaacttccgcctcgtggtggtcgccgcgaggcccgacggcggcgggagcaccgcgcggtacgactgcctggtgtggggcgtgccggggtcgcgctccgacacctggaagctccgaaggttcaggaagatcgtccagggctagctatagctgctcatatggatccttctggccttgcaataagcgtcagtaataaggtagtgtttcaatgatcaattgtaagccgtgtcctcctcctcatcctcggctgcaggagccagccaactataatgtagctctcactctctat

SEQ ID NO: 91747 - DNA, 1063 bp, Zea Mays
tccgacctctacatctccatccgcggaagcagaccacctccaatccttctctttcacgcagtcattgcttgcctccttagcccaactgttggtaccagaggttcatgtttcatcataaggaatgaacagtagtcgacaaatggaactccactacataaacactggatttccatacacaatcaccgagagcttcatggatttctttgagggtctcacttatgctcatgctgactttgctctcacggatggctttcaagatcagggtaatccatactgggcaatgatgcatacaaactcgtacaagtatggatactctggtcctgggaactattacagttatgctcatgtctatgacatagacgattacatgcgtagagcggatggtgggcgcagaatatgggataacactacacctgtaaacaatgttgattctgccaatgttgtcctgcagggtggtgaagctccccacacaacgacaaatactattaacaaggaatgcatccaacaggtacaccaaagtccaggtagtcctcaggttgtttggcaagataacattgagcctgataatatgacatatgaggaactgttggatttgggtgaggcagttggaacccagagccgtggtctctcccaagaacgcatttcatcgcttcctgtcacgaagtataagtgtgggtttttttcaaggaagaaaacacgccgtgagaggtgtgtgatttgccaaatggagtacaggagaggaaatttgcagatgacacttccatgcaagcatgtataccatgccagctgcgtgacaagatggcttggcataaacaaggtatgccctgtttgctttgctgaagttcctggcgaggatcctgaggcaatgagtcaacagttatgaggccactgggaagttgttgcactttgaagctgagtactgcccccaatgaatgcatgatgttgcttgaaggcagcttattgtccccactttataatgtgtattagcacgtatacaaatataggtattgtagatcagatgtatttagtgttgggtcagcgttttgtacgtaatcaatcagga

SEQ ID NO: 91748 - DNA, 3615 bp, Zea Mays
gtttaaatttcaaataagctaaactttttcttaatttttttctaatctcattcaatctatatgtaataggaataaccaaacaaagctctcataggatttaatcccacaacctagattccttaggaaaaataaaaagaggttaaacctcatgcaaaaattcctttgattggatgcacccatctcaaacaattattttaaactttttaatccccttatttttttctgtggtgtagccctttagttttgaattctgtagagttagaaaatacatgggttctattttcctgaaaaccggtgttccaaagaagccctagaattctagagcttgcaaaaggcaagacgcggtatccaattcccctctcgcgtacataaacgacggagaaaaggacacaacccagcccgccctaaaaccctcccaccatcatgtcgctctccacactcagccacccggccgccgccgccgccgggagcggaaaatcccttttcccggctggcccggcggcgcagtccgtacatttccccaaggcacggctccctgtccccgccgccgtctccgccgctactgcggctgttcacgcggaggatagggtttcgtcgctgactcaagtctccggcgtgctggggtcgcagtggggcgacgagggaaagggcaagctcgtcgacgtgctcgccccccgcttcgacatagtcgcgcgttgccaggggggagcgaacgctggacataccatctacaactcagaaggcaagaagtttgctctgcatcttgttccatctggtattctccatgaagggacactgtgtgttgttggcaatggagcagtgatccatgttccagggttctttggagaaattgatggtcttgagtccaatggagtccgctgcgatggaaggatactggtagccgaccgggcacatctgctgtttgatctgcaccaggctgtggatggacttagggaagcagagcttgaaaattcatttatagggacaactaagagaggcattggtccttgttactccagcaaggtaactcgaaatggactgcgggtttgtgatttacgacacatggacacttttggggataagcttgacatcttattcaaagacgctgcttcgagatttcaaggctttcagtacagcaaaagcttgctcaaggaagaggttgagagatacaagaagtttgctgatcgcttggagcccttcattgctgataccgtgcatgtgctaaatgaatctatcaagcagaagaagaaaatcctggtcgaaggcggccaagcaactatgctggatattgattttggcacttatccatttgtgacttcttctagcccttcagctggcgggatatgcacaggcctagggattgctccaagggcaattggcgacctgattggagtggtcaaagcttacacatctagagtcggctctggccctttcccaactgaactatttggagaggaaggtgatcgccttaggaaagctggaatggaatttggcacaacaacaggtcgcccaaggcgttgcggctggcttgacattgttgcgcttaagcacagctgccaaatcaatgggttctcatcacttaatctgaccaaactggatgttctgtccgggttgtcagaaattaaggtgggtgtttcttatacccagactgatggacagaagctgcaatccttccctggggatcttgatacccttgagcaagtacaggtcaactatgaggttctgcctgggtggcaaagtgacatttcttctgttcgaagatacgatgaacttccccaagctgcccgcctttatgtggagaggatagaagaacttgttggtgttcccgtgcactacattggtgttggacctggcagagatgctctcatatacaagtaaaagcaactttatttggtccttggttgggcggaaaccaggctgggactcgggagcatttgcattttcttggcgtggtaacttttgatacggtgaagtcactgactcgtggagtgatgttgctcaataatcattaatcagaaccttgtcctaatacagccgctgagacatcagctaaggcgaataagggaaggatgagtcatttgcaccatgtttgaccaccaattgttaggtggtccatatattttgtacttattgtgagactttgtgctatggatctcaactgtataccttgctggtgcatggctttgggtttacatggttgaaaatgagattggtgtactaattgtctatgtttaaccttgtcaacgcactgaagctagcgaaaaattgttctgagacagcgatgggaaaatccgaaactgcatgcttttttttaaaaaaaaaggaactaaagaacagtaggcactattggtcacatattcattatgccaaactcattgtcacccatcagattatcagaatcgattacatgaacttggaagctaaaggttgtgcgcgagctagtgaaaggtggtgtcacgtgcagcatgcagatgggcaggatattcaacgttgcatggactcgtcgtcgtagtacaaactagacgtcccagacagggatgggcaggcaggttccgaactggtcgacctcatgcagatcgtccatctgaaaccctccgttggcgccgccgtgggctcccgcaatgtcgttgagatccgctgctagcgcgtcccagtcgaactcgccattgccaccgaagcagccagcgtcggcggcatcaccgtgaaggctgcctttggcagtggccgtgccgtcgtcgtcggtcttgagcacgccgatctgctgcaagaactccctgaggtcgagctggggcttgtccgcgccgggcgggaaggcgccgccgccctcgaacggctcggcgtcgtcgaccgtcgtcatggcggccgtggccaccgcctgctccaggtccaggtccagggcgtggaagcaggacatgggcggcggcagagccgccgcagccgcgtgggtggtgacggtggagcagggagacgtggaggccaccgggagatgatcggccggggcgagctgctgctggcgggcagcaggagaaacccgcggtgccggcggcggtggcttggcgggcgagccgttgttcttgagctcctgcagcctctggtggatgacgtgcacgttgtgctgcgcgttgaggttgagcaggccgtaggccgggacggcggcggcggcggcgcccctggcggaggccgggagccacctgatcctctggtgggcggcggcggcggagacgcggaggtgcggcaggttgaggaaggcgtcgggcccgtagagcctgcgcgcggcctcgtcgtaggcgagcgcggcctcctcggcggtggcgaaggagccgagccagaggcgggtgcgcttgttgggctcgcggatctcggccacccacttgccccacgtccgctggcgcacgccgcggtactcgcacgccgcgttctgcgggccgcccttcccacgcgtcgggcccttcttccacgcgcgcttccggccgtagctctccatgggatccgcgcggcgtggaggtggagcgtggggagctcaggagaactagctagggtaggaggagcgagggtttattttgaacgccaagcagaagagagcgaggtagccgcggtggggagtgtagtgaagtg

SEQ ID NO: 91749 - DNA, 177 bp, Zea Mays
atgaatccaaaattatgcctgaccccaggcatacattttcactatagaacgctgcaaactgaccagctgccaagccctggtcatcttcagccagatgcaccaccaaagcatccccattttcttcactacgctcttttaccaaagtgcaatcatgaaattcagggctatgtcgcacct

SEQ ID NO: 91750 - DNA, 890 bp, Zea Mays
aaaccgctcgcggcacgccccgccatcagacgctcgcctttccctcgccgcatcacggtgtctgtccctcccatcccatctcactgcctcataacactcccgtatcccacgccatacgcccaagaggccaagaccgagccgcctggatctgattgggttggctctcgtcgcgggggcgaaggggaaggggaggaagaaccaggaggcgtgcgttctcgtccaagatgctgcagctgctgatggcgctggccttctcggcggccccgctgacgctgtacgtgccgccggtgcgcagcctcagcctcttcgtggaggccatggaggccgtctgccgcgactgcgggccctactcccacggcgccgtcgcccgcttccgcctcggcttctcccgcgtcctcgccggcctagcgcgcgccctccgctaggcaggccggcaccccatcgccggcgccggttcctcctgcctacaggagtatatacagtatactacacggacacgcacgttcggtgaccttgtgctctccctggtttctatgtcctttttgtattactagcgaggaagtggtttctagcgcagcacagcaatctacatgcaggagcaggactagcggcggtcagtttcgagatctttcctgcttcgtttctccctttttgtgctctctctttcttttctgttttttttttgaggattgggtgtagcatgtagagtgaggaaaggttaataaatctgtccaaaaagggagattttgcaagagatgctgagtaaatctagtgtgcttgcttgcctggggttatgggatgtgagggacgactccccctccccctaggaatttccatgtgatttgtgaatattcccttgtctgtaacttggcaatgattcttcagtttaa

SEQ ID NO: 91751 - DNA, 1608 bp, Zea Mays
cggctcttcctttccctgcggtgataccggagctctctgctcccacctcccagtaccagccgacctgtttttttttcgtttgtttgggggtgggtggatgtgggggagggatcgtttctcggttcttctggacgatttgtggtggatctggctggttccttggttgctcggctggtcttttgagttgatacggtgctgggatttgtaggcgcatttctgggtggaggtggccggtggggtaatggctccagcatgtgatccttgctaaggccttacagttacagcacactgcatgccggatttgtgttgctttatttatgttcctgcccgtgtaatcgttttgaactcaaggggagaactagtgacctactgatgagattaagatgcagcactgtttttgctagcgggaggcctatctgcagaactaactagtcatgtctgaggccctcagcacatatactctggttgcatgaaggattcttagaattcagagggcgctaccgagttgatgcatgtacgaactgaaaaacaagagtaaagaatttccgtgagatgagacagaatggcgcggtgatgattcagtttggccatcagatgcctgattacgactccccggctacccagtcaaccagtgagacgagccatcaagaagcgtctggaatgagcgaagggagcctcaacgagcataataatgaccattcaggcaaccttgatgggtactcgaagagtgacgaaaacaagatgatgtcagcgttatccctgggcaatccggaaacagcttacgcacataatccgaagcctgaccgtactcagtccttcgccatatcatacccatatgccgatccatactacggtggcgcggtggcagcagcttatggcccgcatgctatcatgcaccctcagctggttggcatggttccgtcctctcgagtgccactgccgatcgagccagccgctgaagagcccatctatgtcaacgcgaagcagtaccacgctattctccggaggagacagctccgtgcaaagctagaggcggaaaacaagctcgtgaaaagccgcaagccgtacctccacgagtctcggcacctgcacgcgatgaagagagctcggggaacaggcgggcggttcctgaacacgaagcagcagccggagtcccccggcagcggcggctcctcggacgcgcaacgcgtgcccgcgaccgcgagcggcggcctgttcacgaagcatgagcacagcctgccgcccggcggtcgccaccactatcacgcgagagggggcggtgagtagggagccccgacactggcaactcatccttggcttatcagcgattcgactcggctctccctcgtctgaaactgaactctctgcaactactgtaactgtaactaaactgggtgtgcccggattggcggtcgttctgttctactactagtacctgctacgcgtcgttgggttgggtctggactagagagcgtgctggttctttgatgaacttggctggacttgagggtgttgactagcgcgaagctgagttccatgtaaaacttttgcttcaagaccgatgactggcggcataataagtagcagtaataaccattcttctgtgtc

SEQ ID NO: 91752 - DNA, 1299 bp, Zea Mays
gtctgtgtgcgagcgcaagagaaagggagtcagagagagagagagagggaggagaccttgcagaggagcgaagcaagcaaggtgggaaagaggcagcagcaagggcggcgggctgccggaaggggaacatgctccctcctcatctcacagagaatggcgcggtgatgattcagtttggccatcagatgcctgattacgactccccggctacccagtcaaccagtgagacgagccatcaagaagcgtctggaatgagcgaagggagcctcaacgagcataataatgaccattcaggcaaccttgatgggtactcgaagagtgacgaaaacaagatgatgtcagcgttatccctgggcaatccggaaacagcttacgcacataatccgaagcctgaccgtactcagtccttcgccatatcatacccatatgccgatccatactacggtggcgcggtggcagcagcttatggcccgcatgctatcgtaagtgatctccatgcgtccagcctgttgtttcactacttgctgccggtgctagatgatgccctttgtccactttgaagacactttgctaggcaatgcgatgcaccctcagctggttggcatggttccgtcctctcgagtgccactgccgatcgagccagccgctgaagagcccatctatgtcaacgcgaagcagtaccacgctattctccggaggagacagctccgtgcaaagctagaggcggaaaacaagctcgtgaaaagccgcaagccgtacctccacgagtctcggcacctgcacgcgatgaagagagctcggggaacaggcgggcggttcctgaacacgaagcagcagccggagtcccccggcagcggcggctcctcggacgcgcaacgcgtgcccgcgaccgcgagcggcggcctgttcacgaagcatgagcacagcctgccgcccggcggtcgccaccactatcacgcgagagggggcggtgagtagggagccccgacactggcaactcatccttggcttatcagcgattcgactcggctctccctcgtctgaaactgaactctctgcaactactgtaactgtaactaaactgggtgtgcccggattggcggtcgttctgttctactactagtacctgctacgcgtcgttgggttgggtctggactagagagcgtgctggttctttgatgaacttggctggacttgagggtgttgactagcgcgaagctgagttccatgtaaaacttttgcttcaagaccgatgactggcggcataataagtagcagtaataaccattcttctgtgtc

SEQ ID NO: 91753 - DNA, 2428 bp, Zea Mays
agagataggaaagggcccaacagctcaacagaaaagccaagcaaaggctgctgcatactggaaggccctctgtctgtgtgcgagcgcaagagaaagggagtcagagagagagagagagggaggagaccttgcagaggagcgaagcaagcaaggtgggaaagaggcagcagcaagggcggcgggctgccggaaggggaacatgctccctcctcatctcacaggtcttccttcctgctcgctgacttgcctctctccaccctctctgatctgagctctacggctcttcctttccctgcggtgataccggagctctctgctcccacctcccagtaccagccgacctgtttttttttcgtttgtttgggggtgggtggatgtgggggagggatcgtttctcggttcttctggacgatttgtggtggatctggctggttccttggttgctcggctggtcttttgagttgatacggtgctgggatttgtaggcgcatttctgggtggaggtggccggtggggtaatggctccagcatgtgatccttgctaaggccttacagttacagcacactgcatgccggatttgtgttgctttatttatgttcctgcccgtgtaatcgttttgaactcaaggggagaactagtgacctactgatgagattaagatgcagcactgtttttgctagcgggaggcctatctgcagaactaactagtcatgtctgaggccctcagcacatatactctggttgcatgaaggattcttagaattcagagggcgctaccgagttgatgcatggtactgatacagcgctagcgctagcgctagctagcttactactagtacctttagagcatgtgcatgcccaagttacacatctcacctcgcgtgatcaattgagggcctactagcttactactgctgccttagtttcctttttcatgaatacagttacggtgggaaggtcaaattctgttgtgtattcatgcatcagctgtgctccttaaggcttgcagaccttaatacccagtacgtgtttcgaatctcgtatgtttatttctgggaactgacctgtgtttatatatgtttggacagtacgaactgaaaaacaagagtaaagaatttccgtgagatgagacgtacgtaaggataatccccaagacattgctcaatctgtttctctctctctctctctcttttcggcgagcagtttgtcctttttctttcaatttcttttactactacacccgttatcgaatatttgtcatccgctggctcatttataaactaaaacacgataaataaagaaggaaagaacggagagagtagtagtggtttagtttcatgcagctagaattctaacgccctcctggatccttgtgcagagaatggcgcggtgatgattcagtttggccatcagatgcctgattacgactccccggctacccagtcaaccagtgagacgagccatcaagaagcgtctggaatgagcgaagggagcctcaacgagcataataatgaccattcaggcaaccttgatgggtactcgaagagtgacgaaaacaagatgatgtcagcgttatccctgggcaatccggaaacagcttacgcacataatccgaagcctgaccgtactcagtccttcgccatatcatacccatatgccgatccatactacggtggcgcggtggcagcagcttatggcccgcatgctatcatgcaccctcagctggttggcatggttccgtcctctcgagtgccactgccgatcgagccagccgctgaagagcccatctatgtcaacgcgaagcagtaccacgctattctccggaggagacagctccgtgcaaagctagaggcggaaaacaagctcgtgaaaagccgcaagccgtacctccacgagtctcggcacctgcacgcgatgaagagagctcggggaacaggcgggcggttcctgaacacgaagcagcagccggagtcccccggcagcggcggctcctcggacgcgcaacgcgtgcccgcgaccgcgagcggcggcctgttcacgaagcatgagcacagcctgccgcccggcggtcgccaccactatcacgcgagagggggcggtgagtagggagccccgacactggcaactcatccttggcttatcagcgattcgactcggctctccctcgtctgaaactgaactctctgcaactactgtaactgtaactaaactgggtgtgcccggattggcggtcgttctgttctactactagtacctgctacgcgtcgttgggttgggtctggactagagagcgtgctggttctttgatgaacttggctggacttgagggtgttgactagcgcgaagctgagttccatgtaaaacttttgcttcaagaccgatgactggcggcataataagtagcagtaataaccattcttctgtgtc

SEQ ID NO: 91754 - DNA, 1318 bp, Zea Mays
agagataggaaagggcccaacagctcaacagaaaagccaagcaaaggctgctgcatactggaaggccctctgtctgtgtgcgagcgcaagagaaagggagtcagagagagagagagagggaggagaccttgcagaggagcgaagcaagcaaggtgggaaagaggcagcagcaagggcggcgggctgccggaaggggaacatgctccctcctcatctcacagtacgaactgaaaaacaagagtaaagaatttccgtgagatgagacgtacagaatggcgcggtgatgattcagtttggccatcagatgcctgattacgactccccggctacccagtcaaccagtgagacgagccatcaagaagcgtctggaatgagcgaagggagcctcaacgagcataataatgaccattcaggcaaccttgatgggtactcgaagagtgacgaaaacaagatgatgtcagcgttatccctgggcaatccggaaacagcttacgcacataatccgaagcctgaccgtactcagtccttcgccatatcatacccatatgccgatccatactacggtggcgcggtggcagcagcttatggcccgcatgctatcatgcaccctcagctggttggcatggttccgtcctctcgagtgccactgccgatcgagccagccgctgaagagcccatctatgtcaacgcgaagcagtaccacgctattctccggaggagacagctccgtgcaaagctagaggcggaaaacaagctcgtgaaaagccgcaagccgtacctccacgagtctcggcacctgcacgcgatgaagagagctcggggaacaggcgggcggttcctgaacacgaagcagcagccggagtcccccggcagcggcggctcctcggacgcgcaacgcgtgcccgcgaccgcgagcggcggcctgttcacgaagcatgagcacagcctgccgcccggcggtcgccaccactatcacgcgagagggggcggtgagtagggagccccgacactggcaactcatccttggcttatcagcgattcgactcggctctccctcgtctgaaactgaactctctgcaactactgtaactgtaactaaactgggtgtgcccggattggcggtcgttctgttctactactagtacctgctacgcgtcgttgggttgggtctggactagagagcgtgctggttctttgatgaacttggctggacttgagggtgttgactagcgcgaagctgagttccatgtaaaacttttgcttcaagaccgatgactggcggcataataagtagcagtaataaccattcttctgtgtc

SEQ ID NO: 91755 - DNA, 1314 bp, Zea Mays
agagataggaaagggcccaacagctcaacagaaaagccaagcaaaggctgctgcatactggaaggccctctgtctgtgtgcgagcgcaagagaaagggagtcagagagagagagagagggaggagaccttgcagaggagcgaagcaagcaaggtgggaaagaggcagcagcaagggcggcgggctgccggaaggggaacatgctccctcctcatctcacagtacgaactgaaaaacaagagtaaagaatttccgtgagatgagacagaatggcgcggtgatgattcagtttggccatcagatgcctgattacgactccccggctacccagtcaaccagtgagacgagccatcaagaagcgtctggaatgagcgaagggagcctcaacgagcataataatgaccattcaggcaaccttgatgggtactcgaagagtgacgaaaacaagatgatgtcagcgttatccctgggcaatccggaaacagcttacgcacataatccgaagcctgaccgtactcagtccttcgccatatcatacccatatgccgatccatactacggtggcgcggtggcagcagcttatggcccgcatgctatcatgcaccctcagctggttggcatggttccgtcctctcgagtgccactgccgatcgagccagccgctgaagagcccatctatgtcaacgcgaagcagtaccacgctattctccggaggagacagctccgtgcaaagctagaggcggaaaacaagctcgtgaaaagccgcaagccgtacctccacgagtctcggcacctgcacgcgatgaagagagctcggggaacaggcgggcggttcctgaacacgaagcagcagccggagtcccccggcagcggcggctcctcggacgcgcaacgcgtgcccgcgaccgcgagcggcggcctgttcacgaagcatgagcacagcctgccgcccggcggtcgccaccactatcacgcgagagggggcggtgagtagggagccccgacactggcaactcatccttggcttatcagcgattcgactcggctctccctcgtctgaaactgaactctctgcaactactgtaactgtaactaaactgggtgtgcccggattggcggtcgttctgttctactactagtacctgctacgcgtcgttgggttgggtctggactagagagcgtgctggttctttgatgaacttggctggacttgagggtgttgactagcgcgaagctgagttccatgtaaaacttttgcttcaagaccgatgactggcggcataataagtagcagtaataaccattcttctgtgtc

SEQ ID NO: 91756 - DNA, 1270 bp, Zea Mays
agagataggaaagggcccaacagctcaacagaaaagccaagcaaaggctgctgcatactggaaggccctctgtctgtgtgcgagcgcaagagaaagggagtcagagagagagagagagggaggagaccttgcagaggagcgaagcaagcaaggtgggaaagaggcagcagcaagggcggcgggctgccggaaggggaacatgctccctcctcatctcacagagaatggcgcggtgatgattcagtttggccatcagatgcctgattacgactccccggctacccagtcaaccagtgagacgagccatcaagaagcgtctggaatgagcgaagggagcctcaacgagcataataatgaccattcaggcaaccttgatgggtactcgaagagtgacgaaaacaagatgatgtcagcgttatccctgggcaatccggaaacagcttacgcacataatccgaagcctgaccgtactcagtccttcgccatatcatacccatatgccgatccatactacggtggcgcggtggcagcagcttatggcccgcatgctatcatgcaccctcagctggttggcatggttccgtcctctcgagtgccactgccgatcgagccagccgctgaagagcccatctatgtcaacgcgaagcagtaccacgctattctccggaggagacagctccgtgcaaagctagaggcggaaaacaagctcgtgaaaagccgcaagccgtacctccacgagtctcggcacctgcacgcgatgaagagagctcggggaacaggcgggcggttcctgaacacgaagcagcagccggagtcccccggcagcggcggctcctcggacgcgcaacgcgtgcccgcgaccgcgagcggcggcctgttcacgaagcatgagcacagcctgccgcccggcggtcgccaccactatcacgcgagagggggcggtgagtagggagccccgacactggcaactcatccttggcttatcagcgattcgactcggctctccctcgtctgaaactgaactctctgcaactactgtaactgtaactaaactgggtgtgcccggattggcggtcgttctgttctactactagtacctgctacgcgtcgttgggttgggtctggactagagagcgtgctggttctttgatgaacttggctggacttgagggtgttgactagcgcgaagctgagttccatgtaaaacttttgcttcaagaccgatgactggcggcataataagtagcagtaataaccattcttctgtgtc

SEQ ID NO: 91757 - DNA, 1242 bp, Zea Mays
agagataggaaagggcccaacagctcaacagaaaagccaagcaaaggctgctgcatactggaaggccctctgtctgtgtgcgagcgcaagagaaagggagtcagagagagagagagagggaggagaccttgcagaggagcgaagcaagcaaggtgggaaagaggcagcagcaagggcggcgggctgccggaaggggaacatgctccctcctcatctcacagtacgaactgaaaaacaagagtaaagaatttccgtgagatgagacagaatggcgcggtgatgattcagtttggccatcagatgcctgattacgactccccggctacccagtcaaccagtgagacgagccatcaagaagcgtctggaatgagcgaagggagcctcaacgagcataataatgaccattcaggcaaccttgatgggtactcgaagagtgacgaaaacaagatgatgtcagcgttatccctgggcaatccggaaacagcttacgcacataatccgaagcctgaccgtactcagtccttcatgcaccctcagctggttggcatggttccgtcctctcgagtgccactgccgatcgagccagccgctgaagagcccatctatgtcaacgcgaagcagtaccacgctattctccggaggagacagctccgtgcaaagctagaggcggaaaacaagctcgtgaaaagccgcaagccgtacctccacgagtctcggcacctgcacgcgatgaagagagctcggggaacaggcgggcggttcctgaacacgaagcagcagccggagtcccccggcagcggcggctcctcggacgcgcaacgcgtgcccgcgaccgcgagcggcggcctgttcacgaagcatgagcacagcctgccgcccggcggtcgccaccactatcacgcgagagggggcggtgagtagggagccccgacactggcaactcatccttggcttatcagcgattcgactcggctctccctcgtctgaaactgaactctctgcaactactgtaactgtaactaaactgggtgtgcccggattggcggtcgttctgttctactactagtacctgctacgcgtcgttgggttgggtctggactagagagcgtgctggttctttgatgaacttggctggacttgagggtgttgactagcgcgaagctgagttccatgtaaaacttttgcttcaagaccgatgactggcggcataataagtagcagtaataaccattcttctgtgtc

SEQ ID NO: 91758 - DNA, 1198 bp, Zea Mays
agagataggaaagggcccaacagctcaacagaaaagccaagcaaaggctgctgcatactggaaggccctctgtctgtgtgcgagcgcaagagaaagggagtcagagagagagagagagggaggagaccttgcagaggagcgaagcaagcaaggtgggaaagaggcagcagcaagggcggcgggctgccggaaggggaacatgctccctcctcatctcacagagaatggcgcggtgatgattcagtttggccatcagatgcctgattacgactccccggctacccagtcaaccagtgagacgagccatcaagaagcgtctggaatgagcgaagggagcctcaacgagcataataatgaccattcaggcaaccttgatgggtactcgaagagtgacgaaaacaagatgatgtcagcgttatccctgggcaatccggaaacagcttacgcacataatccgaagcctgaccgtactcagtccttcatgcaccctcagctggttggcatggttccgtcctctcgagtgccactgccgatcgagccagccgctgaagagcccatctatgtcaacgcgaagcagtaccacgctattctccggaggagacagctccgtgcaaagctagaggcggaaaacaagctcgtgaaaagccgcaagccgtacctccacgagtctcggcacctgcacgcgatgaagagagctcggggaacaggcgggcggttcctgaacacgaagcagcagccggagtcccccggcagcggcggctcctcggacgcgcaacgcgtgcccgcgaccgcgagcggcggcctgttcacgaagcatgagcacagcctgccgcccggcggtcgccaccactatcacgcgagagggggcggtgagtagggagccccgacactggcaactcatccttggcttatcagcgattcgactcggctctccctcgtctgaaactgaactctctgcaactactgtaactgtaactaaactgggtgtgcccggattggcggtcgttctgttctactactagtacctgctacgcgtcgttgggttgggtctggactagagagcgtgctggttctttgatgaacttggctggacttgagggtgttgactagcgcgaagctgagttccatgtaaaacttttgcttcaagaccgatgactggcggcataataagtagcagtaataaccattcttctgtgtc

SEQ ID NO: 91759 - DNA, 1682 bp, Zea Mays
agagataggaaagggcccaacagctcaacagaaaagccaagcaaaggctgctgcatactggaaggccctctgtctgtgtgcgagcgcaagagaaagggagtcagagagagagagagagggaggagaccttgcagaggagcgaagcaagcaaggtgggaaagaggcagcagcaagggcggcgggctgccggaaggggaacatgctccctcctcatctcacagagaatggcgcggtgatgattcagtttggccatcagatgcctgattacgactccccggctacccagtcaaccagtgagacgagccatcaagaagcgtctggaatgagcgaagggagcctcaacgagcataataatgaccattcaggcaaccttgatgggtactcgaagagtgacgaaaacaagatgatgtcagcgttatccctgggcaatccggaaacagcttacgcacataatccgaagcctgaccgtactcagtccttcgccatatcatacccatatgccgatccatactacggtggcgcggtggcagcagcttatggcccgcatgctatcgtaagtgatctccatgcgtccagcctgttgtttcactacttgctgccggtgctagatgatgccctttgtccactttgaagacactttgctaggcaatgcggtcagtactggtgctttctttttgtttttcctgtgcgttattgcgtttagtggtgttcttcatttgctagcacagcatgcctatcggctgagacagcacccagcagcattgccatcgatttaccccttcaactcattcgtctcgtcagatcttactcctgctatgttattgaagcataggcgttttttacgtttcacgcctgcatcattgccattctcctggtcctgggtaaagcggcttgttttttttcttcttctgataattacaaattaatcagagtctcgtattttgcctggtaaacaaatcgagcagatgcaccctcagctggttggcatggttccgtcctctcgagtgccactgccgatcgagccagccgctgaagagcccatctatgtcaacgcgaagcagtaccacgctattctccggaggagacagctccgtgcaaagctagaggcggaaaacaagctcgtgaaaagccgcaagccgtacctccacgagtctcggcacctgcacgcgatgaagagagctcggggaacaggcgggcggttcctgaacacgaagcagcagccggagtcccccggcagcggcggctcctcggacgcgcaacgcgtgcccgcgaccgcgagcggcggcctgttcacgaagcatgagcacagcctgccgcccggcggtcgccaccactatcacgcgagagggggcggtgagtagggagccccgacactggcaactcatccttggcttatcagcgattcgactcggctctccctcgtctgaaactgaactctctgcaactactgtaactgtaactaaactgggtgtgcccggattggcggtcgttctgttctactactagtacctgctacgcgtcgttgggttgggtctggactagagagcgtgctggttctttgatgaacttggctggacttgagggtgttgactagcgcgaagctgagttccatgtaaaacttttgcttcaagaccgatgactggcggcataataagtagcagtaataaccattcttctgtgtc

SEQ ID NO: 91760 - DNA, 1335 bp, Zea Mays
caccctttcgccacaccgcgctcgacactacacagcgcgcacgctcggcttcgctagccgccaccaccaccaagcgacctcttctccagctctcctgttccatgcaccaccgctcgctccttgtctcctagctagacaggggcttgcattgaggctgtccttgtgttgcatcaggacgccaggcttctttctgcggtgtcggttcgtctgctgtgatggagaggtggggggacaaggacaggggggcggcggttccggcgccggggaggttgaggcggtacgccgaccagccgtccttctcgtcctcgctcctcgacgccatatacaagtccatggacgagcccggcgacggggcaacatccgccgccgccgcgggagcgaccaagatgcagagccaccaggacctgcactacagctactactacaagacgtcgctggcggggagctaccgcggcagcagggctgcggcggcggcgcacgccgccaccaccacgtcgagctcctccgaatgctcgagctacggtgggttctcgtcgtcggaggcggagtcgtcgcagcaccggcggctgcggcccatacgcacgagcgtgggcgcggccgcgtcgcccgcgcccgcgccggagaagaagaagaaggccggcgccaacatccgcgccaagctgagggacctccgcaagccggcgtcccccggcgcgcggctggcggggttcctgaacaccatcttcagcggcaggcgcgcgccggcgacgccgccgtcgcggggcgcggagtcctccgcgtgctccacggcgtcctcgtactcgcgctcctgcctcagcaagacgccgtccacgcggggccagccgaagcggaccgtgcggttcctggacagcgacgacggcgaggcggcggcggcggcgcccggcggcgagcggcggagggtgcaggtcggggtggcggagctggagcggatgctgctccaccggatggagatggacagcgacgaggacgacgaggacgaggagggcagcgacgccagctccgacctgttcgacctcgagaacttcgcggccggtgcccccgacgccgcggcggcgtacagggacgagctgccggtgtacgagacgacgagggtggtgctgggacaccgcgccattggccacgggaggagtgccagggtggtgtgatcttgctgcctgccgggattcatcccggttccggagcgccagggtaactgtaaaatggtggagtaactgtaagatacaagtgttgggggcaacaagtgtttgctactcgtactcgcatcgtgagatctctgggaggatatttcttggatccttttcgtgtccttgtgtg

SEQ ID NO: 91761 - DNA, 2451 bp, Zea Mays
cttccggcaccggcaccggcaccggcaccagcgccaatctagctagtcagtttagcttcgctccttcgcttgcttgcaagtaacagcctctctcgtgtccaaaaagaaagtctttctctggaaaggagagaaggatcatcatcaccaggatcaagaaagaactcgtcgattccttaccccttccgtcttcttctgatctcagctctatccactagctaggagatggacatgaacaacgggtggcttggcttctccttgtctccttcggcagcgagcaggggcggctacggctacggcgacggaggcggcggagcgagcgcgagcgcgtgcggggatggagagggctcttgcccctcgcctgccgcggctgcctcgcctctccctctcgtggccatgccgctcgatgactctctgcactatagctctgctccagattggaggcacggcgcagcagaagccaaagggcccaagctcgaggacttcatgagcatcacttgcagcaacaagagcagtggccgcagcctctacgacagctgcggccaccacgacgacgagcaggccagcaagtaccacgaggtccacggcatccaccccctctcgtgcgggtcgtactaccacggctgcatcagcagcggcggcggcggcggaggcggcattggcctggggatcaacatgaacgcgccgccctgcaccggcgggttcccggaccaccagcaccaccagttcgtgccgtcgtcgcaccacggccagtacttcctgggcgccccagccgcaagcgcgggcccgccagcaggcgcagcaatgccgatgtacaacgccggcggcggcagcgttgtcggcggctccatgtccatctccggcatcaagtcctggctccgggaggccatgtacgtgcctccggagcgaccggcggcggctgcgctgtcgctcgccgtgacggatgacgtcccgccggccgagccgccgcagctgctgccggcgccgttgccggtgcaccgcaagcccgcgcagacgttcgggcagcggacgtcgcagttccgtggcgtcaccaggcacagatggaccgggcggtacgaggctcacctgtgggacaacacttgcaggaaggaaggccagactaggaaagggaggcaaggctgctctaggcggctatgacagggaggagaaggctgcgagggcttatgacctggcagctctcaagtactggggcccctcgactcacataaatttcccgctgagccactacgagaaggagctggaggagatgaagcacatgtcgaggcaggagttcattgcacacctgagaaggaacagcagcggcttctcgaggggagcatccatgtacagaggagtgacaaggtgccgtgctgcaagtctgctcgcccatttttgcaccccacctgctgccttttccaacaccccaaaacttctagccatctcacatccgagtctgggcacagctctgtgcctctctctgttgggagttctgagttttctgaactcacacgcacgcacacgcatccgcctgctgcttgtgtataaagtataaaccttttcttgtcctctgcttgttccccatgcaaacgtttgcaggcatcaccagcacgggagatggcaggccaggattgggagggtcgctggcaataaggacctgtaccttggcacattcagcacgcaggaggaagcggcggaggcgtacgacatcgcggcgatcaagttccgtggcctcaacgcggtgaccaacttcgacatcagcaagtacgacgtgaagcgcatctgcgccagcacccacctcatcggcggcggcgacgcgtgcaggcgctccccgacgcggccgccggacgcggcgccggcgctcgcaggtggcgccgaccgctcgtcggacgcgccgggcgaccaagccgcgtccgacaactcggacacctccgacggccaccgcggcgcccacctgctgcacggcctccagtacggccaccccatgaaactggaggccggggagggaagcagctggatggcggcggcggcggcagcgcggccggtgcccggcgtgcatcagctaccgatgttcgcgctgtggaacgactgttgattgtggcaatggcaacctggttggtagagtacgtagtagttagtgaagaaatgcatgtcattgcacctgcatgcgcatgcgcgagcacgaggtgtaataactttcggcagtagaagtggcggtgaagaagtggacgacacggcctggggaaggacatgcatggcgtactgcctccctgcaagcgagatgcatgcatgttgcacacgctcgccgtttcttcgcaagatggcgacaattttgccgcaatatgtaatgtaatggttccacatgcatgcatgttattcttcaatgaaacaccccactagtagttatctgatttttgtgatgacgttggcaaactaagctcgccagctttttgcgga

SEQ ID NO: 91762 - DNA, 2061 bp, Zea Mays
gttgccacctacacagcactccccccgtagccatatatagcttgctcgcataaacgtcaaaaaggagactcttttggccctcttccggcaccggcaccggcaccggcaccagcgccaatctagctagtcagtttagcttcgctccttcgcttgcttgcaagtaacagcctctctcgtgtccaaaaagaaagtctttctctggaaaggagagaaggatcatcatcaccaggatcaagaaagaactcgtcgattccttaccccttccgtcttcttctgatctcagctctatccactagctaggagatggacatgaacaacgggtggcttggcttctccttgtctccttcggcagcgagcaggggcggctacggctacggcgacggaggcggcggagcgagcgcgagcgcgtgcggggatggagagggctcttgcccctcgcctgccgcggctgcctcgcctctccctctcgtggccatgccgctcgatgactctctgcactatagctctgctccagattggaggcacggcgcagcagaagccaaagggcccaagctcgaggacttcatgagcatcacttgcagcaacaagagcagtggccgcagcctctacgacagctgcggccaccacgacgacgagcaggccagcaagtaccacgaggtccacggcatccaccccctctcgtgcgggtcgtactaccacggctgcatcagcagcggcggcggcggcggaggcggcattggcctggggatcaacatgaacgcgccgccctgcaccggcgggttcccggaccaccagcaccaccagttcgtgccgtcgtcgcaccacggccagtacttcctgggcgccccagccgcaagcgcgggcccgccagcaggcgcagcaatgccgatgtacaacgccggcggcggcagcgttgtcggcggctccatgtccatctccggcatcaagtcctggctccgggaggccatgtacgtgcctccggagcgaccggcggcggctgcgctgtcgctcgccgtgacggatgacgtcccgccggccgagccgccgcagctgctgccggcgccgttgccggtgcaccgcaagcccgcgcagacgttcgggcagcggacgtcgcagttccgtggcgtcaccaggcacagatggaccgggcggtacgaggctcacctgtgggacaacacttgcaggaaggaaggccagactaggaaagggaggcaaggtgagtgagagcttagcatccaattccattttctagcctcctcaatgtttggctgaatgcattcgattcgaacgttaactcaccttcttgttcttgcaatgccaatgcaatgtcaacaacgacgagcagtctacctaggcggctatgacagggaggagaaggctgcgagggcttatgacctggcagctctcaagtactggggcccctcgactcacataaatttcccgctgagccactacgagaaggagctggaggagatgaagcacatgtcgaggcaggagttcattgcacacctgagaaggaacagcagcggcttctcgaggggagcatccatgtacagaggagtgacaaggcatcaccagcacgggagatggcaggccaggattgggagggtcgctggcaataaggacctgtaccttggcacattcagcacgcaggaggaagcggcggaggcgtacgacatcgcggcgatcaagttccgtggcctcaacgcggtgaccaacttcgacatcagcaagtacgacgtgaagcgcatctgcgccagcacccacctcatcggcggcggcgacgcgtgcaggcgctccccgacgcggccgccggacgcggcgccggcgctcgcaggtggcgccgaccgctcgtcggacgcgccgggcgaccaagccgcgtccgacaactcggacacctccgacggccaccgcggcgcccacctgctgcacggcctccagtacggccaccccatgaaactggaggccggggagggaagcagctggatggcggcggcggcggcagcgcggccggtgcccggcgtgcatcagctaccgatgttcgcgctgtggaacgactgt

SEQ ID NO: 91763 - DNA, 846 bp, Zea Mays
caccaagagagaagaaccgcagtcccgctccttccctgccggctgccgctgccccgtctctgtctccaactccgaatatgtcgtcctcgcccctccccaccacctccggcggggctcacatcttcccgtctccgcctcgaccgcgccaccgccggtgctcccaagtaatcgtcgccgccgccgctccgccccgttcctacggcgtcggtcgccgcgccgtctccctagccggcgtcgccgcctggcttgccactaccgtcggccgggcagacgcggccagtccatttgacaagtacgtcaagaggaagaagctggagcctttggagacctacgttccggctgtcctgctgaccattgaccaattcgttgatctagagaaatccttagaatttgagaaaccaaggtatgacgagagcagatcattacttcgctctggaccggcatcatctttaagagtcaacattcgggcagtggcacaatatgcttctagtaatggtcaaggcaaggctgcatcagatgctgtggacgagtgcttacgagcactggaagatctcgactcactactactacatgcatcacggaatgatccgtcagcatccgttgaaaccatgaggagcaagatcagtgttgcccttgcagcattagacaatctcttgcaaacggtgccatctgcagtactggataaaggaaaggcgattgctgatgcataccgaactccagtagatgattatgtagagggctgaaacagttggaggatattctttaaggctgaattttgttaggttctatatcatgtatacctgtttggattactaaattcctcgaactgtacatcccaatttataa

SEQ ID NO: 91764 - DNA, 1830 bp, Zea Mays
acatagtgctaacagaacccgacgggattcaggttgacgacgtgacggcggaacccccttcgacccctgctccacggggagacgtggagatgatgaccgaggacgagaaggagaaggccagattgtttctgcctgatttgaggcgaagccccacttctagttcgcggggtccggctgtggaggagatgacttcgaatgaatctgttagcagtaatagcatctcaaactttaaatggggtgcaaccaataggcggtctcggacgcagtttagaggacaaggagacactgagatttcggctccagccttaattggaagctcagacaaagggatttctggcctctctgctggcacctcaaaggagaagaaaggcactgaagaaactcgtagtgcacagaacacaggagatttagggcttattagttcttcatcaagtccagtaacaagcgcacaacggccactcccaagctccagcgtaggctcaaactcaagagaatcaaaaaagagggataccgctttgcatccactgattttcaaggaagctggccttccagataatactttgttgacttacaagttgaagaacggagaggcactactgcaagggtataagcagggagcaggtattgtctgcaattgttgcaatcaagaggtttccccttcggaatttgaaaaacacgctggcatggggaaaagacgacaaccgtatcaaaacatttatacatcacaaggattaacactccatgatgttgctctgcaactgcatcatttgaatttgaattcaaatggatttagcaatgctagtgtttccagcttcagtgactacccaaaccttacttcttcaggttgtggcaaagaaccttctgtcagtggacctattgtccccctgaaacggactttacaagaaagagtggtccaaacagagagttgctatttctgtgggtatggccacacagagcttggaaaaattgatccaaacatgattgtcttctgtaaccagtgtgagagaccatgccacgtgaaatgttacaatagtagagttgtaaaaaagaaggtgcctctggaaattttgaaagactacttgtgttttcacttcttgtgctgccaagaatgtcagtcacttcgtgtccgtctagaaggaatggagaagtgtgaagagattgccttccttggacggataagatccaatatttgttggcggcttttaagtagcgctgacgcaagtagggatgttaaactctacttgtctcaggtcatcgacatcttcaaagatgcatttttggaatctactgatgcgcacagtgacatctcagatatggtttatggaaaaaatagagaaggagagaaggattttcgaggaatgtattgtgtagtgttaactgcaagtacgcatgttgtgtctgctgcgattctgaaagtgcgcgtggaacatgctgcagaactggtccttattgctactcgtagcgagtgcagaaaaaagggctacttcagacttctcctagagtcaatcgagacaaatttgagagcctgtaatgtaagccttcttatggcacctgttgaccctgaaatggcacaaatctggtcagataaactcgggttcaccattttatcagccgatgagaagaagtccatgctggagtcgcaccctttggtgatgttcaagaacctagtcttggtgcagaaaccacttgcttgagccaatttaattaatgtttgattatactactcttttcatcctgaaatataattcgttttaggctaaacatacattcattatttaaattatgagtgtagtttgtatgcatgtctatatttcatggttattttttctt

SEQ ID NO: 91765 - DNA, 1894 bp, Zea Mays
acatagtgctaacagaacccgacgggattcaggttgacgacgtgacggcggaacccccttcgacccctgctccacggggagacgtggagatgatgaccgaggacgagaaggagaaggccagattgtttctgcctgatttgaggcgaagccccacttctagttcgcggggtccggctgtggaggagatgacttcgaatgaatctgttagcagtaatagcatctcaaactttaaatggggtgcaaccaataggcggtctcggacgcagtttagaggacaaggagacactgagatttcggctccagccttaattggaagctcagacaaagggatttctggcctctctgctggcacctcaaaggagaagaaaggcactgaagaaactcgtagtgcacagaacacaggaggtcctctcagtctcaacatcatcgatggtgttacgtcaggttctccagtacctagtgcagtaacccctaactactcaaaacatgattccacagatttagggcttattagttcttcatcaagtccagtaacaagcgcacaacggccactcccaagctccagcgtaggctcaaactcaagagaatcaaaaaagagggataccgctttgcatccactgattttcaaggaagctggccttccagataatactttgttgacttacaagttgaagaacggagaggcactactgcaagggtataagcagggagcaggtattgtctgcaattgttgcaatcaagaggtttccccttcggaatttgaaaaacacgctggcatggggaaaagacgacaaccgtatcaaaacatttatacatcacaaggattaacactccatgatgttgctctgcaactgcatcatttgaatttgaattcaaatggatttagcaatgctagtgtttccagcttcagtgactacccaaaccttacttcttcaggttgtggcaaagaaccttctgtcagtggacctattgtccccctgaaacggactttacaagaaagagtggtccaaacagagagttgctatttctgtgggtatggccacacagagcttggaaaaattgatccaaacatgattgtcttctgtaaccagtgtgagagaccatgccacgtgaaatgttacaatagtagagttgtaaaaaagaaggtgcctctggaaattttgaaagactacttgtgttttcacttcttgtgctgccaagaatgtcagtcacttcgtgtccgtctagaaggaatggagaagtgtgaagagattgccttccttggacggataagatccaatatttgttggcggcttttaagtagcgctgacgcaagtagggatgttaaactctacttgtctcaggtcatcgacatcttcaaagatgcatttttggaatctactgatgcgcacagtgacatctcagatatggtttatggaaaaaatagagaaggagagaaggattttcgaggaatgtattgtgtagtgttaactgcaagtacgcatgttgtgtctgctgcgattctgaaagtgcgcgtggaacatgctgcagaactggtccttattgctactcgtagcgagtgcagaaaaaagggctacttcagacttctcctagagtcaatcgagacaaatttgagagcctgtaatgtaagccttcttatggcacctgttgaccctgaaatggcacaaatctggtcagataaactcgggttcaccattttatcagccgatgagaagaagtccatgctggagtcgcaccctttggtgatgttcaagaacctagtcttggtgcagaaaccacttgcttgagccaatttaattaatgtttgattatactactcttttcatcctgaaatataattcgttttaggctaaacatacattcattatttaaattatgagtgtagtttgtatgc

SEQ ID NO: 91766 - DNA, 3395 bp, Zea Mays
gatccagtgccatcatatgatagataacagtagcagtgagaacaaattgcacctgggtagctctgccagcatgggtcatcaggtattcaggtcagctttccaagccggtaagaggtcagccaccttgtcaatgagaggtcattactctaaaatgctgccctctccatttatgtttcccatcatttaatcaattgaaagtgtgactggtgtccgctgttctaaagttctgtagccaaagtttgtcatgtcctcaatggatgctttaacaagacacaattcacaaaattcgctacaatgccttgtgtcacttcttcaactttgatgttccagtaagttcagatgtctttcactcgttttagctggataagctaacagccattatttgacttgttttgaaggatggcccgctaaagattagagcaacatgtactggaccatcatcaacaatagctaagatagtccgcatggttgtgaaacacaccctttgctgttgagagtaaagcgaagggtgaaaagggtgtttaactatatatgtatccttgaacaggttgaggatgcccaagcacgtgaagctcctgttcaaaggctcgcagattccatcgcaggaccatttgtgtatactgttatgacgttggctgcaacaaccttttccttctggtgtgctcttgtttttttatttcttctatgaaaatcttatgactaaaaatattgcctttttatccctcacccccttcccaaggtattacattggcacacacttatttcctgaggttcttctgaatgatattgctggtccggatggggattcattacttttgagtataaagcttgctgtggatgtattagtaagtgaccctgctatagttttttctttaacagaagaaaaaactcagcatttcaatctaggttttggaattttttcaaattgactggtttcacagttgatcaattaacatgtacccttaatatggtgtggtaattgcacatgcaaaacctgaaatctcattcaaaagctctttcgcaaaaccacgtttgaagcgtttattttgactaattctgtgaactttactcctgcaggttgtttcctgtccttgtgcacttggattagctacacctacagctatcttaataggaacttccctaggtgctaaaagagggttactggttagaggaggtgatgttttagagcgtttggctggaatagatactcttgtgcttgataaaacagggacgcttacagaaggaaaaccagtagtgacttctattgcttctctggcatatgaggagacagaggtccttcgtcttgctgctgcagtggagaaaacagcattgcacccaattgcaaatgctataatgaacaaggctgaactactcaagttggatattccgatcacaagtggtcagcttacatcgcctggatttggttgtttggctgaagtagatgggagtttagttgcagtgggcactttggattgggtgcatgatcgttttgaaactaaagcatcgccaactgaactgagagaccttagaaaccggctggagtttatgttgtcaagtgaagcatcatcatcaaaccagtcgaagtcaattgcttatgttggccgtgagggagaaggaattataggtgctattgctatatcagatattttacgagaagatgcaaacttaactgtggagaggttgcagcaggaaagcattacaacgttcctgctgtcaggggataggggagaagcagtgacaagcattgggaggaccattggaatcaggaatgaaaacataaagtcttccctgactccgcaagacaaagcaagcattatatcaactttgcaagcgaagggacacagagttgcaatggttggtgatggaataaacgatgccccgtctttagcagccgcagatgttggaatagccatgcgaactcattcaaaagagaacgctgcctctgatgcagcttcagttgttctactaggcaacagactttctcaggtggtagatgcgctatccctgtcgaaggcaacgatggcaaaagttcaccaaaatttggcctgggcagtggcatataacatagtagccattccaattgccgctggagtgctgctgccacaatatgatttcgccatgacaccatctctctcaggggggttgatggcccttagctcaatctttgttgtcagcaattctttgcttctgcagctgcatgggtcgtttcagaacacagaaaaacggcagggtgatctgagctcaagattaaactgaattgttgggtttagtttgacccagccgaaggacagtggtattgaattatagagggttctgatactggttttccagctccggctaattgaactgagtcagaactataagtagcaagctattcgtgtcagtagtagcatgttcctgtactgtttgtcaacccaactatagtagcaagtatgacccagaaggacaataatctaccacggccttcaaaaacattgtaaattagtaatggtactgctgtaagcctgtaaacaaagttaaggcgtatgactatcgttcatggtctagcaatgtgcaacaagctataagcttcatttcacacaggtatgggaagttcagtcaacagaactagtcgaatagcaagcagtacacatagcaactatggccacactataatggcaatcatacccctgaacaatagcatagctaggagattactggcgattcttctacttctacttctacttccatgtgttggttgttctaggcttctagcactcttcgtatccatcgttgttggcccagtgcaccttcttgccgctgctgctccgcatcaccttctcgtcgacggccttcaccccggcctccgcagctgccgccgactcggcctgcacacgcgccatcttcctccctcgctttctcgccgcggccgccttctccgtctcggcctcctggtactccctcgcccaacgccggctcagcacgcatgttgcagctagcgcgacggcctgcgccatgaacatggccagcagcagtagctcctcgaggaacgccagcacgaactgctcccggcgatccctggcggagccgaggaggcggaggctgtggtcgtggcggaggaagaaggccagggaggccagtgcgtggccggacagcgcggcgagcgcgagcgccgtgctcgcggcgaggcagaggtgggtgagctgcgcgtggagcgctgcgagtgcggagagcagggtggtggcgtgcacggagacgagcgcccagccgaagggcgtcggccgcgggcggaggaggaagaccgggccgagcgcggcggcggcgaggacgaggagggagaggttgaggagccagaccagtaggttgggaagagaggagcatctccgtaggctcgagttctcggtggcggacgccat

SEQ ID NO: 91767 - DNA, 2770 bp, Zea Mays
tgttgacgaatcaatgcttactggagagtccttgcctgtagccaaggagactgggcttcctgtattttcaggaactgtgaactgggatggcccgctaaagattagagcaacatgtactggaccatcatcaacaatagctaagatagtccgcatggttgaggatgcccaagcacgtgaagctcctgttcaaaggctcgcagattccatcgcaggaccatttgtgtatactgttatgacgttggctgcaacaaccttttccttctggtgtgctcttgtttttttatttcttctatgaaaatcttatgactaaaaatattgcctttttatccctcacccccttcccaaggtattacattggcacacacttatttcctgaggttcttctgaatgatattgctggtccggatggggattcattacttttgagtataaagcttgctgtggatgtattagttgtttcctgtccttgtgcacttggattagctacacctacagctatcttaataggaacttccctaggtgctaaaagagggttactggttagaggaggtgatgttttagagcgtttggctggaatagatactcttgtgcttgataaaacagggacgcttacagaaggaaaaccagtagtgacttctattgcttctctggcatatgaggagacagaggtccttcgtcttgctgctgcagtggagaaaacagcattgcacccaattgcaaatgctataatgaacaaggctgaactactcaagttggatattccgatcacaagtggtcagcttacatcgcctggatttggttgtttggctgaagtagatgggagtttagttgcagtgggcactttggattgggtgcatgatcgttttgaaactaaagcatcgccaactgaactgagagaccttagaaaccggctggagtttatgttgtcaagtgaagcatcatcatcaaaccagtcgaagtcaattgcttatgttggccgtgagggagaaggaattataggtgctattgctatatcagatattttacgagaagatgcaaacttaactgtggagaggttgcagcaggaaagcattacaacgttcctgctgtcaggggataggggagaagcagtgacaagcattgggaggaccattggaatcaggaatgaaaacataaagtcttccctgactccgcaagacaaagcaagcattatatcaactttgcaagcgaagggacacagagttgcaatggttggtgatggaataaacgatgccccgtctttagcagccgcagatgttggaatagccatgcgaactcattcaaaagagaacgctgcctctgatgcagcttcagttgttctactaggcaacagactttctcaggtggtagatgcgctatccctgtcgaaggcaacgatggcaaaagttcaccaaaatttggcctgggcagtggcatataacatagtagccattccaattgccgctggagtgctgctgccacaatatgatttcgccatgacaccatctctctcaggggggttgatggcccttagctcaatctttgttgtcagcaattctttgcttctgcagctgcatgggtcgtttcagaacacagaaaaacggcagggtgatctgagctcaagattaaactgaattgttgggtttagtttgacccagccgaaggacagtggtattgaattatagagggttctgatactggttttccagctccggctaattgaactgagtcagaactataagtagcaagctattcgtgtcagtagtagcatgttcctgtactgtttgtcaacccaactatagtagcaagtatgacccagaaggacaataatctaccacggccttcaaaaacattgtaaattagtaatggtactgctgtaagcctgtaaacaaagttaaggcgtatgactatcgttcatggtctagcaatgtgcaacaagctataagcttcatttcacacaggtatgggaagttcagtcaacagaactagtcgaatagcaagcagtacacatagcaactatggccacactataatggcaatcatacccctgaacaatagcatagctaggagattactggcgattcttctacttctacttctacttccatgtgttggttgttctaggcttctagcactcttcgtatccatcgttgttggcccagtgcaccttcttgccgctgctgctccgcatcaccttctcgtcgacggccttcaccccggcctccgcagctgccgccgactcggcctgcacacgcgccatcttcctccctcgctttctcgccgcggccgccttctccgtctcggcctcctggtactccctcgcccaacgccggctcagcacgcatgttgcagctagcgcgacggcctgcgccatgaacatggccagcagcagtagctcctcgaggaacgccagcacgaactgctcccggcgatccctggcggagccgaggaggcggaggctgtggtcgtggcggaggaagaaggccagggaggccagtgcgtggccggacagcgcggcgagcgcgagcgccgtgctcgcggcgaggcagaggtgggtgagctgcgcgtggagcgctgcgagtgcggagagcagggtggtggcgtgcacggagacgagcgcccagccgaagggcgtcggccgcgggcggaggaggaagaccgggccgagcgcggcggcggcgaggacgaggagggagaggttgaggagccagaccagtaggttgggaagagaggagcatctccgtaggctcgagttctcggtggcggacgccat

SEQ ID NO: 91768 - DNA, 2688 bp, Zea Mays
tgttgacgaatcaatgcttactggagagtccttgcctgtagccaaggagactgggcttcctgtattttcaggaactgtgaactgggatggcccgctaaagattagagcaacatgtactggaccatcatcaacaatagctaagatagtccgcatggttgaggatgcccaagcacgtgaagctcctgttcaaaggctcgcagattccatcgcaggaccatttgtgtatactgttatgacgttggctgcaacaaccttttccttctggtattacattggcacacacttatttcctgaggttcttctgaatgatattgctggtccggatggggattcattacttttgagtataaagcttgctgtggatgtattagttgtttcctgtccttgtgcacttggattagctacacctacagctatcttaataggaacttccctaggtgctaaaagagggttactggttagaggaggtgatgttttagagcgtttggctggaatagatactcttgtgcttgataaaacagggacgcttacagaaggaaaaccagtagtgacttctattgcttctctggcatatgaggagacagaggtccttcgtcttgctgctgcagtggagaaaacagcattgcacccaattgcaaatgctataatgaacaaggctgaactactcaagttggatattccgatcacaagtggtcagcttacatcgcctggatttggttgtttggctgaagtagatgggagtttagttgcagtgggcactttggattgggtgcatgatcgttttgaaactaaagcatcgccaactgaactgagagaccttagaaaccggctggagtttatgttgtcaagtgaagcatcatcatcaaaccagtcgaagtcaattgcttatgttggccgtgagggagaaggaattataggtgctattgctatatcagatattttacgagaagatgcaaacttaactgtggagaggttgcagcaggaaagcattacaacgttcctgctgtcaggggataggggagaagcagtgacaagcattgggaggaccattggaatcaggaatgaaaacataaagtcttccctgactccgcaagacaaagcaagcattatatcaactttgcaagcgaagggacacagagttgcaatggttggtgatggaataaacgatgccccgtctttagcagccgcagatgttggaatagccatgcgaactcattcaaaagagaacgctgcctctgatgcagcttcagttgttctactaggcaacagactttctcaggtggtagatgcgctatccctgtcgaaggcaacgatggcaaaagttcaccaaaatttggcctgggcagtggcatataacatagtagccattccaattgccgctggagtgctgctgccacaatatgatttcgccatgacaccatctctctcaggggggttgatggcccttagctcaatctttgttgtcagcaattctttgcttctgcagctgcatgggtcgtttcagaacacagaaaaacggcagggtgatctgagctcaagattaaactgaattgttgggtttagtttgacccagccgaaggacagtggtattgaattatagagggttctgatactggttttccagctccggctaattgaactgagtcagaactataagtagcaagctattcgtgtcagtagtagcatgttcctgtactgtttgtcaacccaactatagtagcaagtatgacccagaaggacaataatctaccacggccttcaaaaacattgtaaattagtaatggtactgctgtaagcctgtaaacaaagttaaggcgtatgactatcgttcatggtctagcaatgtgcaacaagctataagcttcatttcacacaggtatgggaagttcagtcaacagaactagtcgaatagcaagcagtacacatagcaactatggccacactataatggcaatcatacccctgaacaatagcatagctaggagattactggcgattcttctacttctacttctacttccatgtgttggttgttctaggcttctagcactcttcgtatccatcgttgttggcccagtgcaccttcttgccgctgctgctccgcatcaccttctcgtcgacggccttcaccccggcctccgcagctgccgccgactcggcctgcacacgcgccatcttcctccctcgctttctcgccgcggccgccttctccgtctcggcctcctggtactccctcgcccaacgccggctcagcacgcatgttgcagctagcgcgacggcctgcgccatgaacatggccagcagcagtagctcctcgaggaacgccagcacgaactgctcccggcgatccctggcggagccgaggaggcggaggctgtggtcgtggcggaggaagaaggccagggaggccagtgcgtggccggacagcgcggcgagcgcgagcgccgtgctcgcggcgaggcagaggtgggtgagctgcgcgtggagcgctgcgagtgcggagagcagggtggtggcgtgcacggagacgagcgcccagccgaagggcgtcggccgcgggcggaggaggaagaccgggccgagcgcggcggcggcgaggacgaggagggagaggttgaggagccagaccagtaggttgggaagagaggagcatctccgtaggctcgagttctcggtggcggacgccat

SEQ ID NO: 91769 - DNA, 233 bp, Zea Mays
gggggctggggagagcgcgcgcaagtggagggagatggcggccaggaaggaggaactcctggtgcggagccggggccgagtcgcgttcgcgtggacgctcgtcgcgctctgctgcggctcgcacgcgtcccacatcctgcactcgctcggtatccatgtcggccacggaacgtttttggatctgttgcataatccttatgtgaaatgtggcattgctacaactgctttgtttg

SEQ ID NO: 91770 - DNA, 1722 bp, Zea Mays
ccttctcgctttcactggtaccaggtggcgaccatacagcacggaactccagttcaccgctgcctttcttctactgttcaccccgcgtgcgctcgctcactcgctctctcccctctggctctgagtggcgctagtgggcgaccgccgccgcgtccctccgtcaggtgcccaggtgtagcctcgtcagcccctccgtcaggtcttcgtcggccccctcgccgacgagcacccaccagccaggcatgagagcgcgcttctagaataatgtctgtgcttacctgcgtgattgaaagcatgggctcatcctgtagcagatcccattctttcgacgaggctgaagcagctgaaaatgcaaagtctgcagacattgaccggaggattttgcaagaaacaaaagccgaacaacacatccacaagctcttacttctcggtgctggagaatcggggaagtctacaatatttaaacaaataaagcttcttttccaaactggctttgacgaggcagagcttaggagctacacatcagtcatccatgctaatgtgtatcagacaattaaaatattatatgagggagctaaagagttagcccaagtggaaccagattcttcaaaatatgtcttatctccagataatcaggagattggagaaaaactatcagaaattggtgccagattggaatacccatcgttgaacaaagaacgtgtacaggatgtaagaaaactatggcaagatccagccattcaggaaacttattcacgtgggagtattctgcaagtcccagactgtgcacagtacttcatggaaaatttggacaaattatctgaagaagattatgtaccgacaaaggaggatgtgcttcatgcaagagtacggacaaatggtgtggtagaaactcagtttagccctctaggagagagcaaaagaggcggagaggtctataggctgtacgatgtaggaggccagagaaacgagagaaggaaatggatccatcttttcgaaggtgttaatgctgtaatattctgtgctgccattagcgagtatgatcagatgttatttgaggatgagacaaagaacagaatgatggagactaaagaactctttgattgggtgctaaagcaaagatgttttgagaaaacctcattcatgttatttcttaacaaatttgacatatttgagagaaaaatacaaaaggtccctttaagcgtgtgcgagtggtttaaagattaccagcccactgcacctggcaaacaggaggtggaacacgcctacgagtttgtaaaaaagaagtttgaggagctctacttccaaagcagcaagcctgaccgtgtcgaccgagtgttcaagatctacagaacaacagccctggatcagaaacttgtaaagaagacattcaagctgatcgacgagagcatgaggcgttccagagaaggaacttgatcgaggatgtggtgttataagccacaagacaagtaactaggatggtgtgaggagcagaaagtttacagtgtcgcggctttggccgattgtgattctttttacatgaggaacatttgttgatctttttgccccaccacaagccagtaaaagtatctgttttgcgctggtcttggggaggtttgggtcgtctccatttccccccaatgttaggacaaaatgtacttaccatcttttggagctctgcctgtttggcctcacaatatcaagttcattcgttgttgtcta

SEQ ID NO: 91771 - DNA, 1538 bp, Zea Mays
atacagcacggaactccagttcaccgctgcctttcttctactgttcaccccgcgtgcgctcgctcactcgctctctcccctctggctctgagtggcgctagtgggcgaccgccgccgcgtccctccgtcaggtgcccaggtgtagcctcgtcagcccctccgtcaggtcttcgtcggccccctcgccgacgagcacccaccagccaggcatgagagcgcgcttctagaataatgtctgtgcttacctgcgtgattgaaagcatgggctcatcctgtagcagatcccattctttcgacgaggctgaagcagctgaaaatgcaaagtctgcagacattgaccggaggattttgcaagaaacaaaagccgaacaacacatccacaagctcttacttctcggtgctggagaatcggggaagtctacaatatttaaacaaatattatatgagggagctaaagagttagcccaagtggaaccagattcttcaaaatatgtcttatctccagataatcaggagattggagaaaaactatcagaaattggtgccagattggaatacccatcgttgaacaaagaacgtgtacaggatgtaagaaaactatggcaagatccagccattcaggaaacttattcacgtgggagtattctgcaagtcccagactgtgcacagtacttcatggaaaatttggacaaattatctgaagaagattatgtaccgacaaaggaggatgtgcttcatgcaagagtacggacaaatggtgtggtagaaactcagtttagccctctaggagagagcaaaagaggcggagaggtctataggctgtacgatgtaggaggccagagaaacgagagaaggaaatggatccatcttttcgaaggtgttaatgctgtaatattctgtgctgccattagcgagtatgatcagatgttatttgaggatgagacaaagaacagaatgatggagactaaagaactctttgattgggtgctaaagcaaagatgttttgaggtccctttaagcgtgtgcgagtggtttaaagattaccagcccactgcacctggcaaacaggaggtggaacacgcctacgagtttgtaaaaaagaagtttgaggagctctacttccaaagcagcaagcctgaccgtgtcgaccgagtgttcaagatctacagaacaacagccctggatcagaaacttgtaaagaagacattcaagctgatcgacgagagcatgaggcgttccagagaaggaacttgatcgaggatgtggtgttataagccacaagacaagtaactaggatggtgtgaggagcagaaagtttacagtgtcgcggctttggccgattgtgattctttttacatgaggaacatttgttgatctttttgccccaccacaagccagtaaaagtatctgttttgcgctggtcttggggaggtttgggtcgtctccatttccccccaatgttaggacaaaatgtacttaccatcttttggagctctgcctgtttggcctcacaatatcaagttcattcgttgttgtct

SEQ ID NO: 91772 - DNA, 1725 bp, Zea Mays
gtgcctttccttctcgctttcactggtaccaggtggcgaccatacagcacggaactccagttcaccgctgcctttcttctactgttcaccccgcgtgcgctcgctcactcgctctctcccctctggctctgagtggcgctagtgggcgaccgccgccgcgtccctccgtcaggtgcccaggtgtagcctcgtcagcccctccgtcaggtcttcgtcggccccctcgccgacgagcacccaccaggcatgagagcgcgcttctagaataatgtctgtgcttacctgcgtgattgaaagcatgggctcatcctgtagcagatcccattctttcgacgaggctgaagcagctgaaaatgcaaagtctgcagacattgaccggaggattttgcaagaaacaaaagccgaacaacacatccacaagctcttacttctcggtgctggagaatcggggaagtctacaatatttaaacaaataaagcttcttttccaaactggctttgacgaggcagagcttaggagctacacatcagtcatccatgctaatgtgtatcagacaattaaaatattatatgagggagctaaagagttagcccaagtggaaccagattcttcaaaatatgtcttatctccagataatcaggagattggagaaaaactatcagaaattggtgccagattggaatacccatcgttgaacaaagaacgtgtacaggatgtaagaaaactatggcaagatccagccattcaggaaacttattcacgtgggagtattctgcaagtcccagactgtgcacagtacttcatggaaaatttggacaaattatctgaagaagattatgtaccgacaaaggaggatgtgcttcatgcaagagtacggacaaatggtgtggtagaaactcagtttagccctctaggagagagcaaaagaggcggagaggtctataggctgtacgatgtaggaggccagagaaacgagagaaggaaatggatccatcttttcgaaggtgttaatgctgtaatattctgtgctgccattagcgagtatgatcagatgttatttgaggatgagacaaagaacagaatgatggagactaaagaactctttgattgggtgctaaagcaaagatgttttgagaaaacctcattcatgttatttcttaacaaatttgacatatttgagagaaaaatacaaaaggtccctttaagcgtgtgcgagtggtttaaagattaccagcccactgcacctggcaaacaggaggtggaacacgcctacgagtttgtaaaaaagaagtttgaggagctctacttccaaagcagcaagcctgaccgtgtcgaccgagtgttcaagatctacagaacaacagccctggatcagaaacttgtaaagaagacattcaagctgatcgacgagagcatgaggcgttccagagaaggaacttgatcgaggatgtggtgttataagccacaagacaagtaactaggatggtgtgaggagcagaaagtttacagtgtcgcggctttggccgattgtgattctttttacatgaggaacatttgttgatctttttgccccaccacaagccagtaaaagtatctgttttgcgctggtcttggggaggtttgggtcgtctccatttccccccaatgttaggacaaaatgtacttaccatcttttggagctctgcctgtttggcctcacaatatcaagttcattcgttgttgtct

SEQ ID NO: 91773 - DNA, 1389 bp, Zea Mays
gtgcctttccttctcgctttcactggtaccaggtggcgaccatacagcacggaactccagttcaccgctgcctttcttctactgttcaccccgcgtgcgctcgctcactcgctctctcccctctggctctgagtggcgctagtgggcgaccgccgccgcgtccctccgtcaggtgcccaggtgtagcctcgtcagcccctccgtcaggtcttcgtcggccccctcgccgacgagcacccaccagcagatcccattctttcgacgaggctgaagcagctgaaaatgcaaagtctgcagacattgaccggaggattttgcaagaaacaaaagccgaacaacacatccacaagctcttacttctcggtgctggagaatcggggaagtctacaatatttaaacaaataaagcttcttttccaaactggctttgacgaggcagagcttaggagctacacatcagtcatccatgctaatgtgtatcagacaattaaagtatgctatactaaaaaggatattatatgagggagctaaagagttagcccaagtggaaccagattcttcaaaatatgtcttatctccagataatcaggagattggagaaaaactatcagaaattggtgccagattggaatacccatcgttgaacaaagaacgtgtacaggatgtaagaaaactatggcaagatccagccattcaggaaacttattcacgtgggagtattctgcaagtcccagactgtgcacagtacttcatggaaaatttggacaaattatctgaagaagattatgtaccgacaaaggaggatgtgcttcatgcaagagtacggacaaatggtgtggtagaaactcagtttagccctctaggagagagcaaaagaggcggagaggtctataggctgtacgatgtaggaggccagagaaacgagagaaggaaatggatccatcttttcgaaggtgttaatgctgtaatattctgtgctgccattagcgagtatgatcagatgttatttgaggatgagacaaagaacagaatgatggagactaaagaactctttgattgggtgctaaagcaaagatgttttgagaaaacctcattcatgttatttcttaacaaatttgacatatttgagagaaaaatacaaaaggtccctttaagcgtgtgcgagtggtttaaagattaccagcccactgcacctggcaaacaggaggtggaacacgcctacgagtttgtaaaaaagaagtttgaggagctctacttccaaagcagcaagcctgaccgtgtcgaccgagtgttcaagatctacagaacaacagccctggatcagaaacttgtaaagaagacattcaagctgatcgacgagagcatgaggcgttccagagaaggaacttga

SEQ ID NO: 91774 - DNA, 1286 bp, Zea Mays
ctcaaccacttttcccttgcaaatctgcaactgcaatgcccattttcgccaccaaacacgctctctttaagctaaccatcgcgccccccgttctcttagcacgtacacttgcacacactctgcaaactgaaggtgccggactagtagctccgtgtcactgtcaccaaccagagccagagccatgggggccagcctgagcctggtgccggtgctcgactacttcgcccgccgcgagtgcctgcgcgccggcctccaccagaacgccgtcacgctcccgtaccccgacggcggcgccggggcgacctgcaccgtccagtactgggctccgcagggggagcctgagctcccgccgctcctgctggtccacggcttcgggccccgggccgactggcagtggcgctgccaggtggggccgctctcgcgccacttccacgtcatcatccccgacctcctgggcttcggcggcagcgcgtacccgtccgagacggcgccgccgccgacggaggcgacgcaggccgcggtgctggcggcgctgctgggcgcgctgcccgggatggagcgccggcgcgtggccgtggcgggcaccagctacggcgggttcgtggcgtactggctggcccgcgaggcggggcccgccagggtcggccccgtggtgatcgccagctccgacctgctcaagacggctgccgacgacagggcgttcctgaagcgcgccggcgaagggtggggcggcgtggacgagatcctcctccccgccgagcccgccgcgctgcggaagctcctggagctggcctcctgccgcccgccgccgcggctggtgacgccggacttcctgctccgtgacttcatccagaaactcttcacgcagaacagggagcggcttgtccatctgctgaaggggattacggtcgggacagagaagttccaagtgacgccaatatctcaggaagtgctgattgtatggggagaccacgaccagctgttcccggtggagaaggcgtttgcggttcagagggctctgaacgggaccgctaggctggaggtgataccgaagacaggccacgctcctcagctggaggatccggctcgcttcaacaaggtcatgctggacttcttgctggcttctcacaagcctgacccctcggttagtggtagcgcgcaataatttaccaaggtgcattggcgattggtcagtggtagccgactcgattgtttgtaataagatcgctggacaggttcagttcattccattaaatcaatggtaaatttcaaaaaggaaaaaaata

SEQ ID NO: 91775 - DNA, 1659 bp, Zea Mays
aattacgagaagggcagggcaggtcgggatggtctctctctctcacccccaccgatctgggaaggcattgtcttgttgtactttcccttccggcagtggcctcgattcgcatctccttttcccgtccatgcgcgcgccggcgggcggtgccagtgccaccgcgctcgcggcggccatgaacattaagcagccgctgcacggcgcatcgacgctgttcgcgctgctctccctctcgctgctcctcctccgcctgctcctccggctccgcctggccgccttccgcgacgcggcgctgtcgctccacctgctggcgcgcctccgcctccgccccgtcctcctctgcctcccgtcagcctgccacgacggcggcgccggcgccggcgccaccacgctgcgcgtctggtgccccgccgccccatcctccaagccgccgctgctcctcctccacggcttcggcggggacgccaagtggacgtgggcgcgcaacctcccgcgcctgtcccgccacttccacgtgtacgtgccggacctcgtgttcttcggcgcgcagtcccggtccgcgtcgccgctgcgctccgtggcgttccaggcccgctgcgccgccgaggccatgcgcctcctcggcgtgccccgctacgacgtcgcggggatcagctacggcggcttcgtcgcctaccggatggccgccgccgaggccagggacgccgtgggcaggctcgtcatcatgaccaccggcgtcgcggccacgcccggggagatgcgggcgatggcggcgcgcgaggaccgcaccgtcgaggatgcgctgctgccggacaccgccgaggggctgcgcttcctcgtaagacgctccatgcatcgccccccgccttggatgccggacttcgtgcttgacgacttcatccagctcatgtacgtggaccagaaaagggaaagggcagagttgctgcacgaactgctcaagaccggagctggcttcgaccccctcccggttcttacccaggaaacactgatcatctggggcgacaaagaccaggtgttccccgtcgacctcggccacaggctgcacaggcttctgggcgagaggtccaggctagagatcgtcagggacgcagggcacgcgctgcagctggagggcgccgaccacgtcaaccgctccatcaagtcgttcctcctggacgagcgggtcggcccgggagccggcgcgggccgcaagtaggacgaggccttctcccgtccaggcccacaaccaaacggaggcctgctcgcaggtgcctgcgtacttgcgttgcagagctgcaacagtgcgaacgccagctgtagttaagcagcggagcggcaatgacctgcacgcacgcagacgcccccaccgccccgcaatcatgcagcgctggggctactggttacaaaagtacagagaagcgtcgctccggactagtttgttttgtacaataatgtctgaaagaacgagcttgtgcggccgaaattcggagagctgtctttatctggtgcgcacagtctgtctctttgtttcttcatgctcagcctcatgagataacgatatatttatgacagctccaacaataatttgtaagctaaattcaagcattttattttatatttcaataaagaaagggagaaaagctacctcctgatcaaaaa

SEQ ID NO: 91776 - DNA, 429 bp, Zea Mays
ccccaaccctatccgccgctaccctgctccctctcccaagccgccgccactccttctccctcccctttctctctattctctctctaccgcccacctctctccacatcctcttcccaagccgcgccgccagaagctgccatccagcgcccctgccccgcacctacgcacccgcagaagtacacggtcgccaccacctgccctaggccgcagaagggagcgttcgccgcccgggtgctgtctaaacgcaggcacaggtggacgggcaggttcgaggcgcatctctgggacaagcactgcctggccgcgctccacaacaagaagaaaggcaggcaagtctacctgggggcgtatgacagcgaggaggcatctgctcgtgcctatgacctcgcagctctcaagtactggggtcctgagactctgctcaacttt

SEQ ID NO: 91777 - DNA, 907 bp, Zea Mays
gccagagcgatcagctccaccaatcgcagctccgctgccctgctctccacctcctccagacctccaccatggacgagccgccgctccatccaccgcccctcccccatgccctcaccaccgccgagtaacacctcctcgccgccgcccttgccttgacggattcgaataattcgtggaagagaagttcttattcccttgccttcagccgtactgcggcggcggaatctctctctggacttctccccgatgtccgtggcggccgagcaggaggtggcgccggccgtcgtggccgtggccgaggcggaggagtgggaggtgtgcgcctgctgcgggctcagggaggagtgcacgccggcgtacgcggccggcgtgcgcgcgcggtacggcgggcgctggctgtgcgggctctgcggcgacgccgtgggcgaggaggtcgccgccgggggcggctcggtgctggagctcgaggcagcgatcgcggggcacgccgccttctgccacgcgctcggcgggcgccggacgccggccgcggccgagcggctcatcgccgcggtgcggcggctgctccgcggcgccgacgcgggcggcaaggaggaaaaagccgtggtggtggtggagttccaggaagcctcttgaccgcctgcctgaatttgaatgggacggatcgaagatttgttcttgcaggcggcgctagctagctactctgctagtcctcttttcgtaatttgcattttgattagttctcaatatttgtatgcttaaattcggacatgaacgctgaaatttctccaacccttgtacacgccctaggagatgtggaacatcagaaattttggagaaagagggttgtgagagatttgaagtatatataaaagctacaagatgggagaatcccatctttcatgtc

SEQ ID NO: 91778 - DNA, 1149 bp, Zea Mays
tcttgcggaataagaagaggagtcgcggcggcgtgtatagtcagtcgtgtgcccgagccgaggttccccaaacacgcacagcacacgaacacacaccgcgcccagctccgaggtgatcttccggcggccggcgagatgagccgtggcacaggcgcgggctatgaccgccacatcaccatcttctccccggagggacgcctgtaccaagtcgagtacgcgttcaaggcggtgaagtcggcgggtgtcacgtcgatcggcgtccgcggcgcggactccgtctgcgttgttacgcagaagaaagtcccggataagttgctggatcagacgagcgtgacacacctgttcccgatcaccaagtacgtcggattgcttgccactggccttacagctgatgctaggtcattggtttcccaagcaaggaacgaagcagctgagtttcgtttcaaatggggctacgagatgccagttgatgtgttagcaaaatggattgctgacaaagctcaagtttacacgcagcatgcatacatgagaccccttggagtagttgctatggtcttgggctacgatgaagagaaaaatgcccaactattcaagtgcgaccctgctggtcacttctttggacataaggcaactagtgccgggctcaaggagcaggaagcaataaattttctggagaagaaaatgaaggatgacccgaaattcacctatgacgaaactgtgcagattgcaatatctgcgttgcaatcagttctccaggaagatttcaaggccactgagatcgaagttggtgttgtgagaaaagatgaccgcgttttcagagctctcacgacagaggagatcgatcagcacctgacggcaattagtgaacgtgactgagatgtcatatgctgcacatttcagcgctgcacacactgcgccgtgccattgtgcttcggcagtcattaagtttcatagtcatcaaaggaactgagtgtaccatttcacgtttaagaccgaaaacaagccccctctcgatgtactcgtttcatatcgttctgtggttgattgaaattggcacggtttggttttgggttgctaaaatgctaactatatttgcatgtggccaatattttaaccgtttatatcagtgtttgttctgagtccataaga

SEQ ID NO: 91779 - DNA, 1095 bp, Zea Mays
tcttgcggaataagaagaggagtcgcggcggcgtgtatagtcagtcgtgtgcccgagccgaggttccccaaacacgcacagcacacgaacacacaccgcgcccagctccgaggtgatcttccggcggccggcgagatgagccgtggcacaggcgcgggctatgaccgccacatcaccatcttctccccggagggacgcctgtaccaagtcgagtacgcgttcaaggcggtgaagtcggcgggtgtcacgtcgatcggcgtccgcggcgcggactccgtctgcgttgttacgcagaagaaagtcccggataagttgctggatcagacgagcgtgacacacctgttcccgatcaccaagtacgtcggattgcttgccactggccttacagctgatgctaggtcattggtttcccaagcaaggaacgaagcagctgagtttcgtttcaaatggggctacgagatgccagttgatgtgttagcaaaatggattgctgacaaagctcaagtttacacgcagcatgcatacatgagaccccttggagtagtgcgaccctgctggtcacttctttggacataaggcaactagtgccgggctcaaggagcaggaagcaataaattttctggagaagaaaatgaaggatgacccgaaattcacctatgacgaaactgtgcagattgcaatatctgcgttgcaatcagttctccaggaagatttcaaggccactgagatcgaagttggtgttgtgagaaaagatgaccgcgttttcagagctctcacgacagaggagatcgatcagcacctgacggcaattagtgaacgtgactgagatgtcatatgctgcacatttcagcgctgcacacactgcgccgtgccattgtgcttcggcagtcattaagtttcatagtcatcaaaggaactgagtgtaccatttcacgtttaagaccgaaaacaagccccctctcgatgtactcgtttcatatcgttctgtggttgattgaaattggcacggtttggttttgggttgctaaaatgctaactatatttgcatgtggccaatattttaaccgtttatatcagtgtttgttctgagtccat

SEQ ID NO: 91780 - DNA, 498 bp, Zea Mays
atgaacaagctagtgaagagtgcccatgtggatgcaaacacaccgcttcatcaatttgcaaagcaaatgatgaagcttctgcatagtaggaagatgaaagaggccaaagaggcactaggatgcatgaaactgaagtttcatatggaaggtgtaaacttagcaagaccagataaggccaagcctaagggacgaacgatcaaaagtagcgagcaacaagttcttaggttgggtgtgaaaggagcaaagaagatgagcagaaagtgccaaaagtgtggcatcgctgatggtcacaacagtcgtacgtgtttaactgtggaggataataggattcgattggctaacctagctggacgcaagagaggacgaccttctggttcaaggaacaaaattggaggtgcaacaccaaagtggaatgagacatcaacgtcaaaaaacgaacagtgtatgtcgaagatgatgattcatctggtagagagtagaataccaaaagaattatga

SEQ ID NO: 91781 - DNA, 1148 bp, Zea Mays
accttaccttcggtggacacgttttccctctcgctcagcagtcaggaccagaggcccggggcctctctccctctgctcgcgtcgcgtctcgcactctcgcctagtcgcctagcaggctagcactgctcctccacctcgtgtcgcactactcactggagtagtaagtatatagaaccgtctccacatctccacaacctccagggggtccatccatcattccatcgtcgagtcacgtctcgtgcgtgcgcagcccaggaacatcgagcccccccacgccgaccggcggcctgccgtgagcacgttgccgatggctgccatgcccacggacagcatcacccgccgtttcgccgtcgcgtgcggcgtgctcagccagcacgtcaggaacggcggcgcgccgttcctgacgaagcatgcgcaggccggagccggagccggagccggacccgccgcagcccaggagatgatcgccggctcgccgcagcagctgaccatcctctacggcgggagggtggtggtgctgctggacgcctgcccgcccgagaaggcggccgagctgatccgcctcgccgccgcggccgcgcagcaggggccgcagccgccgccggagcaggcgcttgtggacatgcccatcgccaggaaggcctcgctgcggcgcttcctcgccaagcgcaaggacaggtcctccttctacgaggacgacgagacgcccgagcccaagaagggcaagatggcggcggcgagcgaggagcattcctcttcttggctcgcgctcggcagcctgtgctccatgcacggccgctgagatcgccggacgtggttcgtgtctgtcgacccggccattggaggcgttgtaggcttgtactgtagcagcaatttacttatgcttgtgctacctacgtaattacccctacctactatcatatgcgtgctccgtcggagagcgacagcacgtactattcgttcgtatccttcgttggtggtggtggtggtggtgtatcatctatctattctaatctaaccagacatgtgaacctcagcgacaggagatgttcagcggtgtgtgttgttcatatgctttatttatcatttatttttggcgtcaggtttgttgtccttgttgcttggggaatgaaaagccattaaactct

SEQ ID NO: 91782 - DNA, 1350 bp, Zea Mays
agtacatgcgtatgcgtatcaatttcagaagcatcggccggtgcttattttgatcaatcgaaacacaacagcaacatctattgccaaccgtcgagtcttgtaatatcaaaagacattaaaattgcacgtacataaggctcacacaggaccggaccggaccggagtacttccattatggtagcacagcgtacgactccctcccttaaccgctacttaaacaacaagcaatagtgcaatacaaacgaacaaagttcaaacgtaccttcagaacggtatagtaacacttggtgcatgcatgcaaatcgaccgactgcgtcctataccatatcatatccgatccatcatgcatcggtgaagtgcagcactgcactggtagatagcgaagcgagcgatagatagatagcagccattgcattgcaggtacgtgctaggcgtccatgcgcgccgggtactggtcgatgcagtccagccaggggctgcgcgcggggcggcgcacgcggcggacggcgcgccacaccgcgctgttgcacttgaagcccgacccgaaggcgagctgccagacgcggtcgccgcggcggacgcggcccttggcctccaggtacgccagctcgtaccagatgctgctgcttgaggtgttgccgaagcggtgcagcgcggcgcgggaggcctccaggtcggcgtcgcgcaggcccaggttgctctgcaggtgctccagcacgtcgcggctggccgcgtgcatgcagaagtgctcgaacgcgcgcttgaagtccgggatgtagggcgcggcggccgaggcgtcccctggggtggtcggcggcgccggcgtggaggccttggacgggaacaggtggcggaacagcacgcccgcgaagaagagcagctgctcggagaagggcagcaccaggggccccagcgtggtgatgttggtcttgagcgcgtggccgcccacctccagcaggtcgtaggtggcctccccccacaccttgcgccacagctcgtcgcggctgaggctgcccagctcggcgccgcacaccagcacgatgacggggatggtggccaggtacacgccgtggctgatgaggtagtggtacccgaggcgcacgtacttgaggttcaccgactgcaggaagtccggcaggcggcggcgcacgcgcaccgagaaggccggcgagccggcgtccgggcccgacggctccacgccgcggttcacgatctccgtcgacagcagcgcctgctcctcccgcgccatgatggccgagcgatcgatcgatctatcgaccgaccgaagctagctcgcgcgcgctgctgctgcagctggtatggatccggggcagtggtggtggtagtgag

SEQ ID NO: 91783 - DNA, 1471 bp, Zea Mays
tctattgccaaccgtcgagtcttgtaatatcaaaagacattaaaattgcacgtacataaggctcacacaggaccggaccggaccggagtacttccattatggtagcacagcgtacgactccctcccttaaccgctacttaaacaacaagcaatagtgcaatacaaacgaacaaagttcaaacgtaccttcagaacggtatagtaacacttggtgcatgcatgcaaatcgaccgactgcgtcctataccatatcatatccgatccatcatgcatcggtgaagtgcagcactgcactggtagatagcgaagcgagcgatagatagatagcagccattgcattgcaggtacgtgctaggcgtccatgcgcgccgggtactggtcgatgcagtccagccaggggctgcgcgcggggcggcgcacgcggcggacggcgcgccacaccgcgctgttgcacttgaagcccgacccgaaggcgagctgccagacgcggtcgccgcggcggacgcggcccttggcctccaggtacgccagctcgtaccagatgctgctgcttgaggtgttgccgaagcggtgcagcgcggcgcgggaggcctccaggtcggcgtcgcgcaggcccaggttgctctgcaggtgctccagcacgtcgcggctggccgcgtgcatgcagaagtgctcgaacgcgcgcttgaagtccgggatgtagggcgcggcggccgaggcgtcccctggggtggtcggcggcgccggcgtggaggccttggacgggaacaggtggcggaacagcacgcccgcgaagaagagcagctgctcggagaagggcagcaccaggggccccagcgtggtgatgttggtcttgagcgcgtggccgcccacctccagcaggtcgcggctgatggacaggcccttgatccgctgctcgtcctcctcctggtacacggagcggaaggcgcggtcgtccgcgcccttgtgcgtgcgcaccacgtgctccagctggtacttggcgcggtggaagtcgcggcgccggttggacagcagcaccgccgcgcagccggcccggaagaaggcgttcgggatgagcatggagcgccgcttcccggggtaccacgtgaaggagacggcctccgtgctgaccaccacggccaggccagcgccgctggcctggagcatgtcgcgggccaggtcgatggcgatgacgcccgcgctgcagcccatgccccccaggttgtagctcaggatgttgccgcgcatcttgtagtggttgacgatcatggcggacagggagggcgtcgggttgaagaggctgcagttgaccaccagcacgcccacgtccttgggccggacgcggcacttgtcgaacagctcgtccagcgccgcgaacatggccgtggacgcctcggcgcggccctccttcatggtggcgcagctggcgttgggctcgaacacgcagcgcggcatgtacgactcgtcgccg

SEQ ID NO: 91784 - DNA, 178 bp, Zea Mays
tttttttttattttttcttattctggttttattgtatgtttttaaaattcttatttcaaattaaaatcttgttaaaagtttcgagcatagattaaatacacaattacaaagttctcaccataaatgcaaatatatttatatatttatttaatctatccatttatttaggctatgttgc

SEQ ID NO: 91785 - DNA, 424 bp, Zea Mays
ccttgcgcctccgcccgtgccctgctcccaccgacgtcgcctcctcgctgggccacggattccctccggattgacggttgcgccgcctggccacgtcgtcggatcggcggtgcagcgcgcggtgcaggagatggtggaggacccgctcggttggtggcccgggtgggagttcttcaggctggccggtgacccggcggttcggcctgaacggttgatgaacatgtcggggtcaccggccttcagggcgtacgaggtcgccgacttcgggtgggggaggccgaggcggacgaagcccatcaggatgaaccacgacgggcagctggcaccggtgcgcggtagggacggcgacggggtgcaggcgtcggtgtccatgctccggcggaagcacgcgaacactttcaaatcagagttctccgctactttg

SEQ ID NO: 91786 - DNA, 302 bp, Zea Mays
gggacttattttataaacttgatctcacaaactttctcttatttggtctctgtatgatggaattatgtcattttataatctctgttcattcagtcaatcgttgtgaactctcttctaatcgctcacttcattggccgtgttgtactaaggcatatttacatggagtaaacaataacatcagttaacaaaattaaaaaatatattatacagagagcggagacaatcaataaaaattcttgatttttttatggatagtttacgtgggtattgttgtaagccgtcgcaacgcacgggcaaccgac

SEQ ID NO: 91787 - DNA, 181 bp, Zea Mays
ctatatctatactatacttaaagcaccagtttcaacggtcgtcgtgcgtcattttttaacaaataaccctcacagatatttcaaattaatccgttgcacgtctatagatgccaaacgacgcccgacacgggctagatgcacgcggggcacaattatggcacaaacacgtcatgccggcctg

SEQ ID NO: 91788 - DNA, 1105 bp, Zea Mays
acacgatgtcgtggcctggcctctgtctctccacgccgccgctagccagagccaagctactgctttgcttcctgctgacttgctcatcgccgccgctagcctagcccgctacaggctatagcctacgccctacagcttcccgcaatcctgctcgtgccgctactagccaccgacagccagccgcgcggaccgccctccactaccagctgcgacgtcggccgcgacggcgccctcgacgtcgactgtgtgcccgtgacgccgccctcgacgccggccacaaggacgcccttgacgccagccgcgacgctggccacaaggacgccctcgacggcagccacaaggacgcccttgacgccagccgcgacgatgccctcgacgctggccacaggcctcccttgacaccaacacaaatatttgtgcacagagccacagactagagcgccctcgtcaccggccagaccagatcagctagctgttcagctttgaaacgaccaacacttgtgcgcagacttgagcgccctcgacgtcgcccacggctctggagtctgctccatttctgagatgacgcagccggttggaagtaatgctccctcaggctcagccatgagattggccaagttgatgtctaccacaagagcaccttctactcgcaaaacaaattcgatattctctgcatatgctcaagggttgaaaagaaaagctgaagcctcttctagtcggattcggaatgtacgtgcacgcgcgcgcgggcatggatatggccgcacatcactatcatcctcaacagctgaggccgagagacattttattcagagtgtcagcagtagcaatgcaaatggtacaactacaaatccgagtcaagatgttgttgctattgttgatgaaccacaaatccgagacattttattcagagtattcagacattttactgctgctgttgtacttctgtggtgcatactgcttgctatcttgctattttacattactgttggtgtgtactacttgttgctgggacatactgcttgctgccttgttattcacttgactgttggtgcatagctgttgttgtttgatactacttgcatactaattcatgttggatgta

SEQ ID NO: 91789 - DNA, 186 bp, Zea Mays
atgaaacagacaccgccaagaaacccaacaagtaccagatatttatacttctgtagcaaactaactatttacaacagaagtgttctttacctatggtttgtttgttttttccttttcctaatagattttccattgtttttccttttgatacttttctatggagaagggaaacgcaaggtaagctaa

SEQ ID NO: 91790 - DNA, 1976 bp, Zea Mays
atgaggaattacagcaaacttgtgagcatcaggcttggcgggaagcagctagagggagggacggcttggaggcctgataaaacaccaaggataggctatagatggatccgacagttcctagccccctgctattataccctcttgctgatgccaggttttattgaagttgtatattattatttcttctctagccaagttcatagaagtgttgtgtatggagatcagccaaaaaacagcgatgtgcacatgccagacatggatggctttaagcttctagagcttgtggggcttgaaatggacatccctgtcattaaaactgtgcccaaaggatacttgaactcatgaatgttgacagactcaccagggaaaatgttgcaagtcaactgcaggcaaggcaattagggacttaaccccactctatttagtttagccgcctcatcgccctaattaagcaagtagtactgtttaggcattatatacaacgggaattcatgacaagcgcatatataatatatttattgaagtgttctttgtttttttgctaatcaatcaatcttataaacgtggaagaaaggacacagtttgttccatagctataaatgtggaagaaaggacatgtgaaaaatgaagccttagcaatttcagaaactccagctaaaagcactgctactatgccgccaacttaaattaaacaaaaaaaggaatgcaacatgatctagcgaaatgctttcctgtatgaagtgtatgacagaatgacaatgtgatgttggccttttgcaaaactttgttcagaacggattgcctaatctatgaagctaatcatttaagcttgattgcttaaaaaagaaaaagaatcaatgaaccaaattaacccaacgcacgcaatagttaaatgatgatattagtaaaaataacgcctccttgcacacaaggcaatcagtttagccaagctaattgtacaagctgtgattagagctcaggaacaagcaaaaagttgacatttattgagttataaggaaaacaacaaggaccaagggcaatgtgcatcatttgagcacctagagctgttcctaaagcaactattcagcaggatttagactctagtttttatttaaaatatgtcattgcagttatgccagtgtcctaatcttttttctctactacttttggtcatagaggtgacgttggtgaggggtttgggtgttggaggggttccaaagcctttgcccaacataaatggggctttcactgaatatagttaataccacattgcaatatagtaaatgtttgcgtactttatggaccaaacaaaatgtttgcttctagcacctgcttgtacaacgagattgcctgcatctaacatcataagaaattctatcgaaggggaaaacaaatcataatgtgttccttttatgcttaacttcagtaataaaaaggcatgcttttaaaaaaataatcacacaattaagaaacaaacaccatccaacttgttgtcctaatcgaaaactaatcagacaatacatgcaaaagcagaaagcacaactaaagttaagtaacacaaatagttactttaaaaaaaggattattattgtgcggcatgatatccgaaggcttgatgtgagttcaagtgcaagtggacagccatatctgaagtctactatctttgccttgaagccttcaaacaagatgatattaattgttctattatccctatggacaatggactgatgaactttcccatgaaaatatcgagtccttttgtagcgtcaacaacaatttgcactcgctgcatccaaccaaacgttgggccaggtcgagcaccttgaaatacttttcttcctattgacatgaattagaaaacaatattgcaagttaccagtcgaaacaatagtgttcaattaactgtggagttatgcagcaagatgcagaggatgtgcaaaatcataccatgtagaacatcatggagagaacccatg

SEQ ID NO: 91791 - DNA, 1306 bp, Zea Mays
ttatcagatcccctcataactcattgcatccccttgaacgcggccacttccagacactgatcccgatccggctatccatctcctcctcttcgttcgcgctgccagccccaatcactgacatccccttcaaccatggcggcggcggcagcagtcggaggtgcggtgcgcccgctgtcccagaaggagcaggacatacagatgatgctcgctgccgacgtccacctcggcactaagaactgcgatttccagatggagcgctacgtttttaagcgacgcaccgacggcatctacatcatcaaccttgggaagacatgggagaagctccagctcgcggcaagagttatcgttgccatcgagaacccgcaagacatgatcgttcagtctgcccgcccctacggccagcgtgctgtcctcaagtttgcacagtacactggcgcccatgccatcgctgggaggcacacccctggtaccttcaccaatcagctccagacctccttcagtgagcctcgcctgctcatccttactgacccaaggactgaccaccagccaatcaaggagtctgctctggggaacatcccgaccattgctttctgcgacactgactctcccatgcggtatgttgatatcggcatcccagccaacaacaaagggaggaacagcattggatgcctgttttggcttttggccaggatggttttgcagatgaggggcactatcctccctgggcacaagtgggaagtcatggttgatctattcttctacagagatccagaggaagcaaaggaacaggaggaggaagctgccgtggcccctgagtttgccgcaatcactgattaccaaggggctgatcagtgggtgggtggtgaccagtggaccgctgatgtggctgcgccatctgttgctcctactggtgctgaatggggtgctgctccagctccggttcctaccggtgatggctgggatcaaactggggcccctgtacctgctgatggcgctgttcctcctgtgattgctcctactggttgggatcaagcagcccagcccactgcccaaggctgggagtaggcgtagagtcatcactcagacgttttttctggggcttcagttcagtattattccaaagtacgtgtgtccgaagtcagacaacatttttgtagctaactagctatgctttgaacacttctgttttagggctttttagttgaactggcgcccctgttttgttttttaaaattgctgctgtgaaagagcttgtgaagatgtggtataagtagcccttctgttttgtgttgatcgcgtttcatgg

SEQ ID NO: 91792 - DNA, 693 bp, Zea Mays
atgtccacccttgcgtgggcgacaaccgttggggccgcgacaggaggccgagcgggggccccggtcgatgaagtgtgggggcctatccccggaagatgcctgagcaccagtggtagcgctgtagagggccagggcctcaatcgtcatggtgagctcctcgagaagaagctcattccacacagcatggaaggtactgtctgccatcggctcaccaagatcgcggagggagtccgtgaggcccttcatctggcagcagtactcccccacggagaggtccctctgagagaactggtggaactgggcatcaaggtgaagggcccaagcgtcacagttcccgaggaactgttcctcgagagcgagccacgcctggcgacctttgtccgcctagtctcggatgatgtcctggagctcgacgatgatggtgttgtggatccaccagagaaccatggtgtccatcaggtaccaggacagaggcgacggggcgacgatatcctcgagggcgtggtcagcgagagcatagtgccgaagagtgaggaggacctgcccccgccaaagagggtagtgggaggatgcccggtccaacacgatggacacgagggaccgaatgttgtggagtccggcagcctaggcgtggagagcggtgatgtggtcgacgtcgagtcaagaggcgtggggggcctcgggggtgggtga

SEQ ID NO: 91793 - DNA, 886 bp, Zea Mays
gctcaagtcccagatactgagcctggacgcgagctcccttctcacgctggcttgggcgctgttgctgctcttccatgccttgagctgcttcctcacgcgctcgaccgaccatctgtcgctgctccatcgcacacgttccagctcgccggcctggtaccgtcttccaactccacgctttgccatccgccgacctcgttggtgagggctgacgtcgtcctgcagcttccacgccgtgccgacgctcgtcgtgcagccttgcttgttgtgcttgccgcagttccccatcatgctgtgagctgcaacatgctcatggttgttgtctcctcatcggccacgctcaacctcgcagctccttcgcgtcgttgatttccttgacccacagcctctcttccgacctcgtcgtgctcgcggtgtcatcgtaaagctgctagctgcctgtctcgctgttcctcatgcccagcaggccgtcatgctcggcatactttctccatgtggttctctcgcttcatcggctttccgcgtgttagagcaggtatggttcggatatatacgtaaatgtgggagaaagtccgagaaaaatgggcatctaatgtgttcgtgtaaaatgaagttgtttagcatgttttggatggttagatgagttctaaggataagtagctccctggtagttatggcttttggtgatagcttgtaattgtaatttcgtaatgcttcgtaataccttccttgctagtagcatagacacaggcattcataatcatgacatttcatatagagtaccaagaagaagtgatttgtgaagaaggagcctgttctagttctgctgatccagtggtggattccatctaactgcttatcgtaatagaagatctcagatttcctactg

SEQ ID NO: 91794 - DNA, 123 bp, Zea Mays
tttttttcttttctccaccaaactttctctactgtgttcctacactatatatacctacatgtccaattttggcataattatcaaagtgtttgctataattattagatttagttagtttaattg

SEQ ID NO: 91795 - DNA, 1121 bp, Zea Mays
ctttttggcaacggctctgcttcggtccgcatacgccttccctctgaaaactcttcattctcctctcctccgccgcgccgccaacttcccctcccgtcaactccggctcccgacagagcaagaggcggagaactacacggtggaggaccttgtggccctgaatccgtacaaccccgacatcctcaacgaccttgagaagttcgtcaacgagcaagttgcgtctcaaacatataacttggatgcaaatctcagccttcttcgcctgtaccagtttgagccaggaaggatgagcatacatattgtggcccacatactgatcaaggctctcatggcaatgccggcccctgacttcagtctttgcttattcttaattcctgaacatgtgcaaatggaagagcaattcaaggcattgatagttctttctcactatctagagactgctaggttcaggcagttttgggatgacgcagcaaacaaccgccacatattggaagcagttccaggttttgagcaggcaatccaatcctatgcaattcatgtactttccttgacataccagaaagttccaaggcatattcttgcagaggcaatcaacattgaaggtctcgctttggacaagtttcttgagtaccatgctgcgaactcaggttgggtaattgagaagggtgggcagtctcaagtgattgttcttccacgcaatgagttcaatcacccccagctcaagaagaacacagctgataccgttccatttgagcacctaacacgcatattccctgttcttagctgattcaggcgtagtgagagatatacaatagaactcagagcgagtgaagcttctctaagcaattgtatcatctcctttgtggtataccgtattttaagatctcggtatacctgttcttttttatggctgaattggtacctgcaacttggtttttactataacgaaatgaccagttatgagattggtcggccctaaatcctaatgcttgcaatgctgctgaactactgatatttctgagaagactcatcttttaaaagcggaagatccattgttgtgttgggaatagggtgacatgacaatgggctctaaattttacactataaaatttaaggcttag

SEQ ID NO: 91796 - DNA, 1500 bp, Zea Mays
cgggcctttttggcaacggctctgcttcggtccgcatacgccttccctctgaaaactcttcattctcctctcctccgccgcgccgccaacttcccctcccgtcaactccggctcccgcgcgagatcgagctagcgtttggggttctcgagaccggctgccatggcgacagagcaagaggcggagaactacacggtggaggaccttgtggccctgaatccgtacaaccccgacatcctcaacgaccttgagaagttcgtcaacgagcaagttgcgtctcaaacatataacttggatgcaaatctcagccttcttcgcctgtaccagtttgagccaggaaggatgagcatacatattgtggcccacatactgatcaaggctctcatggcaatgccggcccctgacttcagtctttgcttattcttaattcctgaacatgtggtatgaaaaattacatcctgcacttttagttcaatagtatcagaggtgctgtgtagacctgcaatacagtgtgtttaattgaggcttgtgtgtgattaatgtgcacaatatccaatatttataaatatttggtaaagaagcccccacatccatgcttgaatatatattgtgctctgcgagtttgaaaatttgcaggaagcagactagtctcgcaaatgtcacagatgcagagattccatacaggagctgtcctgttgcctttacattttttggctgcattattttgtcagcatgtttagtctacttgtctgtgtctttgtttcagcaaatggaagagcaattcaaggcattgatagttctttctcactatctagagactgctaggttcaggcagttttgggatgacgcagcaaacaaccgccacatattggaagcagttccaggttttgagcaggcaatccaatcctatgcaattcatgtactttccttgacataccagaaagttccaaggcatattcttgcagaggcaatcaacattgaaggtctcgctttggacaagtttcttgagtaccatgctgcgaactcaggttgggtaattgagaagggtgggcagtctcaagtgattgttcttccacgcaatgagttcaatcacccccagctcaagaagaacacagctgataccgttccatttgagcacctaacacgcatattccctgttcttagctgattcaggcgtagtgagagatatacaatagaactcagagcgagtgaagcttctctaagcaattgtatcatctcctttgtggtataccgtattttaagatctcggtatacctgttcttttttatggctgaattggtacctgcaacttggtttttactataacgaaatgaccagttatgagattggtcggccctaaatcctaatgcttgcaatgctgctgaactactgatatttctgagaagactcatcttttaaaagcggaagatccattgttgtgttgggaatagggtgacatgacaatgggctctaaattttacactataaaatttaaggcttag

SEQ ID NO: 91797 - DNA, 1175 bp, Zea Mays
cgggcctttttggcaacggctctgcttcggtccgcatacgccttccctctgaaaactcttcattctcctctcctccgccgcgccgccaacttcccctcccgtcaactccggctcccgcgcgagatcgagctagcgtttggggttctcgagaccggctgccatggcgacagagcaagaggcggagaactacacggtggaggaccttgtggccctgaatccgtacaaccccgacatcctcaacgaccttgagaagttcgtcaacgagcaagttgcgtctcaaacatataacttggatgcaaatctcagccttcttcgcctgtaccagtttgagccaggaaggatgagcatacatattgtggcccacatactgatcaaggctctcatggcaatgccggcccctgacttcagtctttgcttattcttaattcctgaacatgtgcaaatggaagagcaattcaaggcattgatagttctttctcactatctagagactgctaggttcaggcagttttgggatgacgcagcaaacaaccgccacatattggaagcagttccaggttttgagcaggcaatccaatcctatgcaattcatgtactttccttgacataccagaaagttccaaggcatattcttgcagaggcaatcaacattgaaggtctcgctttggacaagtttcttgagtaccatgctgcgaactcaggttgggtaattgagaagggtgggcagtctcaagtgattgttcttccacgcaatgagttcaatcacccccagctcaagaagaacacagctgataccgttccatttgagcacctaacacgcatattccctgttcttagctgattcaggcgtagtgagagatatacaatagaactcagagcgagtgaagcttctctaagcaattgtatcatctcctttgtggtataccgtattttaagatctcggtatacctgttcttttttatggctgaattggtacctgcaacttggtttttactataacgaaatgaccagttatgagattggtcggccctaaatcctaatgcttgcaatgctgctgaactactgatatttctgagaagactcatcttttaaaagcggaagatccattgttgtgttgggaatagggtgacatgacaatgggctctaaattttacactataaaatttaaggcttag

SEQ ID NO: 91798 - DNA, 1443 bp, Zea Mays
atccggttcatctatttttagagttgccacgcgcgagacttcccgcctccctatccctctctagtctctacccccatctgtagtgcggtctgcggccaagcagagcccggggaaacgatcgagacgatatgtgcgggggagcgatccttgccgaactcatcccagcacgggtgcaccggccgctgaccgccgccacgctctgggcggcggccctgagtgggaccactaccgtcggcaagtggaaggccgatgcagccgccgctaccgacgacgacgacgacgaagagttcgaggccgagttccagcttttcgacgacgatgacgagtgcgaggccgagttccagcttctcgacgaccaccaaccatctcccgcagcttcgcctgaggccagcggctgcaagcggaagcctgcccttgctcctcctgctggtgcccccgcttccacggatccggcgaccccgtgctccaggaagtacaggggcgtccggtaccgccggtcaggcaggtgggccgcggagatcagggacccgcggcaggggcgccgcgcctggctcggcacgtaccgcaccgccgaggaggccgccctggcgtacgaccgcgaggcccgccggatccgcgggaagagcgcgcggctcaacttcccgctgctcatcccgcacgagggtcccggccgtcacgcgcgcacgccggtggccatcgacctcaacttgccgcccgtctccgacggtctcggcgtcccggctccggctggcgtcggcgacgacggcacggcgaatgccgacggagatgcagatatggccagtactaagactcagagcacgctagcgcgggtcaaggaactgatcgcgcagggacctcacgacgagcggctggcggcgaggatcgtgcctgagctgatgatgcacgggagcagggacgaggctgcggcgttgatcgccgagttcagccgtcagatggaggagatcgctgcgttgcggagggaccttgagacacgcgagaggcagcttgttcagctggtttctctagtacttcgttgaccactcactccgatgatgcatgatctgatgactgtcaagtgtgaacaatgtgtttgtgacactagaacagtcatcatctactgctatagttataggtcctgtttggtacaacttattttcagcttcttcacaaatttaagcagaagttctgccaaacagttagcttctgcagcagcttatcagttcagctgcttctcagaatacactaaaagcagccaataagcagaagctgcttttcaccagcttctcagataagctgctttttcaacaagcatcagctatgccaaacagggccatagccttgtttgcagcttatttctatagaattttgctgggaggctggctgtctcgatcgataatctatctgtctgtttggctagaaaatctgaatgtttggcaatactaa

SEQ ID NO: 91799 - DNA, 738 bp, Zea Mays
tccctatccctctctagtctctacccccatctgtagtgcggtctgcggccaagcagagcccggggaaacgatcgagacgatatgtgcgggggagcgatccttgccgaactcatcccagcacgggtgcaccggccgctgaccgccgccacgctctgggcggcggccctgagtgggaccactaccgtcggcaagtggaaggccgatgcagccgccgctaccgacgacgacgacgacgaagagttcgaggccgagttccagcttttcgacgacgatgacgagtgcgaggccgagttccagcttctcgacgaccaccaaccatctcccgcagcttcgcctgaggccagcggctgcaagcggaagcctgcccttgctcctcctgctgatatggccagtactaagactcagagcacgctagcgcgggtcaaggaactgatcgcgcagggacctcacgacgagcggctggcggcgaggatcgtgcctgagctgatgatgcacgggagcagggacgaggctgcggcgttgatcgccgagttcagccgtcagatggaggagatcgctgcgttgcggagggaccttgagacacgcgagaggcagcttgttcagctggtttctctagtacttcgttgaccactcactccgatgatgcatgatctgatgactgtcaagtgtgaacaatgtgtttgtgacactagaacagtcatcatctactgctatagttataggtcctgtttggtacaa

SEQ ID NO: 91800 - DNA, 325 bp, Zea Mays
gatttcggatctcctccgtagttgtagaaccagaaacgcctccgatcgatcgaccattccgtggaagtaaagcctggaagaggcagcagcatgcctttttttttatttctgatgaagagttcgttgaactggctgaacgtaacatgcagcattttacctgttgatgtcgacacagcacaagaacagagacgaataggcgatccatcacttacatgcagaagggctcggggggccttgctgaattcacctcttcctgccgaagccaatacagccgacgcaggcagttcttcagatccgaggaggtatcatcagcttgcacagggtt

SEQ ID NO: 91801 - DNA, 1833 bp, Zea Mays
tatattttttcctttgtctgttttcataaaatgcaaaactaagactttctctagcagattgtacatataacatgtaaaacatcattttacaccgtagagaacgtcacaacactgtttatagaagatggcgagaaagcctaagaaagggaacccaatgcaacgtggctcaccacgtggcacatcacaattcatcgtgtcatccagtaagctgcgctaggcgtgtggccatgtggcatatcttgctagtcaccatgccaagtcatccgccaacggtcctactgtcctagctagtttataaatctcctctctccgccggcaaccttattggtatcaagaaaaacttgtcgaaaaatacacagggcacaatgtgcggaggcgccatcctcgcggagctgatcccgccgacgcggcgcgtggcgtcgaagccggtgacagaaggccacctctggtcggcgagctccaagaaagccggcagcggcagggacaagaggcaccagcacgaatacgccgacgatgacttcgaggccgccttcgaggacttcgacgacgactttgacgtgcatgaagacgacgaggacggccacttcgtattctcgtccaaatccgccttgtccccagccctgcacgacgggcgcgcggcgagccagaagaagcagcgcgggcgccagttccgcggcatccggcagcggccctggggcaagtgggcggcggagatccgcgacccgcacaagggcacccgcgtctggctcggcaccttcagcaccgccgaggacgccgcccgggcctacgacgtggaggcgcgccgcctccgcggcagcaaggccaaggtcaacttccccgcagccagcggtcgcgctcgcggtcgcgcgcgcccacgccgcggcgacgacggcaacccacgaaccgcgccggaaacgcagcacccagcacagcccgctctgctgcctcgaggagagagagagacgcagaggaaggaagggatcgccgccgtgaagccagaagctacggagtcgttcgacgtgggcggcggtctcttcttcgacatggccttccccaccttcccagcctcgccgccgccgcaggccgtggatacgtccttcgccggcagcaccgccacgtcggagaccgggagccccgcgaagaggccgagatgcgacgaagactcgtccgagggcggcagcggctccgcgctggagctcgctgacgagctggcgttcgacccgtttgtgctgctgcagatgccctactcgggtgggtacgacgacgactcactggacggccttttcgccgcagatgaggccgtgcagcaggacgtgggcaacggcatggacggcgtccgcctgtggagcttcgacgagttccccgccgtcgacggttctgttttctgacgtttgcttactacgtactactactattttctgcctggtggaatcatatgtgatagtgctgcatgtgtctgcctgatcgtcagattgtactccactctggatatttgtgctacgtactcgtctggtatttcctactgtgggtcaatggttcctatgaatttgttcacgtcggcgaaactctgtattgtacggtcgtgattgatgtgccaaattaaataagcctgtgaacctggttctatgtatatatggtatcttgattatgagtcaccggcctcctaaccttcccctgccatgtttgggttggagcatctaacaattccaatttccatgcaaggggatcatcagtttctggatccagtcacaaggtgaacagtgtttgtaggtcgcggcgattgcatttgcaaatttccttatccgtaaacatgaaaaagaaaagaaaagaaaa

SEQ ID NO: 91802 - DNA, 2005 bp, Zea Mays
ttatatattttttcctttgtctgttttcataaaatgcaaaactaagactttctctagcagattgtacatataacatgtaaaacatcattttacaccgtagagaacgtcacaacactgtttatagaagatggcgagaaagcctaagaaagggaacccaatgcaacgtggctcaccacgtggcacatcacaattcatcgtgtcatccagtaagctgcgctaggcgtgtggccatgtggcatatcttgctagtcaccatgccaagtcatccgccaacggtcctactgtcctagctagtttataaatctcctctctccgccggcaaccttattggtatcaagaaaaacttgtcgaaaaatacacagggcacaatgtgcggaggcgccatcctcgcggagctgatcccgccgacgcggcgcgtggcgtcgaagccggtgacagaaggccacctctggtcggcgagctccaagaaagccggcagcggcagggacaagaggcaccagcacgaatacgccgacgatgacttcgaggccgccttcgaggacttcgacgacgactttgacgtgcatgaagacgacgaggacggccacttcgtattctcgtccaaatccgccttgtccccaggtaatccgttcgttcgagggtgcaagtgcaataatctgcacgggcagaatgttattcacgtacgcgcgtccatgggtttgggtttgggtgtggccatgacgacgttggcaagaactgcatgctagactgctagtgtaatctcaagggaaagagcccgtcttgtgtatagccctgcacgacgggcgcgcggcgagccagaagaagcagcgcgggcgccagttccgcggcatccggcagcggccctggggcaagtgggcggcggagatccgcgacccgcacaagggcacccgcgtctggctcggcaccttcagcaccgccgaggacgccgcccgggcctacgacgtggaggcgcgccgcctccgcggcagcaaggccaaggtcaacttccccgcagccagcggtcgcgctcgcggtcgcgcgcgcccacgccgcggcgacgacggcaacccacgaaccgcgccggaaacgcagcacccagcacagcccgctctgctgcctcgaggagagagagagacgcagaggaaggaagggatcgccgccgtgaagccagaagctacggagtcgttcgacgtgggcggcggtctcttcttcgacatggccttccccaccttcccagcctcgccgccgccgcaggccgtggatacgtccttcgccggcagcaccgccacgtcggagaccgggagccccgcgaagaggccgagatgcgacgaagactcgtccgagggcggcagcggctccgcgctggagctcgctgacgagctggcgttcgacccgtttgtgctgctgcagatgccctactcgggtgggtacgacgacgactcactggacggccttttcgccgcagatgaggccgtgcagcaggacgtgggcaacggcatggacggcgtccgcctgtggagcttcgacgagttccccgccgtcgacggttctgttttctgacgtttgcttactacgtactactactattttctgcctggtggaatcatatgtgatagtgctgcatgtgtctgcctgatcgtcagattgtactccactctggatatttgtgctacgtactcgtctggtatttcctactgtgggtcaatggttcctatgaatttgttcacgtcggcgaaactctgtattgtacggtcgtgattgatgtgccaaattaaataagcctgtgaacctggttctatgtatatatggtatcttgattatgagtcaccggcctcctaaccttcccctgccatgtttgggttggagcatctaacaattccaatttccatgcaaggggatcatcagtttctggatccagtcacaaggtgaacagtgtttgtaggtcgcggcgattgcatttgcaaatttccttatccgtaaacatgaaaaagaaaagaaaagaaaa

SEQ ID NO: 91803 - DNA, 436 bp, Zea Mays
tgctggctgctgcgccactccccccagccccgagatctgctcaacaatggcgacgcggcgccacatccacctcctcgccattgccttcgtgtcccttctcgcgctcgaggctgtggagggcctcgaagaggagcccggcgggcgccggctgctggtcctgctggacgacctggccgtgcggtcgtcgcactcggccttcttcgactcgctccaggcgcgcgggttcgatctcgaattccgcctcgccgacgaccccaagctctcgctgcaccgctacggccagtacctctacgatggtctcgtgctgttcgccccctccacaccacgtaatcgttcatttcctgcctcgcctgttgaagatacgatctgtgtttgttggggtgttctggtgatagattggacgggaatagagatcatttgttgcagcggcgtctag

SEQ ID NO: 91804 - DNA, 816 bp, Zea Mays
atgtgcggcggtgcgatcctcgccgagctcatacccagcgcgccggcgcggcgcggcgtcacgccaggccacggtagcggcggcaagggtcggactgcggccaacgacgacgacgacttcgaggccgcgttccgtgacttcgacgaggactccgaggaagagccggtgggcgcgattacgaagaaggcgttcgggttcgccgggacccggcgcaggcggcccagcagcccgtactacggcgtgcggcgccggccgtggggcaagtgggcggccgaggtgcgcgaccccgtccggggcgtccgcgtctggctcggcaccttcgccaccgccgaggccgcggcgcgcgcctacgaccacgccgcgcgcgacctccgcggcgccaccgccaggctcaacttcccgtccaactccaagcgccgctccgccgttgccaaggcggcgccgcgcgtggacgaggacgaggacgaggacgagaacggaggaggcggcgccctgcccgacaggtcgtgccagggcatgtccgcggtcggcttgtgcgtcgaactcggcggcgcctcgaagcgcgcccggacagagccccaggaagaagcccagggaagggagaagaaggtggcgcctgcgctggcgccgtccgacgattccgccgatacgctgctgatggacgctttcatgttcggcgacccgttcagcttcttcgacggcggcttgtgctacgagcctgccgtgacgatggactgccagttgttgggcggcgacgccgtgttttgcgacgacagcgtgggactctggagcttcgacgacagtgtttgcttctag

SEQ ID NO: 91805 - DNA, 921 bp, Zea Mays
atgtgtggtggtgcgatcctcgccgagctcatcccgaccacgccggcgcgccgcggcggcgcggcgtggcccgccggcaagtgcaagcggcggaaggcgaacgacttcgaggccgcgttccgggagttcgacgaggactccgaggaggaggaggaggacgagggggtggtggagagcaagcccgccttcgtcgtccgcgcctcgtccgcggcgacgcagcccagggcgcgccaggagcagcggagccggcgccgggcgcccgaccagcagcagtacaggggcgtccggcgccgcccgtggggcaagtgggccgccgagatccgcgaccccgtcaagggcgtccgcgtctggctcggcaccttcccctccgccgaggccgccgcgcgcgcctacgaccacgccgcgcgcggcatccgcgggcccagggccaagctcaacttcccctcctcctcctcctccgccgccggggcccccgccagccgcaagcgcgcccgcaccgccgacgccgacgccgtcatcgacctcgaggaacaagagcagcgcccggccgcggcggccctgaagcacgaggccgccgagtgctccggatccgacgcgctcccggacttctcgtggcagggcgtgtcggcggcctacgacgagccccccgcgccgcgcccggccttcgacttcgaggcgcggccggagagcgccgcggacgaggcgtcgccccgggcctccgactccgagtcggacgcgctgttcgactcgctcctcttcggcgaccagttcgccttcttcgacgccggcgcgtacgagtcgctggacagcctgttcagcgccgacgccgtgcagagcaacgccgccgccgcggcggaccaggacatgccgctgtggagcttcgacgacggctgcctcgtcgaggacaacctctcgttttaa

SEQ ID NO: 91806 - DNA, 593 bp, Zea Mays
atggcggcgcccgccggcgacccgcagctcgtcgggctccgcctcatcatccagccgtcgccgaggaagcagcagctgcccgcggtgctcaggaagtccgcggtgaggattgttaacccggccacggcgagcgcggtcaagtgccacgacgacgacgacagcggccggcgggtgttcgcggggctcgagttcctcaagcgctgctcctgctgccacagggacctggacgccaccatggacgtcttcgtgtacaaaggagagcaaggcttttgcagcgccgagtgccggtgccgccacatagccaaggaggagcggcgggagatggagatgctgctcaggaagcgccgcgacgcgttccacaggcggcacgcggcggcggcggcgcccaagatgcaggcatcagatcggcgcatcacgctgcaaataaccgccgcacgatgatatatgtgggtgcaacttttttttttttgttgttgccctcttccgtccgctctacggtgtaccactacatacataataggagaggaggcacgatctctctctgtgagtgtggagtatgaaaaccgaacaacactggcagcttgcaacgggta

SEQ ID NO: 91807 - DNA, 499 bp, Zea Mays
accctagctattttctgtattctcttcctgccggccgccagagagatcgccaatttgactgagtccctttcgtttctgtacgccgtcagggagctttctccggccgccgttcttctcggttgccagggagaaccagccgttggctgaacctgaccactaatttcctagccgagcccaggcaactgaccgtacgaccgtcgatgaatcggccggcagccatactcggctgttcagtctgcgcggcgaagcggggccctgcgggctctcccgccggcgtgcgcgtcccctagtgcgggcgcgccgccgtcggtagagcggtcagcggtggtccctgcaaacccggctaaatctgttgttactgtgactttctgttttctcgcccggatctagcctctatctcgaatccctctgagtgaatgaatgtatgaaatgaaactatatgtaattttgggattgagtatggaggtctaaagtgtggatctggttccctttgcgtttt

SEQ ID NO: 91808 - DNA, 84 bp, Zea Mays
gctccactagatgtatctataaatttcgcggaactgttcttggaaagcacggtgacctaactaaaagccagctgtatctctgac

SEQ ID NO: 91809 - DNA, 1301 bp, Zea Mays
ggtccttggacggtgaaaagcggaggcggagaacgagcggcattggcagctggccgagacacaggccagtggcgacggtggctgctgcgtagacaatgggcacgactggacgaagacacagggagatggtcagctgcgacgagtgcagctgtgggtgcacacgcggtgcgcacgctatgtccgcagcgtccacacatccttctcctgccacaaatgccggaggtccaagcgcgtgtcttcctccaccgacgaggccgaggttgctgagctcctcgccgagctgccaacccactgcccgcctccgttgtacaaccgctgggccgaggtcccgctcctagcccgcgtccgcgtccacgggcttcctggctggggcaacgacactctttttcgcggcgccccgaccttttccgccgccctgtggcgctgcaccagctacgtccccaagagaattggcttccgctactgcgagttgccctcctaggccaacgataatgatggggctgatgctctttttgtgctggccagagagaagcccaaggagatgacaaatgatgttttgataggtactgaaccgaagaaggagaagcattacgtccgaagcctgagttgtcgtggcaagaagattgacagtgatcagcaagcaatgactcctctaaccaaggttaagaagagagagcctgatagttggaagaatgtgtgtcagcagagtgagggctgaagatgctagatgtagaaagagggaagacgtggagactgctactaaaaagagtgaagaatcggacactgaatctgaagaggaagaacaaacatggactgaatcaagcacaatcgaaaagcaagtttgtcctcttttattttctgtttgttctttgatccttatcacacttaggtactttgtagactctgaaattttagtcactaagtttacaattgaaataggcaatgtgcaaattgtttgtgagcatggttacacgttagcccagaatttggatccgaacagcgaagggagaggagtattgcagttcaaaaccgatttaatgtcagtgatctggcaaaaactagcgaagaggggaggtgctgctattgatcgaagtcaggatattgctaaattgcaagaattttacaagctttatagagaaaagcataaagtggatgagttgattgaagatgaaatgaagctgagggaatctgccgtgttcagcggtaaccttggctttcctcttcttggaccttctgaagcagatgccaagaaagataaccatctagatttacaacatcctgcacgtaatgctaaagggtag

SEQ ID NO: 91810 - DNA, 871 bp, Zea Mays
gacatggatgagtgtatgaccaatcatatgtggacaagattgtgttttgtgtacttttgtgaatgagacttgtatcagaacagtagcggtgacgaaagacgatcctcgtcgaggaaatctgataaaacaaaaggagcagcttcaacagagcctgcagctccagtggtcggactgaccaacatttgcacaactgaaattgaatccatgggcagacgaagagggagagggaagaagcaaaccactgtcaggagccatgaagacaaaggtagcagcggtgaagaagtcgtgcctgcaaagaagaggaggggaaggccccaaacgcgcttcgccagtaagatcgatcaagcagatgttgaaaactttgtagaacaggtcgatgccgaccaagaagaagctgacgatgccaagctaaagaacagtgctgcagctggtggtcccaagagagtcagactgctgaaagagcgctccaatattgccatagaaaatactaattctactgttcgattaagcagtgatgaatcaacgaggaccaatgggttcaggcagattgggagccgacggaaaaacaagcccaggcgagcatcggaggcagggctagaatgcaagtgaaccgtccctgcatttttcagtacaaggtagcatccatttttttgctacatttgtcatgttcggtagctcccggtgctagaaaaacaaaatgtaaactagcatgttctgattgcatgcctcagtttttttattgacacaaagtgtatgaactgatggtacaccaacttgttcagctgctctaggccctggttctgtttgagctgcttgtagcagacatcttacctttcagtttaccatatggtgttcctgcaattttgattga

SEQ ID NO: 91811 - DNA, 112 bp, Zea Mays
caatacatagtagccagatttggtaaaataataattattattgtttcagacccaccaacgcacaaaaaagataaaagatggatgtcatttcctcccagctcacctccttttg

SEQ ID NO: 91812 - DNA, 1993 bp, Zea Mays
agaaggaaacaaaagcagagagcattacggtcattttatttgtttattgtccaatgcaaagctgatttgccaaataagatcacgaaaacccctcagcttcatcggaaaagctgttcgtacgtgaagctaaaaacctcggaacaacagctccacttatgaaactgagctggcctaaatgtacccacgaaccaaaatgctgcgcgcctagcgatctggctctcgaccagctacgtgtggggtattatgtacgaaaatgcagcaggcgacggacggagtagtcgtggatcagtcccatttccgcgggtccgtgatgttgatcttccagtgctggtcggtgtacccgagctcctcggcgacgtgcctgtcccatgcgatctccaccttcctccgctcggagaggcggcagggcccgcgcatgtggtcccccatctggtcgtacacctgccaccagcgcgcgtgcgcctcgtcgctggcgtacaccctctggtccgccacgttccagttgcagtcgtagtccctgtagcacgtccatggcttcatccccaggtagtggacggaccagacctcgggcgggtccgcccggaacagcctctccttgagcgcgcgctcccccgtggtgttggcccagaagttcttgaggtagttgacccggcgcggcaggcggtgccaccacacgaacacctcgttgaggaacccctggtcgccgccgttgtacgagcggacggtccggcgcccccgcatgagcgcgtcgaacgtgcacgccgacggttcgatcaccatcacgcccgagttgaagagcgagccgtcgttgcccaccgccgccagctgcgggaacgcgaacagcgcgtccaggtcgcgcagcaccaggatgtcggcgtccacgaacaccacgcggtcgtagtcggccagctgccacagccggaacttgctgtagttgtactcgttgtaggtgccccgcgccgcgcgcgggttgcggatgcgcttgatccgccggggcgtccacccggccgccgacagcgcgcgcagcgccggcctcgacaccgtgtggtcgtgcaggaggaccaggtcgcgggtcgaccccgcgcgccggatgctctgcgccagcacgatcgcgccgcacaggtacgtgtccgacgagtgcagaaccgtcgcgtacgcctcgcgccggggacgacgcccgcccgaccacgacgtcgcgttcaacacctcatggatccctgtgcacaaataatgcttgttcagtttagtttactttttgcgtgttcatccatgtaatattgatgtagtatcgatgcatgcacctagcttcctcactcaaaccatcatttttcctatgaatctcgtcatgaaacaaatcgtacaagttttaattattgtttcaaagaagaaatgcgaaaagctgaatacataattatgctgcgtggcgtacgtgtgtggggattggtaacagctagtagcgaccactgtctgtctacaaattatttttgtttgtttctttctgggaagaaaccccaccccccctagctagctttatatagtaatcgctagtactagctagatagttcagtcttaaaacgtactaccaccaaatggcgcggcactatacattgatctatctaccccacagcgaagcccggctcccaagcaaaagaaagttctgctggtggggtggattgtgttgcagtggtcgtcaagtcaaaaccaaactaaagaatttaagaaatggctgaaaaggcgacatatataatcgaccaacgcaaagtaaccacggatggttggttggtgatccacctggtagaatgcagtagcatgcaagtatcactaggctccgccgccgcgtgcccaaagtcccaaagccggcgagacccagccccggcccgaccggtgcagctcaccaaccgaacctacctgagtcagtcgtgtcgacgtattcgccacacatgacacatatatccatctgccgaccggatatatacccccatggccccatgca

SEQ ID NO: 91813 - DNA, 1557 bp, Zea Mays
gccctgcccaagcccaactgcactgccctgccagccttcaagacccacaccacacccgccccttaaaccctccctccccaacccgcgaggccgcgactgccctgcccgccgccctctagcccacctctctcgcctcccgcgtacggcacacctgacccccccacccactccgttgaagcggtcgagtgcggcgtcgcgggagagatggaggcggcagtcgcggagacgcaggggatgtcgccgtacgaggcggcgcgggagcggaacctgcaggagaacaagcgaaagatggaagccctcaacctgcgccacctctccgccgtcatcaaggaggcccccaagaccccttcccccatgaaaccgaagaggcgcaggatcatcgaggacgcggtcgtggttccctcgcctcccaggaggtcccgccggcttgccaatgtccctgaggtcaagtacgcagaggtggtatctgtttccttttgcctgcctcctttttccttttgggctcaaacaaatgcacatagtacatttcgcggtttcagttatctgcagacgtgtttgtgtgctcgcgatatgtttcttctgatcacaatgaagaacgtgccatgaactcctgatcgatttgaaccattggtttttactgataagttgtatttgccaacagatagcaccacaccgtgcagatagaatgacaaggtctcctagaagaccagctgacctcatctacttggcaagacgcggatcaatttccatgaaagctaggctggaggcaacaaggaaggctgaggagctagaatcacaactcgatcctgaaatcccatccttcgtgaaggcgatgttgcattcgcatgtggttcgaggcttttggctgggtctcccgagccatttctgtgacacttacatgccgaagcaagacgccactatcaccttggtggatgagaaggatgaagaattcgacaccaactaccttgcctacaagaaggggctaagtggcgggtgggctggttttgcgctataccatgcgattcaggatggagattcaactgtttttcagttgattaagcccacgaccttcaaggtgcatatcgtccgagcagctactgatgatagcagtgaagtagatgagtgactgcatgacctgacacctgtacttcgtacctacttagtgcttgttcggttattcctgttgttttcctgtcacatgtggattagatgggatcatgaaaaaatatgaaggattttgacttgttcgggatttaaacccatccaatctcacccaatccacatggattgagaggaaagcgaacaagcccttagcaggagccaggaggtggaaagcgggattttgagtatttttaggctttatctagcagaatgtattttatttgtatgcctgttgttattcatgctactatattagtgagaatcaggctcctaatttgcagaagtcataacttgcaaaatgcattatgagctattttctgcccagctgcatgttgctgtcccaatcgaggtttcagaatatgcatggcttgtgactcaggaacgattttttcacct

SEQ ID NO: 91814 - DNA, 1216 bp, Zea Mays
caagacccacaccacacccgccccttaaaccctccctccccaacccgcgaggccgcgactgccctgcccgccgccctctagcccacctctctcgcctcccgcgtacggcacacctgacccccccacccactccgttgaagcggtcgagtgcggcgtcgcgggagagatggaggcggcagtcgcggagacgcaggggatgtcgccgtacgaggcggcgcgggagcggaacctgcaggagaacaagcgaaagatggaagccctcaacctgcgccacctctccgccgtcatcaaggaggcccccaagaccccttcccccatgaaaccgaagaggcgcaggatcatcgaggacgcggtcgtggttccctcgcctcccaggaggtcccgccggcttgccaatgtccctgaggtcaagtacgcagagatagcaccacaccgtgcagatagaatgacaaggtctcctagaagaccagctgacctcatctacttggcaagacgcggatcaatttccatgaaagctaggctggaggcaacaaggaaggctgaggagctagaatcacaactcgatcctgaaatcccatccttcgtgaaggcgatgttgcattcgcatgtggttcgaggcttttggctgggtctcccgagccatttctgtgacacttacatgccgaagcaagacgccactatcaccttggtggatgagaaggatgaagaattcgacaccaactaccttgcctacaagaaggggctaagtggcgggtgggctggttttgcgctataccatgcgattcaggatggagattcaactgtttttcagttgattaagcccacgaccttcaaggtgcatatcgtccgagcagctactgatgatagcagtgaagtagatgagtgactgcatgacctgacacctgtacttcgtacctacttagtgcttgttcggttattcctgttgttttcctgtcacatgtggattagatgggatcatgaaaaaatatgaaggattttgacttgttcgggatttaaacccatccaatctcacccaatccacatggattgagaggaaagcgaacaagcccttagcaggagccaggaggtggaaagcgggattttgagtatttttaggctttatctagcagaatgtattttatttgtatgcctgttgttattcatgctactatattagtgagaatcaggctcctaatttgcagaagtcataacttgc

SEQ ID NO: 91815 - DNA, 1341 bp, Zea Mays
gccctgcccaagcccaactgcactgccctgccagccttcaagacccacaccacacccgccccttaaaccctccctccccaacccgcgaggccgcgactgccctgcccgccgccctctagcccacctctctcgcctcccgcgtacggcacacctgacccccccacccactccgttgaagcggtcgagtgcggcgtcgcgggagagatggaggcggcagtcgcggagacgcaggggatgtcgccgtacgaggcggcgcgggagcggaacctgcaggagaacaagcgaaagatggaagccctcaacctgcgccacctctccgccgtcatcaaggaggcccccaagaccccttcccccatgaaaccgaagaggcgcaggatcatcgaggacgcggtcgtggttccctcgcctcccaggaggtcccgccggcttgccaatgtccctgaggtcaagtacgcagagatagcaccacaccgtgcagatagaatgacaaggtctcctagaagaccagctgacctcatctacttggcaagacgcggatcaatttccatgaaagctaggctggaggcaacaaggaaggctgaggagctagaatcacaactcgatcctgaaatcccatccttcgtgaaggcgatgttgcattcgcatgtggttcgaggcttttggctgggtctcccgagccatttctgtgacacttacatgccgaagcaagacgccactatcaccttggtggatgagaaggatgaagaattcgacaccaactaccttgcctacaagaaggggctaagtggcgggtgggctggttttgcgctataccatgcgattcaggatggagattcaactgtttttcagttgattaagcccacgaccttcaaggtactgcatgctttctctgaataatgtggagctcaaagcatgccacccccctcataatataatgttcagtttgctcatccgccaatgaatttgtctcccaggtgcatatcgtccgagcagctactgatgatagcagtgaagtagatgagtgactgcatgacctgacacctgtacttcgtacctacttagtgcttgttcggttattcctgttgttttcctgtcacatgtggattagatgggatcatgaaaaaatatgaaggattttgacttgttcgggatttaaacccatccaatctcacccaatccacatggattgagaggaaagcgaacaagcccttagcaggagccaggaggtggaaagcgggattttgagtatttttaggctttatctagcagaatgtattttatttgtatgcctgttgttattcatgctactatattagtgagaatcaggctcctaatttgcag

SEQ ID NO: 91816 - DNA, 747 bp, Zea Mays
atgatgcatccggaggtggaagaaggggcctatgagcaggggggtcgcctggaggcggcgctccagcatgagaagcctaatgagcagcagcagccggagttgattcagaaggagctgaagcagtgctatctgtcactggagaaggggttcaactcgatgacggtgagccagccgggcaccctgttccacgaggccatgaaggttcgcaagcgactgggcgccatcgtggaccacatcagccaggaccggcgcgagcgaccgcgagagcgcgacctcctgctcctggccttcattctagatagccgcgagacgctcaccgacgcccagatctccgacaacgtgatcgatgtcaggttcgccgcccgcgaagccaccgccagtgtgctcacctggatgttcatgttcctcgacgaccacaccgcgttccttaaggccgtcaccgagggcgtcaaggcgttcgagcccgacctgatcgccaaggccaacagcttcgtccatggcggctgtgtttccgagctgtaccacctcgcgtccatcgtctgcgccagcgtcaacgggaagacatgcatgcaggcgtgcacaacaacgagcatggcggacgagttggtggtgtccgaggaggtggacgaggattacatacacattgaggaaccgaggaaagcggtagaagcaaacaaggacacattggctggtgattctcctttctctgatgctactcctgctcctacgcggctacgccgatggtga

SEQ ID NO: 91817 - DNA, 2724 bp, Zea Mays
catacctttctcggccttttggctaagatcaagtgtagtatctgttcttatcagtttaatatctgatatgtgggccatgtgctcacttcgatattaaatttatttttttgtgggggagggtccactactaatggcttgccattaggggccctcacgcgtcgtccagctattgcactgctggccggacgtggcgcaccccaaccaagacaaattgcaatttctctgtttgggaactcttcggtgccatgaggctggtctcggcgaattaaagcaactggagtggttctggttctgttagatatattatgtgggttatgagctattgtcatgtgtagtagatgagcatgtgggcttgaggagatataaatataggtcatgtgtagtagatgagcatgtgggcttgaggagatataaatataggctgagtcatctgtaaaagtcatcaaacaacagaatacaaaatatcaattcactgaaaccccgtctgctctcgtctttctcccgtcttcccagctccaatctcctgatctcctctcttctaccttctgtggtgctaacatttggtatcagaggagttgcaatccttgtcgatctaccttctccatggatgtggcgatgcagcgcgttctcgacgaactggcgcgcatggagctccgcttgaccgatgtgttggctggccgcggtggcaagcaagcccctgcatcctcctccttcgccacgcccttcgactcgttcaaagcctccacaacttcctccaccgccgcgccacggtacgacgacgacgtgattggctcttcggcgggcgcggcgtacgacgacgcgttcgccacaagcgctcgtgaacgcacttcctcctccttcggtgacgaccgcatcgaggagctcgacgtgtgggatgaggacgccgcagggctgccgcgcctcgaattcctgctgttccgcttcctcgcctccgtcgaatccccgtgcctcgagcgcatcatcgcgctctcgtctgactgcaccgccaccaactccttccgcgtcggctcctgtgacgacaaccacatcggagtcaagcagtcgtctgtggacacccagtctctacgcacggcatcctccgcaggagagttcgaggcgccataccgcgatcggcgcgagcagccacgcaggaacgaggccctcgacgtcgtctgcgagctgtaccgcgaccggcacgagcagacgcacgggtacgaggcccctgatgcgccgtcgttctcgtcaggcatcgatgacgacatcgacgtcgtggaggagctccacgtcctggtgagaggccaccagagggacgctgcgagcgccaacgtggttgacttcgcctccacggtgggggacgccacaccccaggccaccgagacgcggctcaatgccggatgggtgcgctggctggaagggcggactggcccctacgacgacatcgcagcagcacaaaccctcttcttcgatttctccgacgacgacagcgccaggacttgcgatgtcactgacgtccccgttgtgcactccgcgctcaaagtgttcgaccaaatgtccagccgtggctcgaacgccagcccaggctttcgggatctggttttccttgccgcgtctgcctcctcgtcctgcagcatggaggacgagcgccccaaggtgccttcctccatcggcaacaacatacacttggtctccaggttcctgtcctcaaggctcgatggcggcgtgaagaagccgttgcaggagtacctgctggcgctcaagtaccagagtactaagctgctcatcagcaacaccctagacacgatggtcaagcttcaggcggcgctgctcctcgcccaagggtgcgtctctgagcagcacccagacacaccgtaccagcagaccaactcgcagctgctcgagttcacgtggggcctggccaacagcggagctttttgggattatgatcctcccgtccgctggcttcgccccgctggtactccgcagcgtgtcgtcgctcctctggtcttctcgagctcgccaactcgccgcgccatcaagctccttcatcggaggtcctccttccctgcaatgccgtcgagggggaagaagaggctagtggtcgaggtggatctcgatttagatcctgcagctgaggtcaccgccgccttcgatcgactctgtgtttccgtagtgaacaagccgccaccagctgccgccgttggtaaggattcagcctcctccaccttggtcaacaatgtagcctttggtaaggattcttcctcctccgctcgatctcctccgacgatgtccaccgaacagcctcactcatggagcactccggccgtcaccactccattgtcagcagcatcaactgtgccgtatgccaggtacaaagaggtctataatggccttaatgacgccattgaagagatgcagaaagtagcgatgaatttgaaggcattgtctactgagtacattgttcctgagccttcttcgggtaaagagatcttggtgaaccaattaatgtggcgcgttcatgagcttgcgcagtcactagatgaagcattgtatcgatctctactcgctcaggccggtccttcaccacccttgtctgagtattttgacaacgacagatcagatgatgaagcccacatgatgagtggtggggattgggctctggaagatgttaattttgaagagattcgggatcgtatgaggaactataatttgggaggcaatgcttag

SEQ ID NO: 91818 - DNA, 93 bp, Zea Mays
atttggcaagtccaaaattatgcactatccagcaaccaaaattcacaagtgccaagtccaaaagtatccactatccagcagccagcaccagaa

SEQ ID NO: 91819 - DNA, 1505 bp, Zea Mays
gcatgctagctactcacgcacgcaacagctgaactgagttgcactactgcttgttgtgccaactacacacgagagctagacacccacgcgacgatagaatggagaccatgaaggcaacaagaacgctggtgcagcccgtctactccacccctcacccgctcgccggcgagaaggtccccctgaccgtcttcgaccgcgccgccttcgacatcttcgtgcccaccgtgctcgcctaccccgcgccggcgccgtccaacgaggcgctcaaggatggactccgcagggccgtggctctgtaccctcacctcgcgggccgactcgccgtcgacgaccggggccgccggttccttcacgtaaacgacgagggcgtgcttgtggtcgaagcagcaatctcggctgacctgtccggcgtgctcgccggcggtatgaccgacgcaaacgtcgtcgtcgacgagctgtacccgagtctcccagaggacaacgttggcgcggcactcctgcagatcaagctcaaccgctgcaggtgcggaggcctcgtcgtcggcatcatctgccaccaccacgtcgccgacggccactccatgagcgccttcttcaccacgtgggccagcgcggtgcgcgcgggcaaggacttcagcgttccagcgccgcccttcctcaaacgcgcggccaccgccgtgccccgcgccacgccgacaccgattttcgaccaccggtccatcgagttcatgggaggcggggacggcggccgcacctccaggatcaagtcgtacgccgtcgtgcccatggacgagatcaagagcctcaccgtgcacttcaccgacgagttcatcgctggcctcaaggcgcgcgtcggcgtccggtgcagcacgttccagtgcctcctcgcgcacgtgtggaagaagatcactgcggcgcgggacctcaacctggaggagttcacgcaggtgagggtggcggtgaactgcaggggcagggctatccctgccgtgccgacggacttcttcggcaacatggtgctgtgggcgttcccgaggctccaggtcaaggacctgctgaactcgagctacggcagtgtggtagacgctatccgcgacgctgtggcgcgcgtcgacggcgagtacatccagtccttcgtcgacttcggggctttggcggacaggagcggtgaggagctcgtggctacggcggcggcggccggtacgatgctgtgcccggacctggaagtggacagctggctggggttccagttccaccagatggacctcggcaccgggccgccgtgcgcgttcctgccgccggacctgcccatcgaggggctcatggtcttcgtgccgtcgcgcactgccaagggtggcgtcgacctgttcatggccgtcgcggagtgccacgtcgacgcgttccagcagatctgccactcgatcgattgatcaaacggctgatggcgcataacatggtttcggttgcgtacacggtttgattgtgatgattgcagggccagactt

SEQ ID NO: 91820 - DNA, 1695 bp, Zea Mays
gctacaacgagtagagtagagtagaaggggtgcggctaatcggagcactagttcatcctcagtccattcattcatcagtacacccagccttttccggcacacgcatctatggccccgccatcacacttctacaacaacaatggcgccccgcaggacgccgccagctacctccatgcgggaccaggaaatgtacctccacaggactcctgcttgctcgacgcagacgagttccgccggcagggccaccaagtcatcgacttcatcgccgactactacggccgcatggacgactaccccgtgcaccccagtgtcaaccctggcttcctgcgccgccagcttcccgacaaggcgccgtcgcgtccggagtcgtccgacgcgttcggtgccgcgctgcgggacgtccgtgacctcatcctgccaggcatgacgcactggcagagcgcccgccacttcgcgcacttcccggcgtccagcagcaccgtcggcgccctcggcgaggccctcacggccggcatcaactccgtccctttcacgtgggccgcctcgccggccgccacggagctcgagatggtcgtcgtggactggctcggcaaggcgctccacctgcccgagagcctaatgttctgcggcggcggcggaggcacgcttctcggcaccacgtgcgaggccatcctctgcgccctcgtcgccgcgagggaccgcaagctcgcggacatcggcagcgggaggatcggagacctcgtcgtctactgttccgaccagacgcactttgccttccgcaaggcagcgcatattgccgggatccaccgcgacaactgccgcgagatcgccacgtaccgtgacgacatgttcgcgctctcgccagccgagctgcaggccgccatgcaggcggacgtggacgccgggctggtcccgctcttcctgtgcgcgacggtcggaaccacccagacgacggccgtcgacccgatcagagggctctgcgccgtcgcagcgacacacggtgtctgggtgcacgtggatgcggcctacgcgggctcggcgctcgtctgcccagagttccggcacttgatcgacggcgccgacgccgtggactccttcagcatgaatgctcacaagtggctgctggccaacaacgactgctgcgctctgtgggtgaagaagccagctctgctcgtcgcggctctcggcacggagcaggagtacatcctcaaagacgcggccgctgaggggcacgacgtcgtggactacaaggactggtccgtgacgctgacccgccggttccgcgcgctcaagctatggctcgtgctccgctgctatggcgtcgagggcctgcgcgaccacatccgcgcccatgtgcgcatggccgcgtcgttcgaggacatggtcaaggccgacccacgcttccaagtcatggcaaagaggcaattcgcactcgtttgctttaggctccgggcgcccgaggagttgggcggccccaaggcggccaacgcgctcaaccgaaggctcctagaggaggtgaatgtggcttgctccgggccctacatgagctccgctaatgtcggtggcgtctacatgctcagatgcgctatcgggagcacgcttacggaggagcgacatgtccgtgaggcatggacggctgtgcagaacgtagcttcttccctcctcgctaaaatggagatgcatgaagattattga

SEQ ID NO: 91821 - DNA, 1409 bp, Zea Mays
ggcagttcctcgctggtcctttgcgcaaaagagtactctctccctcctaccacacacagcctccggactgctccggacgcgcgcctcagatctactccaacacctgtaaggattcctctggccgtgtggcctttccggcaactatagctagggttctccttctcccctccctccgcccgcttgctcttggacggtgcttcctcttctttaccagctagtcaaagtaaccacgcgtgctgcttcatctctcccttccttcctgccgtgtggttgttggcagccgcagcggcggcgcccgcgggtggaggagcaggagaggcggcgccatggtcgggaccgggaagagggagcggatagcgatacggaggatcgacaacctggcggccaggcaggtgaccttctccaagaggcggcggggcctgttcaagaaggccgaggagctctccatcctctgcgacgccgaggtcggccttgtcgtcttctccgccaccggcaaactcttccacttcgccagctccagcatgaagcaggtaatcgatcggtacgactctcattccaagactctccagaggtccgaaccgcagtcgtctcaactgcagtcacatatggatgacggcacttgtgcaaggctaaaggaggaacttgctgaaacaagccttaagctcaggcagatgagaggagaggagctccagaggctgagcgtcgaacagctgcaggagctcgagaagaccctcgaatccggcctcggctctgtactcaaaaccaagagccaaaaaatccttgacgagatcagcggtctggaaagaaagagaacgcagctgatcgaggagaactcaaggctgaaggagcaagtgacacggatgtcgaggatggagacgcagcttggcgccgatccagagttcgtgtacgaggaagggcagtcgtctgaatccgtgacgaacacgtcctatccgcgcccgtccaccgacaccgacgactgctccgacacatcgctcaggctcgggctaccactcttcagctccaagtgacggagatttgacatgtccggtagcggagcggtgccgattgcttgcccttctccactctagataggtctggattgggggagagcaagcactgctggatcgggaagacccaagtgaccaacgcgtcgcatcagaataaggcattttgagtgctgtatgatgtgtgtattctggctctgaaagtgagacctgcttttgttataatacatacatacaggcagcatggcaatacgtgacggggtatccgctgcctgcagtccgtgacctgtctgtcgtctctgtttctagtacccgtataatcaccctgcaattacctgcagctggtcatcgttaggagaaactccagtccatgcaaatgaactcccagcacttgtgctcttcgcg

SEQ ID NO: 91822 - DNA, 1350 bp, Zea Mays
ggcagttcctcgctggtcctttgcgcaaaagagtactctctccctcctaccacacacagcctccggactgctccggacgcgcgcctcagatctactccaacacctccgcagcggcggcgcccgcgggtggaggagcaggagaggcggcgccatggtcgggaccgggaagagggagcggatagcgatacggaggatcgacaacctggcggccaggcaggtgaccttctccaagaggcggcggggcctgttcaagaaggccgaggagctctccatcctctgcgacgccgaggtcggccttgtcgtcttctccgccaccggcaaactcttccacttcgccagctccagcatgaagcaggtaatcgatcggtacgactctcattccaagactctccagaggtccgaaccgcagtcgtctcaactgcagtcacatatggatgacggcacttgtgcaaggctaaaggaggaacttgctgaaacaagccttaagctcaggcagatgagaggagaggagctccagaggctgagcgtcgaacagctgcaggagctcgagaagaccctcgaatccggcctcggctctgtactcaaaaccaagagccaaaaaatccttgacgagatcagcggtctggaaagaaagagaacgcagctgatcgaggagaactcaaggctgaaggagcaagtaaatccctgctctctctcccccaccttctgaatgaatgaaggtttccattccgctctccgtttgtttcgaccgacgtctcggaggtttaagccaacggggacctgaagctgcaggtgacacggatgtcgaggatggagacgcagcttggcgccgatccagagttcgtgtacgaggaagggcagtcgtctgaatccgtgacgaacacgtcctatccgcgcccgtccaccgacaccgacgactgctccgacacatcgctcaggctcgggctaccactcttcagctccaagtgacggagatttgacatgtccggtagcggagcggtgccgattgcttgcccttctccactctagataggtctggattgggggagagcaagcactgctggatcgggaagacccaagtgaccaacgcgtcgcatcagaataaggcattttgagtgctgtatgatgtgtgtattctggctctgaaagtgagacctgcttttgttataatacatacatacaggcagcatggcaatacgtgacggggtatccgctgcctgcagtccgtgacctgtctgtcgtctctgtttctagtacccgtataatcaccctgcaattacctgcagctggtcatcgttaggagaaactccagtccatgcaaatgaactcccagcacttgtgctcttcgcg

SEQ ID NO: 91823 - DNA, 1240 bp, Zea Mays
ggcagttcctcgctggtcctttgcgcaaaagagtactctctccctcctaccacacacagcctccggactgctccggacgcgcgcctcagatctactccaacacctccgcagcggcggcgcccgcgggtggaggagcaggagaggcggcgccatggtcgggaccgggaagagggagcggatagcgatacggaggatcgacaacctggcggccaggcaggtgaccttctccaagaggcggcggggcctgttcaagaaggccgaggagctctccatcctctgcgacgccgaggtcggccttgtcgtcttctccgccaccggcaaactcttccacttcgccagctccagcatgaagcaggtaatcgatcggtacgactctcattccaagactctccagaggtccgaaccgcagtcgtctcaactgcagtcacatatggatgacggcacttgtgcaaggctaaaggaggaacttgctgaaacaagccttaagctcaggcagatgagaggagaggagctccagaggctgagcgtcgaacagctgcaggagctcgagaagaccctcgaatccggcctcggctctgtactcaaaaccaagagccaaaaaatccttgacgagatcagcggtctggaaagaaagagaacgcagctgatcgaggagaactcaaggctgaaggagcaactgcaggtgacacggatgtcgaggatggagacgcagcttggcgccgatccagagttcgtgtacgaggaagggcagtcgtctgaatccgtgacgaacacgtcctatccgcgcccgtccaccgacaccgacgactgctccgacacatcgctcaggctcgggctaccactcttcagctccaagtgacggagatttgacatgtccggtagcggagcggtgccgattgcttgcccttctccactctagataggtctggattgggggagagcaagcactgctggatcgggaagacccaagtgaccaacgcgtcgcatcagaataaggcattttgagtgctgtatgatgtgtgtattctggctctgaaagtgagacctgcttttgttataatacatacatacaggcagcatggcaatacgtgacggggtatccgctgcctgcagtccgtgacctgtctgtcgtctctgtttctagtacccgtataatcaccctgcaattacctgcagctggtcatcgttaggagaaactccagtccatgcaaatgaactcccagcacttgtgctcttcgcg

SEQ ID NO: 91824 - DNA, 1234 bp, Zea Mays
ggcagttcctcgctggtcctttgcgcaaaagagtactctctccctcctaccacacacagcctccggactgctccggacgcgcgcctcagatctactccaacacctccgcagcggcggcgcccgcgggtggaggagcaggagaggcggcgccatggtcgggaccgggaagagggagcggatagcgatacggaggatcgacaacctggcggccaggcaggtgaccttctccaagaggcggcggggcctgttcaagaaggccgaggagctctccatcctctgcgacgccgaggtcggccttgtcgtcttctccgccaccggcaaactcttccacttcgccagctccagcatgaagcaggtaatcgatcggtacgactctcattccaagactctccagaggtccgaaccgcagtcgtctcaactgcagtcacatatggatgacggcacttgtgcaaggctaaaggaggaacttgctgaaacaagccttaagctcaggcagatgagaggagaggagctccagaggctgagcgtcgaacagctgcaggagctcgagaagaccctcgaatccggcctcggctctgtactcaaaaccaagagccaaaaaatccttgacgagatcagcggtctggaaagaaagagaacgcagctgatcgaggagaactcaaggctgaaggagcaagtgacacggatgtcgaggatggagacgcagcttggcgccgatccagagttcgtgtacgaggaagggcagtcgtctgaatccgtgacgaacacgtcctatccgcgcccgtccaccgacaccgacgactgctccgacacatcgctcaggctcgggctaccactcttcagctccaagtgacggagatttgacatgtccggtagcggagcggtgccgattgcttgcccttctccactctagataggtctggattgggggagagcaagcactgctggatcgggaagacccaagtgaccaacgcgtcgcatcagaataaggcattttgagtgctgtatgatgtgtgtattctggctctgaaagtgagacctgcttttgttataatacatacatacaggcagcatggcaatacgtgacggggtatccgctgcctgcagtccgtgacctgtctgtcgtctctgtttctagtacccgtataatcaccctgcaattacctgcagctggtcatcgttaggagaaactccagtccatgcaaatgaactcccagcacttgtgctcttcgcg

SEQ ID NO: 91825 - DNA, 1606 bp, Zea Mays
tcatttgcctcctgtgtcacaggctttccctccgcttcaactgccttcttctcatttgcctcctctgtcacaggcttgtcctccgcctccactgccttctcctcatttgcctcctgtgtcttcccctccgccgtctcctctaccctccccttctccgcctccttggcctcctccaacttcggcttcttcgccgccgccccttccacctccgtctcctcgccgccgcattcagcagcaggatcgcctccttcctccctctctctcttctgaccggctggtgctgctgtcgctacggccacctccatctcgggttcagccatggctggagaagcgcggtcgaagcggagctccaccacccgtcggcgttggcggtgttcctggatcgggttcgcctagggtttgatgctcggtggtttggagacttccgtccgaggcgagagggtttatgagtaagcgagttgcggcgtcggggccgaatggtttgctgaaagcccagtgtggccttgtgaagcccacaagatagagcccaagagaggagcaaggacgaatcgtgctcgtgagtcgacaagtcaagggatgcgctttaccgacggcgacgcgtacaaaagcggttatcgaagctaccggagatgccactccccgcaccgttccgagttttctccccacccacctccgcggctgccagtcccgccggagcgcagcgcgcgctgctctacggacgccgcgcgccgttcgcgggagcgctcctgtttttcagcatcggcgccgtcagcgctgcggtcgcgttcaggacagggtgcgccatctcacaccgacgtccccccttcctcggggcaagaggtctcagttccactagaatggagtcagcttcgaccacagtgccatccattgtcgtgtatgtgacagttccaaacagggaagcagggaagaagctgtcacagagcatcatcagcgagaagcttgctgcttgtgtcaatatagtacctggcattgaatccgtgtactggtgggagggaaaggtacaatctgatgctgaagaattactcatcatcaagaccagggaatcacttctggatgccttgactgcacatgtcaaagccaatcatgaatatgatgttcctgaagttattgctctgcccataactggtggtaacaccaagtatttggaatggatcaagaacagcacccgggacaagtgatctctttttttttggagctcgacataatgcgatgatcgaagtgcccatggctccttagctcttccagtggcttgcacacaagggtgtatcctctcttgacctggacatctcaattacgttgctgtaccgaatccatatctaccatcttcaggtaacaagtgatttggtgtcccgtgtgggtaatccaaatgcatgcattgctctgagtattgacaggttggctagtgtaacgtgtaagtccaaaccagatcgtatccaaacatgcgtattgttggtctttgatcgatatttgggccgagttttctgctggtgtgcctgaaactgatgttgcgtcaccgactgttcaattactataacatgttcgctttttacgtgatgattttacccaatggtttgttgatattttc

SEQ ID NO: 91826 - DNA, 537 bp, Zea Mays
atgccgcctaaagcgctaggagaaatcccaggggtttgctgctccacggggccttacgggggagccgtggaggctgcgggcgtccaggagatcggtgacgctgccgtccgaaaagggccaccgcatcttctccgccgtgtccatctccagctagccctcgccgcttctcccgcgtccccagccgccaggttccgcacgatcgccgggggctggatgggggatgcttctggaaatctggacaccgccaggtccttcgggggtcgatggtcggggacggaagggttgaggtctgggttccaggagcgagaaggctggaagggttccggagacagagagagggcgcccccgggtcgaagtgggggagtggggggcagccggtcggagacgcgtggagccactgctgaccaaggcgtgggctcccaggtggggcctacaatcgtccaaacgtgcaagaacaaatttaggcctgtttgtttagacagtaatacccttgtttgtttatttgaggtgagaaaagaagtatggcatatattgtaa

SEQ ID NO: 91827 - DNA, 2705 bp, Zea Mays
gaagaaaatggacggataaccagatctaccgccttggcaaaggaagaaaaagaaaagggaaggagatctaccgctcagcagtagcacatgcacaatgcacaagcagcgggcgggcggctgcgtcgagccgtcgactgactagtgactactcaggcgaacacaagtacacctcacacccaccacccagcccgccgcgcagagcagcgcaggcgccctgcacctccactctgcagctctgctccccctccctctctcccgctcctcctccttttccttctccagctcggccgcctcagcccgcgccgcgatgtcagaggaggacgaggaccagccgccggccaagcgacccagcccgtcgccgcccgcggaccaggtgctcgacaacgtgctcgagacggtgctccagttcctggacgccccgcgggacaggagcgccgcctccctcgtctgccgctcctggcacagcgccgagtccgccacccgcgagtccgtcgccgtccgcaacctcctcgccgtgtcggccacccgcaccgcgcgccgcttccccaacgcgcggagcctcctcctcaagggccgcccgcgcttcgccgacttcaacctcctcccgcacggatgggacgcctccgccttccgcccctgggccgccgccgtcgccgccggggccttccccgcgctcacctcgctctacctcaagcgcatccccgtcaccgacgccgacctggacctcctctcccgctccctcccggcgtcattccgtgacctcaccctgcacctttgcgacggcttcacctcgcgcgggctcgcgtccatcgcctcccattgcaggggcctgcgagtgctcgacgtggtggagtgcgacatggccgaggagcaggaggttgtggactgggtggccgcgtttccgcaggagccctctaacctcgagtcgctctccttcgagtgttacgagccgcctgtggccttcgcggcgctcgaggcgctcgtggagcggtccccgcgcctcagacgcctgggggtcaatctgcacgtctcgctcggccagctgtgccgcctcatggcgcacgcgccgcgcttgtcgcacctgggcaccgggtcgttccggccggcggatggcggcgaggaggggacaggattcggggaggttgtctctgcattcgtggccgctgggcgagcgcgcacgcttgtttccctctccggcttccgtgacctcgcgcaagagtacctgccgaccatcgccgtggtgtgcgcccacttgaagagccttgacttaagctactccgcggtcaccccgaatcagattctgatgttcattgggcaatgctacaaccttgagacactatgggtacttgactcggtgcgcgacgaagggctcgacgccgtgggaatttcctgcaagaagctccagtctcttcgtgtgctcccgttgaatgcacatgaggacgccgacgagttggtgtcagaggttggccttaccgccatctcacggggctgccctgctctccgttcgatactatatttttgccagaccatgaccaacgctgctgttgtggacatgtcgcggaactgcccggagctgaaggtattccggttatgtataatgggacggcaccagccggaccatgcgactggggagcctatggatgaaggattcggtgccatcgttcagaattgcagcaagcttaccaggctatccacgtccgggcaacttactgatcgggcatttgagtacattggcaggcatggcaagtccctgcggacgctctccgtagcatttgctggaaacagtgatgtggcgctgcaatacatcctccagggctgtccaaagctagagaagcttgagataagggactgccctttcggtgacgctggcctcttcgccgggatgcaccatttctacaacatgcggttcgtctggatgtcaggctgcaacctgaccctgcaagggtgcaaggaggtggctcaggtgctgccacggatggtggtggagttgataaatggccagtctgatgagaacgaaaggaatgaaagcgtggacatcttatacatgtatcggtcactcgatggtccaagggaggatgttccaccgttcgtgaagatcctgtgaagctgcgcttctgcggagatggctgggtatcgctatcagtgtagtattcaggctgctgcacttgatatgctggctgagtgcagatcatttaacggaatatatatgtaagttgttgagctgcagatgtggtacatttttatctcttagaaagatttcgaagcactgtactggagcggggcgggcgggggtatcatgtagtaggagttcatcagatgtggtacatttttatctagtaggagttcatcagtgtatccaaagcgttcacggcaggaggactaagtgcagcagagcaggcttcttcgagggggcctcatggctgcctcagttttgtttgctgctctggagggggctctggtttgaggaccatattttctgtgccggtgcaaccaccatgttttccttcaaattttcgaaatgaaacctgtcatatcagactagattagattcattagaacttacccttatgttgttgttgttgcatattttctgtttcattttttctcgctttagaactatatgagatgagatgagaaagacctcctgatctgagctactgtatattgttaaatgccaatgttcctagagtcccaagttgtttgat

SEQ ID NO: 91828 - DNA, 663 bp, Zea Mays
atggctgcagcggtgtatgccctgtcaatagcatcagcggtaatagctgattggggaaggagaaagcgttttgggctggacataactctaaggtgggtggaggaggaggaggagagcgagggaggacgacgaggctgcctggcggagccacgaggggaaggtgagcgtcacctgcaagtccacaaccttggtgagactgccaccatgagcgtgccccacggccgccaacaggatctcgagctcgccatcgatgactttgacgaggagttgatcgaccctgagctacgcttctcgttccagcgcaacagcaaggtttgtggagtggacttgactgacaaagtagtggacataattttccatgtatttgatgctaactgtgatggtaacctgagctcagaggagttcttgaggaagcgcttgttcagcatgatgagtgatcttccttccgtcttagaagcattcgcagacaggaaacacggtagagataggtctagggttgatagcagcggcaagtccagacactcatcaaagagaggaaaagatggccatgccaagagttacagggcagcacctcctgccgccaaggagtatgacgaagacgaggaggagcacacagagaccttttgcggaagctgcgacggcctttacattggcagcaactaa

SEQ ID NO: 91829 - DNA, 441 bp, Zea Mays
atggcgccggtggcccaccatgagaagttgagcgtgagggcgatgcccgcgaggccgaagcggagcctggagacgaggagccagcttgcgaggaggtggacgcagagcgcggctgcggcggcggcggcgttggcggagttcctcatctggcactgcaggaagcgctgcagcgggaagaggaaggcgaaggagaagtgcagcgggatgaaccacacgcacaccttccccgccatcgccgccagctccggcggctgccccgtcagcagcagcacgtcctccgcgaagaagtacatgggcagcagcagcaccgcgcacatgaacagcacgatccacgaccgctgcatgtacacgcccatcatgtggaacttcttcgcgccgaacgcctgcccgcacagcgtctccagcgcgctcgccatgcccagctgacatgccagatgcaga

SEQ ID NO: 91830 - DNA, 426 bp, Zea Mays
atggcgccggtggcccaccatgagaagttgagcgtgagggcgatgcccgcgaggccgaagcggagcctggagacgaggagccagcttgcgaggaggtggacgcagagcgcggctgcggcggcggcggcgttggcggagttcctcatctggcactgcaggaagcgctgcagcgggaagaggaaggcgaaggagaagtgcagcgggatgaaccacacgcacaccttccccgccatcgccgccagctccggcggctgccccgtcagcagcagcacgtcctccgcgaagaagtacatgggcagcagcagcaccgcgcacatgaacagcacgatccacgaccgctgcatgtacacgcccatcatgtggaacttcttcgcgccgaacgcctgcccgcacagcgtctccagcgcgctcgccatgcccagctga

SEQ ID NO: 91831 - DNA, 1492 bp, Zea Mays
ctcttctctccggttgtcgccggaactcagaggcggcaatggacagccgacacatcgcgccaccgcccgccgtcctgttcctcgtgctcctgtccaccgcggcgcggccgtctctggctcagccgagcaacaacagcacgagcggccaccactcccggacggccggcgggttcacgccgaccacggtgatcgtgctcgtggccctcgtctccgccttcgtcgtcctcaccctcttctccatctacatcaaccgctgcgcgccgacccgccctcccccgcagcggccgtcccgccccgctccagctccaccggaccaccaccaccaccaggcctcctccgccaccggcggcggcggaggcggaggcgttctccatccggagcgccgcgcgcgggccgggctcgacaaggaggccgtcgtgtcgttccctaccgcggtctacggcgacgtgaaggcgcgcgtggcgggcccgctcgagtgcgcggtgtgcctcgccgcgttcgaggaccgcgacgagctccgggtgctccccgcctgctgccacgtcttccacccggactgcatcgacccctggctcgccggcgccgccacgtgcccgctctgccgcgccgacctcacggccgccgcgccgcaccctcctcccgcctcctcctcgggctcctcctccgagccggcggtgcgggagcgggaacaggaggcgcgcgacgaggagcgagacgaggaggcgcgcctcgtcgccgccttcacgcccgagtccgtcatgagcttcggcgcggcgcgcccccacgagttcgtctaccggcggacgcagtccgccatggacgtgccggaccggcacacgctgcggctgccggagcacgtcatgaaggagctcgcggcggtccgcaggcaccggcgggccgcgagcctcgccgtgtaccccgacggcgtggagcgggcgcccggatggctggcgtcgttctggcggtccgtgccgtggcagcggccgagccggacggactcggacgccgtcgacgagcacggcggcagcaagcgcgtcttccccatcgccggagctccgtcggaaagacccagcggatcaggggatgctacagacgaggagaaagccgaccgtggcgctggcgcgtgattcagcttcgcgtccaatgcaagggacgatgatcattgattggtgttgtgaactgtgaagtcatcaagtgctagctgcctccctctgggaaaaatatgaaattctagtttggtttctagttatttttaaaaaaagcgtacctaaaattagaaaaaagggtattccattccgacgttttcatcctagacgttggtttagaactgcattcctttttcagatggagggaaaagtagcgtgatggtagaattaacgtgtgtccccgatgccggtcgatgctttttatcccggtactaatgtactcgtatactccatgatgattttttggtctgggtatgaatgcctggtgaaattgtaagatttttagc

SEQ ID NO: 91832 - DNA, 864 bp, Zea Mays
atgtacacattattagaaactaagggtgtgtttggttcactgccccagatgccacagcctaaggttaggcatgccccattttcgtcgatgagtaaaggaaaagagaagattgagaggaccattgtgtgggatgaggatcaaagcaagtttatgcttggttggtttactgacttcataaaagaacaacatgctggttttaagattaaaaaacaacaccacttcaccttaagcaagagtggtaacacttttgacacaacaaggtctatggtagtcatatctgaatcagagaaagctaacctaaaggatagggcaagaaggctcctttctaagcctatcaagtttttcaatgaaatgcaagagttgtttattaacagcagtgctgatggctctctagccatggaagctacaactttgacttctccaactatcctcgggcctgtgcatgatctaggtgatgattctgacactttaccatctcccaatcatcatccatctcaaagtgttgatcatagctcgtcaagttctggactgaagcgcccacaaggagagggagtaccagcgaagaggaatgtgaaaccaaagagtcgcacaacaaaggtagtagatgaactcagtgctactttggtagaacttcgaaatgatcttaagaagccaccacctccagtgcctatgccttttgttaaccctgatgcaatattgtggcaaaggcttgagaatatgacaattactactgatcaaaagttaatggtaggaacgtatctagcacacaaagatcaaaagggtatgcgtggtttcttatctgctgcatcagacataacatttgagtcatgggtactaaagcatctgagtgatttggacctgtga

SEQ ID NO: 91833 - DNA, 98 bp, Zea Mays
tagattttttatccacagatatattaatagacatgaacatgttcctatcgggcagatggatacggatataggtggatactactcattccatgtaccca

SEQ ID NO: 91834 - DNA, 860 bp, Zea Mays
ggcccatgggccatgaccccgttgcccgctataaataccccgccccgcccatcggttccaactcacaactcgcagatcgagtccaagcattcaccggagaatcccaaatcacactctccagtaaccgcccgcttctccagccgcatctctagccgagtctatctcctcctcctcctccgccgccgcaactatcctaatggctcgcttcgccgtggtcgccgccatcgtcgccctcctcgccgtcgtcgcggcggcgcaggccccggccgccaccccgaccacagctcccaaggccgcgcccaggatggccccgctgccgccaccccctgtgcggtccccggccaccgccccggcgccggccgccaagccgccgaccgccgcggcgccgtccccgctggcctctcctccggccccgcccaccgagggccccgccgcctctgcgccgtccgcgaaggccccgacctcgtccgtctccaccaccccggccggcgcccccaccgtcgcgccttccggcagcggcgccgcctcgcgcgcctccgccctcggcttcgtcgccgtcgccggcgcggtcgcagccgccgtcatgttctagacgcctccccgcggcgtcgggcggtgctgtttatactatcgtgttttacttttgtgcgtgtgtgtgtgggtgggtcgtgggtgattctttcttagatactgagagagcagaggttatgtgagagattctagtgggggtagcgatgggctgttacatatgaatatcatgattcatgatccagaggattattaatggaattctttcatttgtttctagtacgtcacgttgtcccttgtcatattactagtatactacacacgattgcacg

SEQ ID NO: 91835 - DNA, 1572 bp, Zea Mays
ccacatcacaggtttagcaaatccatgcatgcctgcgaggacgtcccccttttattatccgcttcctaggaatgcctcaaattttagcgcatttccaatcgccgaccctccaggttccaagaccccttgctccgatcgccgtgcagcatttcaagaaccgctccaatccgtggaggaagagatgcaggaaagccggcgggacatggatcatcaggtcgcccagcttcggggcgagctgcgcaaggtgcgcgacgagcgagaccgcgcgaactgcgtcctggatgtgaccgactggaaggcgctggcttcggccaatgaccgcaccgcgatagagacgctcgaggccgagctcgacgtgtcgcgggaatccgagaaacggatgctggactcactggcagtgcagacgaagcagctggagggcaccaagatatcgctcgaggaagccaagctcgagatcgcgtcgctgcaggagatcgtccagaggctcgaggccgccagaacccccgtcgccacgacgccgaggaaccggcgcgaccgcgacatgcagagggtccacggcgagctgcgggtggcgctggcggcggaggagaagagcaagaaggcgatggaggagttcgtgctggcgctcaaggaggtgaacgcggagctgcacacgacgaagcagcagctggcgcgcgcgcagcacgaggcggagtcggccaggctggacgccgaccgtctgcacatgtcggcgaagcgcaaggacgagaagctccgggccctgtcggacgaggcggcgcggctccgggccgaagccgaggagtcgttcgccgcgtggcggggcaaggaggccgggttcacggcgtgcatgaagtcgacggaggccgatctcgccgaggcgcggcgcgagaacgcgcggctgctggattcgcagcgctcctggcgggccgaggtggccaagctgcgggacatcctgaagcaggcggtgaaggacaccaaggtggcgaaggaggcgctggaggaggcgaggagcgagaacgcgctgctcaagggcgtgctcggcgacaaggacaccgccgtgaagtgcacgaagcaggagctggagtgcctccgggtcagcgaggccgcggcgcgcgacagcgtcaaggagcttcagggcatgctcgtggcgacgtcgtcgagccccacggccgcgaagctggacgcggaggagatcccgacgccgcgtatgagggtcggaccgccggggctcgagaagtacccgtcggactcgaagataaggccgccggccggaatcacgcggccgcggcagctgtcggagaccttcgaaggctcggcgtacgacatatttggcacgatggacgaccagaggagtggtgatttgggcgtgttctcgtcgatgccgaggttgcccgcccggcggcgggtggtcctgcgcaaggttggcagcttgttccggtggaagagcttcactaacaaatagccgctgggaaacaacagtgcagtgcagtggcaaactggcaactggttccttttttttcctactaatcttgaggtgctcctgggttcctgtgtggtgtgtattacttgttg

SEQ ID NO: 91836 - DNA, 1696 bp, Zea Mays
actggccactcgtagtcgtaggcactttcatctgtgccctctgcgttcgagatcgatctcagctggcaccgtcccagttcgccatggcggaggaccggagccccaagcccatccactgcaaagcggcggtgtgccgagccgccggcgagccactcaccatcgaggagatcgtcgtcgacccgccgaaagcgtacgagatccgcatccgggtcatctgcacctcactctgccacaccgatatcaccttctggaaagctaaggtggcaccggtgtttccaagaatactagggcatgaggcgtacggggtagtggagagcgtgggggagcacgtggagggcttcgcggcgggggacaccgtggtgccgacgttcctggggcagtgcgagcgctgcgccagctgcgcgtcggagcacagcaacgtgtgcgacgcggtgccgttcgtcatcggccccgggatgcggcgcgacggcaccacccggttccgggacgcgcgggggagcccgctgcacgacctcctcgccgtctccagcttcagcgagtacaccgtcgtggacgtgaaccaggtggtcaaggtcgaccccgccgtgccgcccaagctcgcctgcctcctcagctgcggcgccggcaccggggtaggagcagcgtggaggtctgccaaggtggagccaggatccactgttgcaatctttggcctcggatctgtcggtttggcggtggtccaaggcgcgaaaatgtgtggcgcatccaagatcatcggcgttgatctcaaccctgacaaggaggaagtagggagatcgttcggcgtcacagacttcgtcaatccatcgcagctggacaagcgttctgtcgtagaggtgatcgttgagatgaccggcggcggcgtggactacagcttcgagtgcatcggcgtgccgtcggtgatgaccgacgccttcagatgcaccaagatggggaagggcaagacgatcgtgctggggctggggagggacagcgacgaggtgtgcctgccgtcgctggagctgctgttcgggaggtgcgtcatggggtcgctcttcggcgggctgaagcccaagacccacatccccgtcctcgccaagaaatgcatggacaaggagctgcagctggacgcgctggtcacgcatgagcttggactgcaggacatcaacaaggccttcgacctgctcctgcaggggaaaagtctgcgctgcatcctctggatggacaaggacaagtaacggaaggagaggggcggccggaccaatccttcctgtctctgaataaatttgccctgttttttcagcgaggcgttgctgaaagctggtgttagcggcgaccaagactatctgttcctgaaaccctgtgtatcagtatcgtttcgttgtctgaactgattaaatcctaatatcgatagattagactctccccagcaaccgctttgtcccctgaataaagtgattcatcatctcttttttacgtctagcaatatcctgtaaaaggtccctacaagacagcgaaggttaccgtctgtccccttgtgtcgtggtttcggaaatctgacacacgggattatattgattcatgcccggattatagtacagtgtagtactgatcgtagaattacagtagattgtgttataaattgtgtgctcgtgtgtagaaaaaataaagagtttcccttttatactttaagggatta

SEQ ID NO: 91837 - DNA, 1856 bp, Zea Mays
ggccactcgtagtcgtaggcactttcatctgtgccctctgcgttcgagatcgatctcagctggcaccgtcccagttcgccatggcggaggaccggagccccaagcccatccactgcaaagcggcggtgtgccgagccgccggcgagccactcaccatcgaggagatcgtcgtcgacccgccgaaagcgtacgagatccgcatccgggtcatctgcacctcactctgccacaccgatatcaccttctggaaagctaaggtggcaccggtgtttccaagaatactagggcatgaggcgtacggggtagtggagagcgtgggggagcacgtggagggcttcgcggcgggggacaccgtggtgccgacgttcctggggcagtgcgagcgctgcgccagctgcgcgtcggagcacagcaacgtgtgcgacgcggtgccgttcgtcatcggccccgggatgcggcgcgacggcaccacccggttccgggacgcgcgggggagcccgctgcacgacctcctcgccgtctccagcttcagcgagtacaccgtcgtggacgtgaaccaggtggtcaaggtcgaccccgccgtgccgcccaagctcgcctgcctcctcagctgcggcgccggcaccggggtaggagcagcgtggaggtctgccaaggtggagccaggatccactgttgcaatctttggcctcggatctgtcggtttggcggtggtccaaggcgcgaaaatgtgtggcgcatccaagatcatcggcgttgatctcaaccctgacaaggaggaagtaggcaagtcgatcgaaaaaaaggatatcgttttccattcagtgacagagcagagcagcgcaccatgcattatatcgagtgccagctactagctgcctgtcttcttctcaaaacgggaaccaagagaagtagaatcttccactcaactcaccactctttactcttttgatcgcagggagatcgttcggcgtcacagacttcgtcaatccatcgcagctggacaagcgttctgtcgtagaggtgatcgttgagatgaccggcggcggcgtggactacagcttcgagtgcatcggcgtgccgtcggtgatgaccgacgccttcagatgcaccaagatggggaagggcaagacgatcgtgctggggctggggagggacagcgacgaggtgtgcctgccgtcgctggagctgctgttcgggaggtgcgtcatggggtcgctcttcggcgggctgaagcccaagacccacatccccgtcctcgccaagaaatgcatggacaaggagctgcagctggacgcgctggtcacgcatgagcttggactgcaggacatcaacaaggccttcgacctgctcctgcaggggaaaagtctgcgctgcatcctctggatggacaaggacaagtaacggaaggagaggggcggccggaccaatccttcctgtctctgaataaatttgccctgttttttcagcgaggcgttgctgaaagctggtgttagcggcgaccaagactatctgttcctgaaaccctgtgtatcagtatcgtttcgttgtctgaactgattaaatcctaatatcgatagattagactctccccagcaaccgctttgtcccctgaataaagtgattcatcatctcttttttacgtctagcaatatcctgtaaaaggtccctacaagacagcgaaggttaccgtctgtccccttgtgtcgtggtttcggaaatctgacacacgggattatattgattcatgcccggattatagtacagtgtagtactgatcgtagaattacagtagattgtgttataaattgtgtgctcgtgtgtagaaaaaataaagagtttcccttttatacttt

SEQ ID NO: 91838 - DNA, 1824 bp, Zea Mays
actggccactcgtagtcgtaggcactttcatctgtgccctctgcgttcgagatcgatctcagctggcaccgtcccagttcgccatggcggaggaccggagccccaagcccatccactgcaaaggtaccatgctaccacgacttctgctcgccatggatatatgattatgaagtatgaacacgacacgctgttcctgttaacctctaaccccctgacgatgttacctcgctcggggcgggccggggggcgtgcaccgaacacgcagcggcggtgtgccgagccgccggcgagccactcaccatcgaggagatcgtcgtcgacccgccgaaagcgtacgagatccgcatccgggtcatctgcacctcactctgccacaccgatatcaccttctggaaagctaaggtggcaccggtgtttccaagaatactagggcatgaggcgtacggggtagtggagagcgtgggggagcacgtggagggcttcgcggcgggggacaccgtggtgccgacgttcctggggcagtgcgagcgctgcgccagctgcgcgtcggagcacagcaacgtgtgcgacgcggtgccgttcgtcatcggccccgggatgcggcgcgacggcaccacccggttccgggacgcgcgggggagcccgctgcacgacctcctcgccgtctccagcttcagcgagtacaccgtcgtggacgtgaaccaggtggtcaaggtcgaccccgccgtgccgcccaagctcgcctgcctcctcagctgcggcgccggcaccggggtaggagcagcgtggaggtctgccaaggtggagccaggatccactgttgcaatctttggcctcggatctgtcggtttggcggtggtccaaggcgcgaaaatgtgtggcgcatccaagatcatcggcgttgatctcaaccctgacaaggaggaagtagggagatcgttcggcgtcacagacttcgtcaatccatcgcagctggacaagcgttctgtcgtagaggtgatcgttgagatgaccggcggcggcgtggactacagcttcgagtgcatcggcgtgccgtcggtgatgaccgacgccttcagatgcaccaagatggggaagggcaagacgatcgtgctggggctggggagggacagcgacgaggtgtgcctgccgtcgctggagctgctgttcgggaggtgcgtcatggggtcgctcttcggcgggctgaagcccaagacccacatccccgtcctcgccaagaaatgcatggacaaggagctgcagctggacgcgctggtcacgcatgagcttggactgcaggacatcaacaaggccttcgacctgctcctgcaggggaaaagtctgcgctgcatcctctggatggacaaggacaagtaacggaaggagaggggcggccggaccaatccttcctgtctctgaataaatttgccctgttttttcagcgaggcgttgctgaaagctggtgttagcggcgaccaagactatctgttcctgaaaccctgtgtatcagtatcgtttcgttgtctgaactgattaaatcctaatatcgatagattagactctccccagcaaccgctttgtcccctgaataaagtgattcatcatctcttttttacgtctagcaatatcctgtaaaaggtccctacaagacagcgaaggttaccgtctgtccccttgtgtcgtggtttcggaaatctgacacacgggattatattgattcatgcccggattatagtacagtgtagtactgatcgtagaattacagtagattgtgttataaattgtgtgctcgtgtgtagaaaaaataaagagtttcccttttat

SEQ ID NO: 91839 - DNA, 1661 bp, Zea Mays
atgaaagaaagggaacgggagacgagacttgtaactgtagaggacgaagcccttagctctgggcattatatatacatatccactcctgctctggtctctcgcaaccaccgtgcgcgcatcaactcggcacaaccggtgagtcttctgcatcttcgatggagaaccagggacccaaacccatccgatgcaaagcggccgtgtgcagggccgccggcgagccgctggccatcgaggaggtcgtcgttgacacgcccaaggcgcacgaggtcaggatacggatcatctgcacgtcgctctgccacagcgacgtcacgttctggcgcatgaaggatctccctgacaatatccccagaatatttggccacgaagccttcggggtggtggagagcgtgggtgaacaggtggacgagttcgcggcgggcgacgcggtggtgccgacgttcctggggcagtgcagcgagtgcgtggactgcaggtcggcgcgaagcaacatgtgctccaagtaccggttcgcggtgcgcccggggatgccgcgcgacggcaccacccggttcaccgacggccaggggcgcccgctgcaccacttcttcggcgtgtccagcttcgccgagtacaccgtggtggacgtgaaccaggtcgtcaagctcaaccccgccgtgccgccggcactcgcctgcctgctcagctgcggcgcctccacgggggtcggagccgcatggaagcaggcgaaagttgagcctggatcttcggtcgctatcttcggcctcggcgctgtaggattggcggtggctgaaggagccaggatttgtggggcgtcgaagataatcggcgtggatataaaccctgagaaatgcgagcttggaaagaagttcggcgtgacacatttcatcaatcccaaagagctcggtgaggagaaacctgtccaccaggcgatcgccgagatgaccgacggtggcgcggactactgcttcgagtgcattggactggcggcgctgatgaacgacgcgttccggagctcccgagacgggtggggcaagacgatcattcttggggtggaaatgcacggtgcccccctctgcatctctcctcacgagatcctccacgggaagtctgtcatcgggtccatgttcggcggggtgaagcctaagcaggatatccccattctcgccgacaagtacatgaacaaggagctggagcttgacaagttcataacccatgaagttggcctcaaggacatcaaccaagcttttgacctcctgctgcaagggaagagtctcaggtgcaccatatggatggacaagtgatgcaataaccagagttacgcatcggaacctgaagatgctatgatgcttccacctcgtttcagtgaaaataattgtttcatcagctgccaaaagaaatgttatatgtatcttaaattcgagttttccattccttttcttcacgtcatcactcaaacatgttaaaatgtgcccatgttttgatttttactgctttcaaaagttgtgactatccttatcttattagtgatattttcggaatttatctggcggaagtaggactgaaattaagcaggtgctatcgtgctagtgtaacaaaaatatagcatatatgtagcacatgagtagcaagaaaacattatgtaatatatcattgaggtg

SEQ ID NO: 91840 - DNA, 612 bp, Zea Mays
tctctctcctacaccagccgtatctacacatcggcgctggcggcggcgcagcagtggtggtgggttcccgcgtcacgggtcgcggacgcgtggactggtggccggcatgggcacgccgggcgacggcggcgtccgcggcgagggcaggcagccgaagccgagcggcgacgtgggcacgtggatcggcgacggcatcccgcggaggcggcgcatgtaggcggagatgggcgactccgcggtcatgcagacggccgggagcggcgggagcggggagagcgccggcggggccggctggaggatgggcggcgggcgcggcggggccagaggcggcgggcggatgcggtggaggcgggagggtatcgccgtcggcggcggaggcgggggcgccatggtgtgaggcagcggaggaggacgcgccatgaggggaggcgggggtggcgccatgacgggggcgggggcgggggcggccgcgggctggggcggcaggaggtgggacggcgagccggtgagcttctggacgacgtcgcggaagtccgacttgtcgatgttgtacaccgggggctggggaggcgggtggtcggcagggacggaggaggcctgcggcggcggaag

SEQ ID NO: 91841 - DNA, 1437 bp, Zea Mays
tttatttttatctcctttttccatgttcaggtagagtctgtctcctaccactgcagggtagacggaggtcttaaaaccgttgtaagtgctaggaagtttgtccccggtgcaaagctgtgcatgcaacctgatgtcataccaaacaagcgcaagtcaaagagctcacgcaaggatagatccaaaactcaatcaccactgctgcttgggcttcctgatgaactggctatttcctgtctcatgcgggctgctcggatcgaacacccaaatatgcggttagtctgtaaacgatggaaccgacttttgtctggaaattattattactccttgcgtaagaagaatggatctatgtcttcaaaagggaccgtgatcagaagctatcttggtatgcctttgatcctgtaaaccagctctggaagtcattgcctccagttccaccagagtattctgaagctgttggttttggtagtgctgttctcaacggatgctatctgtacttatttggcggcaaagacccagtaaatggatctatgaggcgcgttgtattttacaatgctcggataaacaaatggctacgagctccagatatgctgcaaaaacggcacttctttggttcttgtgtcataaacaactgcctttatgttgctggtggagagtgtgtagggatacagagaattctaagatccgctgaggtatatgatccgaacaggaatagatggtctagcattgctgaaatgagcacaggaatggtgccctccattggagtagtacatgatggcaagtggtatctaaaaggtctaaattctcatcgccaggtcatgagtgagcactatcttccagcatccaaaatgtggtcagccaccggtaatgaaatggtaacgggctggcggaatccaagtatttccctcaatgggcatctctattttgctgattgtcgtaatggctgtaagcttcgagtttataatagagagatgggatcatggacaaggttcattgacaccagacaccatatgggaagctcacggtctctcgaagcctcagcctttgtctcccttaatgggatgctctgcatcatccgtaacaatatgagtatcactactgttgatatattggacccaacaacagctgctgaggtcgaccgtgcgcgcatgtgggaggcttttgctcgaaagtggcagcacagatcatcattcatggcaaacatatggtcaatcatcacaggttgtaatctgaagacagacattatgcattgtcaggtgctccaactccaagtttgagtttgtccatgtatgaagtggagtatatacttacacaacctcagagcctgacttggaagatgaaatgggtacatgagccatatgaaagagaccagctttcagctttgaactctgtaaatatccctgatttcgtccttttgaactttctaattttggcacctat

SEQ ID NO: 91842 - DNA, 296 bp, Zea Mays
aaaatggtggtctgctttagtatgaaagtctaggccttaaagcgagcccatgctgcagtggcctgttatccttccaccgttaatagcgggcagtgatcgctgctctgtgaagacagcctcacgccgttcctgccactataggtccaaggaagcccagggccttcgccttggcttccaacggccactaccaacttggaacgggcaggccaacaaaggcacaccatggacccaggcaaagacacggtaccaagcatccacaccaccttaatacccccacatgggttacaagcccgcgc

SEQ ID NO: 91843 - DNA, 1141 bp, Zea Mays
aatggtactagttgggtcgtgagaccaggaaaaaggaagtcagggatactttcgtcaagaccgaccggtgtcgtgtcgcctgctttgaaaaatcatacaacaaccaactaaaataagcgcacgcgcacacgcatcccggcagtcctgtccagtggtgcagctgcctgccttcagccttccctctctttcgcgacccccccggagccggagcagagatcgccagctctaccggcgcggaggcatggcgggggccggagacaaggtggactacgtcttcaaggtggtgctgatcggagactcggcggtgggcaagtcgcagatcctcgcccgcttcgcccgcaacgagttcagcctcgactccaaggccaccatcggcgtcgagttccagacccgcaccctcgtcatcgaccacaggagcgtcaaggcccagatctgggacaccgccggccaggagaggtacagagccgtgactagtgcttattatagaggcgcactgggagctttgctggtctacgacatcaccagacggcagagcttcgatcacataccccgctggctagatgagctccgagcccatgctgacaagaacattgtgataatgctggttggcaacaagagcgatctcgaggagcagcgggccgtgagcactgaagacgccaaggagtttgccgagaaggagaacctcttcttcttggagacctctgcgctccaggcaacaaatgtggagagttcttttcagaccgtcttgacagagatcttcaaaatccacagcaagaagaacatggtgtcggagccaaagagcaacggagccgcgccagcaatgccggggacgaaggtcctcgtcccaggtccggcgcaggaaatcccgaagagcaagtgctgcagttccatgtgacgcttctgcgtttggtgctgggtgtgtcgaaaatattcacgaaatattgttttttttttgctgtaaatccctgctgttatgcttggatttttggaggggttgtgttggaacaccggtgtatttttagatatttgacacaactgtgacacgagggaaggatgtgctgatgtgtattggttctcttgttctctaattgatatgttttatccctgctgcaaatatctgtagcactgattgtttttgaga

SEQ ID NO: 91844 - DNA, 2633 bp, Zea Mays
acacttctcatctcccatcccatcggctctgcttgccagttccgcggtgagagcccaccacttctgcgtctcaaggggcagaggttgtacggatcgctctggccttcgccgccggttggctcatcaaccaccgcgcgggcacgggcgcacgacgcaggtgccattccggtctccggctctctcctccggaagcgctctctcccagaacagaacgcctacctagttacctactctctcggcaacgtttccaaaagttcgttgaggcatcaaagaattgcctgcctgcgccgtgcgacggcgcggccgggatgggcaagatgagctgcttctccggtctgctcagctgcaagaagaaggcattggagggtaagaacaagggcgcttacgccaagaaggctagcggcaatgattgccccaaggtgaagccggtggaattcatggacatggtggtggcggacgctgttgtcgacgacgtcagcaggtgccgagacagcgttccagcgtctgcatgcagcagtaggcttgtcgctcacgcagccgccgagctggcacgccatgccactggcgagaacggcgacaaggccgcagctaagagggactcgtcctccgccgctggctcctcctcctccggttacagcagcgacggaacaggcgacgatgccaagagcgccgagccggacgacggcgaaccctgcagcctcggccgcatgtcgccgacggcggcatcgccaaagctgatgcgctcctgctccaacatcgagacgacgagatctgtcctgacagggtccgacctgccggcgaagtcacgctcctacgacgacctgaagacgctgccctcccacggaagctcgagcgcccgcagcggcggcgcggtgcgcgcgagcccgacgccggcgtcctccaggacctcgtgctccgctgaccgcgtcatgctgaagaagcggtcgtcgaggcaggtgctcccgtcgcggagccggaagctgtggtggcagctgttcctctggagccaccgcaacgtgcaccgtcgtcggggcgcgagcgcgcccacgcccacgacgctgctgtggccatcgccggggagagaaggcggcggcgccgcgcaccggcgcgacgggtacgcgtccgacacgctgggcacggccactgcggacgacgccaaggagaagggcgtcgccgtggaggaggagggcccccgcgtcccgacccagtgggtggcgttctccgccgaggcctcgccgctggaccgggtcagcgcgtgggtgaacagcctcgggaacggctcgttccacgccgtcgacgaggacggtggcgccacggggcacggcggcgacggcgcctcgcgcctgcgcccgcgaccgcgtcgctctgagattgtggagctgccaacgtcggcggccggcggcaggaggcatccgcagccgcaggcgaggcggcgcgcggcggcggcggcggccgaggctggccaggcgagcggcatcatcgtgcagacgctcaacaccttctcctccgtcgcgcacatcgccggcatggggctccaggccgtcccggcgatcgcggccttctcgaccctccgggccgtcaatctgtctggaaacgtgatcgttcgaatcaccgctggatcgttgcctaagggcctgcactcgctggacctgtcgaggaacaagatcgcaatcatcgaggggctgcgggacctgacgaggctgcgggtgctcaacctcagctacaaccggatctcacggatcgggcacggcctgtccagctgcacggcgatcagggagctgtacctggccgggaacaagatcggcgacgtggaggggctgcaccgcctgctcaagctggccgtcctggacgtgagcttcaacaagatcggcacggccaagtccctgggccagctcgtggccaactacggctcgctgcgggcgatcaacctgctgggcaacccggtgcaggccaacgccggcgacgacacgctgcgcagggccgtgtcgggcctgctcccgcggatcgagtacctcaacaagcaggccgtcaagccgcagcgcgcgcgggaggtggccaaggacagcgtcgcgcaggcggcgctcgggaacgccgccggcgccaactcgcgcaggcggccggcgcggcgcctcggccagagccccgccgggtcgtcggccgccaagggccgcaggggcagcaggggcaggtctgtcaccaggccccagagctccagcttgccattgccaaggagatgatgaggcgagcgaaacgtgacgtttcggcctgaagaagaaaaaccccatgcgcttacattgcatgaaaggaaagccctcacgatgcccagcccagcccagctaatacccacgattggtcatgtcatttgtagttgtagattgcagcctagtggagtagtgggcctgcagtccgcagctatgggtaataataataatacggaggtgacaagatccactgcaagcagagaagtttgagtggcgagcgattgtctgaatccaatgaaaaataacttataatattaccttcgttgacaccgttgaattttttcggaaactttaatcactcgttttattcaaaaatataaaattttaaatcaaacataaactaccttaattgataaaataaatcacaaaaaa

SEQ ID NO: 91845 - DNA, 1695 bp, Zea Mays
ctagtttcgtccctgcttcctgcctacagcgtcgtgcgtatgatacttcttcctaatcattcgcgtgcaccgacaaacaagagagcaggtctccaaaactattgcccccagagatcttgtatcaggagagggtaaataaagtttttgggaagcactctacatggatgctcgatcacttcattgccgtcttcaatctcattgccatggctcatctgtcgccttgtcacgtggacgtttcatgtcgtcggtaacaatgagatggtgttaggcgtcaagttgtcttctctacccgatcgtcggcaaggaacaaacgttcattcaaatcaaagcgcaagtacccgatgtacaagatgacgtggccatcatagcaacaatcaaaaggtttcatatgggacaaatgcacatcacactttgctcgagaaccaacaagcaacaatataagaactttatgaagtcatgcaaaaacttctgcaagtcaaacatggaccatagaaaaatagtcgaagaagaagctaacttctaaactcaagccaaaagtggtaacaattacaaccaatccaaaactagcaactttgagtgaaggcctctaccttcgtatcaccaactaaaccaaatagacaatcaactactggcgagagcaaccactaagagagaactcattatagtgaaacaacattcaatagaggagggacaaaccacaaaggacagagaggaggtagaattggtggggggtgaaagggaaatgtgcctttgggccatttctaagtattttggtgatttagtgtccaacacaagtgcctaagtgttgatctatgcaaagtggtggacaaagagcaaatcaagtcaaaaggtatgtttctagacttagtacattgttttatggactgatgtattgtgtctaagtgctggaaacaggagaaatcaaattgaaaaagagatggctttattcagccaaagtcagctctgtctgggtgcaccggactgtccggtggcgcaccggacagtgtccggtgcgccaggctggctcaggcgaacttgctgctctcgggaagtaattaacggcgtacggctaaaattcaccggactgtccggtatgcaccggactgtccggtgagccaacggtcggccgcgcgatccgcgcgagacacgtggccgagccaacggtcagaagggggcaccggactgtccggtgtgcaccggacagtgtccggtgcgccaacggctccaaagtgccaacggtcggcttcgctaaagaaggaaagaaatccgcaccggacagtgtccggtggcgcactggactgtccggtgcgccaggcgacagaaggcaagaattgccttcctggaatgctctcaacggctcctagctgccttggggctataaaagggacccctaggcgcatggaagaaagcaccaagcaacctttgagcattgttgatcattcacacttcactcttgcgcactaattcgacattcttagtgatttgagctctgttctagtgagaaccttgagatattgttttgagctcaagttttgatcgtgtgtgcgcgtatttgctgtggttttgagtgtgttgcttccctcccttactcttgtgcttcatattgattcttattgtaagggcgagagactccaagttgtggagattcctcgcaaacgggaaaagagcaaagtaaaaagaacactgatgaggaca

SEQ ID NO: 91846 - DNA, 583 bp, Zea Mays
agaacacaaccaaagcatctagtttcgtccctgcttcctgcctacagcgtcgtgcgtatgatacttcttcctaatcattcgcgtgcaccgacaaacaagagagcaggtctccaaaactattgcccccagagatcttgtatcaggagagggtaaataaagtttttgggaagcactctacatggatgctcgatcacttcattgccgtcttcaatctcattgccatggctcatctgtcgccttgtcacgtggacgtttcatgtcgtcggtaacaatgagatggtgttaggcgtcaagttgtcttctctacccgatcgtcggcaaggaacaaacgtataactatctccctttcatcatgtattaaatattgtttaatttaatttgtttagatcagtgcaagttttaatcttagttatctttgtaaagacaattcattatgtaataaatttgtgccattggattctataaactgagtcattatatgtgtgaaatctaattttgacacacatatgagatacatctggatttttccttaaattcgtgtgtgacaataggactgacaattctagatcacttcaaccgcaat

SEQ ID NO: 91847 - DNA, 1785 bp, Zea Mays
gccaaccggcaaccgccatccgattcacgtagtttgatcttaaccgtcggattaagattttgacttgacgaaacggatcggttggacaggccgaaaccgcgacgtccacttcggggcatctgtgtcttttgggtttggcccatttcttcgcttccttccgcaaccgcaaccgtgcgttcctcccccgttccaacccccgacaccccccaatcgcaacagtttcactgcgccacagtacaaatcctgtctcgcaccgccccagccggccagaacagcgacaggcccctcgcgccgatcgccgggcaatgggagctgggcgggggcggtgatgggcgcggcgggctccaggttggagaaggcgctgggcgagcagttccccgagggcgagcgctacttcggcctcgagaacttcggaaacacctgctactgcaacagcgtgctgcaggcactttatttttgtgttcctttccgtgatcaattgctggagtactatgcaaacaataaaaacaccggagatgttgaagagaacatgctaacctgcctggctgatctgttctctcagatcagtagccagaagaagaaaacaggggttattgctcctaagcgttttatacaacgattgaagaaacaaaatgagattttccgcagctatatgcatcaggatgctcatgagtttctgaattttttactgaatgagctagttgacattctagagaaagaacataatgctgcaagagagtctcttcaaaatctctcactccaaaagaattcaaatggccctattgatggccaacccaatggtagtcacaaagaattagctgtcacatgggttcataaatgcttccagggaatattgactaatgaaacaaggtgtctgagatgtgaaactgtgactgatagagatgaaacattttttgacctgagcctggacatcgaacagaatagttcactcaccagctgtcttaagaacttcagctcaacagagactttgaatgcagaggacaagttcttctgtgacaaatgctgcagtttgcaggaagcacaaaaaaggatgaaaataaaaaaaccaccaaacattctagtaattcatctcaagcggttcaagtatattgagcagcttcagcgctacaaaaaactatcatacagagtggttttcccactggagcttaaacttcttaatacagttgataattcggacttggaatactcccttttcgctgtggtagttcatgttggaagtgggccaaaccatggccactatatcagtttggttaagagccacaatcattggttattctttgatgacgagaacgttgagatgactgatgagtccatggtacaggcattctttggctcaccgcaggagttcagtggtaatactgataatggctacatactcttctatgaaagccttgctgaaagaagttgatgtccttctcataccatgtgattagttatacactttcctttcccttccatttctgctggggatatatagaatattcagtgaaaaccagaataagctgaatgagaggccttcagcttcagttggtatggtacgatcaacgcttggcaataaaacaagttacctggaggggctataggctgactagtttgtagttcctactttatctgtttttatgcatatacaggttgtatcaattcctgaataatgtttgttgaagacctttattatcatgtaaagagattctatctaggaagccttttttggattcgagtaaaaaaattgtttcttaaataaatagctcatgccgatcttcattc

SEQ ID NO: 91848 - DNA, 2202 bp, Zea Mays
cactggcgtaaacgcgcgcctcgcagccccaaagcaagaacaactttggttagtttaactgccgcatctaccattcgtccattccaccccccatctgccctcaccagagcttccccttcctcactgtggtggcttggtgggggggatccgcgcctcccccatcgctggccagctcatggcgccccccgccgccggaggatctccaatgcgccgtgaacgtcaagtgcgccgcgccgccggcgctggccgcgggggacggcgagctccggtggctgcggcggtgcgtggaggcggcagcgaagggcttcgccatcggcgcaggcctcaagggcggcctcgcgctcttctccgtcctcgtccgcatccgcagccgccgctcccccagatcgaggaaggccggagctatgaccaacgaggaggccgtggtgctcgcggtcaaggagactgtgaggtatggcttgttcttggggacctttgccggcagctacgtctccgtcgatgagtacatcgccgccgtctggggacgtaagagaacagcaaggtggaggtcatttttagctgggttgattgctggtccttctatgctcctgacaggaccaggaactcagcatactagcttggctatatacattctgatgcgtgcagcagtgcttgcatcccgttgtggaataaagagcaagcgttttggaaagatctgtaaacctttgacttggtcacatggtgatgtcttccttatgtgcctctcatctgcacaaattttgtcagcatacattttaaagcaggacagtttgccatcatcatataaatcatttctaaacaagcatggtggaaaagatcttactattttgcaaggtgtgaaggatgtagtcaaccacactgctttcagtaacttagtgggtatcgagaagtactacaaatctgttggtgttgacataaagctagatccaaacatgaaagtgccttgctcaattgtgcatggtaaccagtcatgtacaggacatgtcttttcattcttgttacaagcatatggaagagcagttcctgtatatgttccagtctacttagtccctgcacttgtagttcataggcagcatctcatgaaaaggccttactcaattatagggaagagttttctaggagtagcaagatctagtctgtttctctcagtatactgtgcatctgcatgggcttggacctgcctgctttttaggatcttccggagagccaatacccctcttgtcatccttggcacgtttccaacaggtctggctttgctcatcgagaagaagagcaggaggattgagatatccctgtactgtcttgccagagctatcgagagttttttcacatggatgaccgatgcaggactctgccctccaatacttcagataaagcgagctgatgtggttgtgttcagcatagctacctctatcattatgcactgctatgcgcaggaaagagaagtcttccggtccaagtacctgaatgtgctggactgggtatttggtgtgccgccaccacccgacagtgaggataagaactgctatctaccagatgaagccaagaaatgccagtgacatactggcttgtagagttcattgcatgatttttgtatggtcacccatgtgatcctagcgcgagactagacccattagagggtttagtgaacgaaccttgtacaggactcttcggaaaatcgggactttagtggatatagcaagatagattttttaattaattgatttgtccaaacgatgccctggtcattaaatgaccatatgtggttgtaacttatgacctttattgttgttgttgtcatgcgaatataacttatggtccttgaaattgtttaaatggaatttctcattcttttgttttcttatagaccgttctggctgaagaacttggagatggagttcagagcttgcacaattgaccacatctcccgcccatagactcactttaccaagccatctccagcaggtcatgtaaatgactgtttataccgtttgcagagtgaagtttgaaataaggagtatgatatggagtatgatggagatagtctacgattttcttaattagagatgagggttaagggtagcaatgggctctaaaatttatactggcaatttaaggattgaactctatttatgtacatttttaactaaaattaattaaggactcgaatgaatcgtggatcca

SEQ ID NO: 91849 - DNA, 847 bp, Zea Mays
aactttggttagtttaactgccgcatctaccattcgtccattccaccccccatctgccctcaccagagcttccccttcctcactgtggtggcttggtgggggggatccgcgcctcccccatcgctggccagctcatggcgccccccgccgccggaggatctccaatgcgccgtgaacgtcaagtgcgccgcgccgccggcgctggccgcgggggacggcgagctccggtggctgcggcggtgcgtggaggcggcagcgaagggcttcgccatcggcgcaggcctcaagggcggcctcgcgctcttctccgtcctcgtccgcatccgcagccgccgctcccccagatcgaggaaggccggagctatgaccaacgaggaggccgtggtgctcgcggtcaaggagactgtgaggtatggcttgttcttggggacctttgccggcagctacgtctccgtcgatgagtacatcgccgccgtctggggacgtaagagaacagcaaggtggaggtcatttttagctgggttgattgctggtccttctatgctcctgacaggaccaggaactcagcatactagcttggctatatacattctgatgcgtgcagcagtgcttgcatcccgttgtggaataaagagcaagcgttttggaaagatctgtaaacctttgacttggtcacatggtgatgtcttccttatgtgcctctcatctgcacaaattttgtaagttcccttcaaatattcaataacattttaggttctagtgattgtttagaaattagaaattattgttaatgtattccaagttatgccgtgaatggagctgtttacacttcatatctgttgactgt

SEQ ID NO: 91850 - DNA, 2277 bp, Zea Mays
aacaatctgaggcaaagggaattccgaaaggcaagtcgaggagactagagggagccgacgagagggatcgccggatcggcgcgcccgcaaccgtcgagacaccgaaaaccctaacctattttgccgctcatatcgcaatggcgagcccctcgacgacgccctcggctccgatcgcggcggaggtagtccccgtggctgaggggactccggcggcggtactgccgccgctcggctcgatggcgtccctgtacgtgggtgacctggctgagaccgtagacgagccgcagctccacgcgctcttcagccaggtcgcgcccgtcgcgacggtgcgcgtctgccgggacatcctaagcggcgtctcgcttggatatggttacgtaaatttttactcgcgccaggaagctactcgtgcgctagaagctttgaattttaccccattgatcggaaagtacatccgggttatgttctctaaccgggatccaagtctgcgtaagagtggacgtgctaacttgtttgtaaagaaccttgagcctaacattgatagcaagaacctgtatgagatcttctcctcctttggcgcaatactgtcatgcaaggtggccactgattcagctggtcagtcaaaagggtatggttttgtacaatatgagactgaggaatctgccgaagctgccattaacggacttaatggtatgctagcaaataacagaaaaatgtttgtgggcctacacatgcgccgtcgggacagagaagtgaagttcacaaacgtatatataaagaatttgcccactgaattcagtgaggatgacctccgccaggagtttgcaccgtttggtgaaattactagcgctgtggtcatgagggatgctgatggtgcctccaaatgtttcggctttgtaaattttaaaaagccagagttcgctatagaggctgttgagaaggccaatgggaaggccatcggtgacaagactttatatgtcggaagggctcagaagaaggaagagagaaaagccgagctgaaaacgagatttggacgtggcagagacaacaaggttgataaacctaatggtatcaatctatacttgaagaacattgatgatggtataaacgacgaggggttgaagaaattattcgaagaatttggtcaagttgcttcatgcaaggtaatggttgatgctcgaggaaggagcaagggttcagggtttgtgtcgtttgctactgctgaagctggccaaagggcgataaaccgaatgaatggtaggattgttgggaagaaaccactctacgttggtttagctcagcctaaggaggaaagaaaagccatgctaatggcgcatttcgctcaacgtaacctggcaatggcagcttctcaatatgccggacctcagcaggtctattttggtcacccttcttcacctggcccgatcgcgcctcctcagggcgcagtatttgggtttccgcaacacttcgttccgggaatggggcctatctctcccgttatgatgccgccacacaacatgcagcgaccaaggtatcctggtcctgctccatatcggcagcagcaggcgatgatccacgcaaatgccaatcacatgccgaatgccagacctgggccttaccctgcaatgccgcctcaggccttcccaggtgcgggtgccacggcgtggcagcaacacgctgtaagcaggacaactactgccgtagcatctgctggaccggcagaccaacatcagattctcggcaacaagttgtacgcgctggtcgaacagctcgagcgcgatcacgctggcaaagttaccgggatgctgctggagatggacaaggccgagatcctacagctgctgcggtctccggaggctctccgggccaaagtccgcgaagccatggctgttctacagcggaccaaggccggaggctccgtcgatcctgccgccgccgctgctgtcgccaaagccggagactcggcagccgatcctcctcctgctgccgccgccgccgccgccgccgttaaggccggaagctcagccgatcccggtgccgccgccgccgcaccaaccgtaaacgcctgagcgattgatgcgctcgcagggcaaataagattttcagttcatgtgccggcttggactccggacatgcctaggatatatgctaataatttgtagccgaacctccttgtctcgtagtttatttgttccaggttactcttggttttccagttgccgaaccgtagcttgaaccttagaatgcttttgtctccgattgtttttttttaataaa

SEQ ID NO: 91851 - DNA, 718 bp, Zea Mays
aatcaaatagttctattttagcaatcatcgctgaaacttgtcattgtctcctggctaggctcatgtgcgaggtcaccaagtgaggaagcattatcgtaaaatcatttggtctgttggaatagtggagaagatcatattgcgttggaggcgaaaaggggccgggttgcgtggatttcggtctacagaaggtgcaacggtgggcagcagtagtaatttgatccaaaataaacctgaggatgattatgatttcttacaacaaggacggaaacaaaccgaagaaaggctgcagaaagctcttgccagagtgaagtcgatggctcagtacccagacgctcgggatcagtatcaaaggattctgactgttgtgactaaaatccaagaatcgaaggccatgcaagaaaagatgctcgaggagtcgaccgagatggacgaaggcttctttatgagcgacttcaaagagctatgggatgacgacataccaatgccttcttggtcatagcaacttgtgtgtttatgcttgtaaattacttacatgtatgttagtgttaccaaactgatgacccgtagttgcattgctaagttaaccatatctagcgtgtatatattttagtttggttcagctcttagtcatttagctgtagtgttttgtacagtatatgttgtacagaaggaaaaacatatttactgaggactccttgggaatgggatggatatatat

SEQ ID NO: 91852 - DNA, 2973 bp, Zea Mays
cttttgggaacaaacgcttttcttcttgaattacctgcttaaaaattttcgatcacctctctcatgtttggatatcacaatcagggcggtaaatcaacttctcgtattagaggacatgatgatatgcttcaagctgctcgtacggatagccctttaagccagttgccttcacaaactacagagggtggaaactctcttagcggacaagcctcagaatacgaggaaacagaatcagatatatattcaggaggagccggataccaccctttctcttggacgcagcaccatgaaaatggaggtggacctgtgattggcacttctatcccaagctcctacgttcctgcactgcctctaggtaaccttcaaggtttcccagctacagtgactaatacagacatttattctcgtcaagatgccttaccagttactcttaatgagcctggacttgcaattgaattcaatggagcagataatcagttggatccatcatcattgaatggccttgttaaacctttcctccaaatgtccacacctcaaagtactgttccctcagaattatttcctttcactgaagaacatggaaatgaatccttcacatttcatgaagtatatagtaatggattgagtatcaaggatgcagagattgtaggcaccaatgaagaatcagtatggaagctacctggtgctatcagctcaattccttcagaggacagtttccagcaaaatgatagatcgttggaggaaactattagttaccctctcttgaaaactcgctcgtctaatctttctgaaatgctgaaggacagctttaagaaaagtgatagtttcacgagatggatgagcaaagcacttggtgaagtagattcccaaattaagtccagttctggagtgtattggaacagtgaagagaccaataatatcattgaaacatcaagttgtgatcagttggatcaatgtactattgacccagtgctcgcacaagagcagctgttcagtatagttgatttttctccaagctggacatatgcgggctccaagactagggttctcattaacggtaaattcttaaattctgctgagcttaaaagatgcaagtggtcatgtatgtttggtgaggtcgaagttccagcagagatttcagctgatgggattctcagatgttattctccgtcacacaaacctggcagggttcctttttatgtcacatgtaccaacaggttggcctgcagcgaaatccgagagtttgagttccggccaagtgttactcaatacatggatgccccaagtccacatggtgctacaaacaaaacatatctccagatgcgtcttgataacctgctgtctttgggacacaatgagtaccaggcaacggtatctaaccccactaaggagatggttgatttgagcaagaagataagctcattgatgacagacaatgattcctggtcgcagttgctaaaattggctagtgataatgagcctgtcactgatgatgatcaggatgagttctttgaaaagcacttaaaggaaaaattgcatatctggcttgtccacaaagcaagcgatggtggcaaaggccccaatgtgttagatgacgaagggcaaggtgtacttcatctggcagctgccctaggttatgattgggtgataaggccagcagtttctgctggtgtgaatataaatttcagagatgctcatggatggactgcactccattgggctgcattttgtggcagagagcgaacagttgttgcacttatcgcacttggtgcggctcctggagctttgacagacccaacgccaattttccctacaggaagcacaccagctgatctggcatcagctaatggatacaaggggatctctggtttcttggccgagtcttctttaacaagtcatcttcagaccctcgatcttaaggaaggcaaggggagcaatccgccagaaatatccggtctgcctggtattggagatgttactgaaagaagagcatcaccattagcaggtgaaggtcttcaagctggatccatgggagattcactaggtgctattcgaaatgctgcccaagctgccgctcgtatatatcaagttttcagggtgcagtctttccagagaaagcaagcagttcagtatgaggatgacaatggtgcagtatcagatgaccgtgccatatcactcttatctgttaaaccatctaaacctgtacagctcgatcccctgcatgctgctgcaactcgaatacagaacaagtaccgtggatggaagggaagaaaggaatttctacttatcagacagcgcattgtcaagatccaggctcatgtgcgaggtcaccaagtgaggaagcattatcgtaaaatcatttggtctgttggaatagtggagaagatcatattgcgttggaggcgaaaaggggccgggttgcgtggatttcggtctacagaaggtgcaacggtgggcagcagtagtaatttgatccaaaataaacctgaggatgattatgatttcttacaacaaggacggaaacaaaccgaagaaaggctgcagaaagctcttgccagagtgaagtcgatggctcagtacccagacgctcgggatcagtatcaaaggattctgactgttgtgactaaaatccaagaatcgaaggccatgcaagaaaagatgctcgaggagtcgaccgagatggacgaaggcttctttatgagcgacttcaaagagctatgggatgacgacataccaatgccttcttggtcatagcaacttgtgtgtttatgcttgtaaattacttacatgtatgttagtgttaccaaactgatgacccgtagttgcattgctaagttaaccatatctagcgtgtatatattttagtttggttcagctcttagtcatttagctgtagtgttttgtacagtatatgttgtacagaaggaaaaacatatttactgaggactccttgggaatgggatggatatatat

SEQ ID NO: 91853 - DNA, 3487 bp, Zea Mays
tcacaggcccccccagcacctctccactcctccacaaaaccctgcgacaaatccgggcgaccgactcacggagcgatcgccatcggaacggtagccactagggccggaggggctcgcgccttgtggtgccgtggtggtggcctcactccgcggcggcgcctggtcttgttccgcttcgttgcgcgcggcgatggcggaggcgcggcgccacgcggtcgcgccgcagctagatattgagcagatattgaaggaagcacaacaccgatggctacgacccgctgagatatgtgaaatacttaaaaattacagaaatttccacattgccccagaaccaccaaatagacctccaagtggttcacttttcttgtttgatcggaaagtattgagatatttccggaaggatggccatagttggaggaagaaaaaggatggaaaaactgtcaaagaagctcatgaaagattaaaatctggaagtgttgatgtgcttcattgctactatgctcatggtgaaggaaatgaaaactttcagaggaggagttattggatgttggaggaggattttatgcacattgtacttgtacattatcttgaagtcaagggcggtaaatcaacttctcgtattagaggacatgatgatatgcttcaagctgctcgtacggatagccctttaagccagttgccttcacaaactacagagggtggaaactctcttagcggacaagcctcagaatacgaggaaacagaatcagatatatattcaggaggagccggataccaccctttctcttggacgcagcaccatgaaaatggaggtggacctgtgattggcacttctatcccaagctcctacgttcctgcactgcctctaggtaaccttcaaggtttcccagctacagtgactaatacagacatttattctcgtcaagatgccttaccagttactcttaatgagcctggacttgcaattgaattcaatggagcagataatcagttggatccatcatcattgaatggccttgttaaacctttcctccaaatgtccacacctcaaagtactgttccctcagaattatttcctttcactgaagaacatggaaatgaatccttcacatttcatgaagtatatagtaatggattgagtatcaaggatgcagagattgtaggcaccaatgaagaatcagtatggaagctacctggtgctatcagctcaattccttcagaggacagtttccagcaaaatgatagatcgttggaggaaactattagttaccctctcttgaaaactcgctcgtctaatctttctgaaatgctgaaggacagctttaagaaaagtgatagtttcacgagatggatgagcaaagcacttggtgaagtagattcccaaattaagtccagttctggagtgtattggaacagtgaagagaccaataatatcattgaaacatcaagttgtgatcagttggatcaatgtactattgacccagtgctcgcacaagagcagctgttcagtatagttgatttttctccaagctggacatatgcgggctccaagactagggttctcattaacggtaaattcttaaattctgctgagcttaaaagatgcaagtggtcatgtatgtttggtgaggtcgaagttccagcagagatttcagctgatgggattctcagatgttattctccgtcacacaaacctggcagggttcctttttatgtcacatgtaccaacaggttggcctgcagcgaaatccgagagtttgagttccggccaagtgttactcaatacatggatgccccaagtccacatggtgctacaaacaaaacatatctccagatgcgtcttgataacctgctgtctttgggacacaatgagtaccaggcaacggtatctaaccccactaaggagatggttgatttgagcaagaagataagctcattgatgacagacaatgattcctggtcgcagttgctaaaattggctagtgataatgagcctgtcactgatgatgatcaggatgagttctttgaaaagcacttaaaggaaaaattgcatatctggcttgtccacaaagcaagcgatggtggcaaaggccccaatgtgttagatgacgaagggcaaggtgtacttcatctggcagctgccctaggttatgattgggtgataaggccagcagtttctgctggtgtgaatataaatttcagagatgctcatggatggactgcactccattgggctgcattttgtggcagagagcgaacagttgttgcacttatcgcacttggtgcggctcctggagctttgacagacccaacgccaattttccctacaggaagcacaccagctgatctggcatcagctaatggatacaaggggatctctggtttcttggccgagtcttctttaacaagtcatcttcagaccctcgatcttaaggaaggcaaggggagcaatccgccagaaatatccggtctgcctggtattggagatgttactgaaagaagagcatcaccattagcaggtgaaggtcttcaagctggatccatgggagattcactaggtgctattcgaaatgctgcccaagctgccgctcgtatatatcaagttttcagggtgcagtctttccagagaaagcaagcagttcagtatgaggatgacaatggtgcagtatcagatgaccgtgccatatcactcttatctgttaaaccatctaaacctgtacagctcgatcccctgcatgctgctgcaactcgaatacagaacaagtaccgtggatggaagggaagaaaggaatttctacttatcagacagcgcattgtcaagatccaggctcatgtgcgaggtcaccaagtgaggaagcattatcgtaaaatcatttggtctgttggaatagtggagaagatcatattgcgttggaggcgaaaaggggccgggttgcgtggatttcggtctacagaaggtgcaacggtgggcagcagtagtaatttgatccaaaataaacctgaggatgattatgatttcttacaacaaggacggaaacaaaccgaagaaaggctgcagaaagctcttgccagagtgaagtcgatggctcagtacccagacgctcgggatcagtatcaaaggattctgactgttgtgactaaaatccaagaatcgaaggccatgcaagaaaagatgctcgaggagtcgaccgagatggacgaaggcttctttatgagcgacttcaaagagctatgggatgacgacataccaatgccttcttggtcatagcaacttgtgtgtttatgcttgtaaattacttacatgtatgttagtgttaccaaactgatgacccgtagttgcattgctaagttaaccatatctagcgtgtatatattttagtttggttcagctcttagtcatttagctgtagtgttttgtacagtatatgttgtacagaaggaaaaacatatttactgaggactccttgggaatgggatggatatatat

SEQ ID NO: 91854 - DNA, 1614 bp, Zea Mays
tcggtggctttgcaattctgttgctctgaatgtcgcgtctatatagttcttttctattacgagagtttcttccataacttttatatttcatgcagaacagttgttgctcctcttgagaggttaaagttggagtatatagttcgtggtgagcagaggaatctatttgagcttatgcatgctattgcaacaacacaagggttgaaaggcttttggaaagggaactttgtcaacatcctccgcactgctccattcaaggcagtcaacttctacgcatatgacagttacagaaagcaactgctcaaatggtctggtaacgaagaatctgcaaactttgaaagatttattgctggtgcttttgctggtgttacagcaactattatgtgcatacctatggatacaatcaggacaaagatggttgctcctggtggtgaagctttaggtggggtcattggtgttgcccgccacatgatccaaactgaaggattcttctcgctgtataagggattggtgccttctcttatcagcatggcaccctctggcgctgtattctatggagtgtatgacatactgaagatggcttatctgcattctcctgaaggaaagaaaagggtatcgatgatgaagcaacaaaaacaagagacaaatgcattggatcaacttgaactgggtactgtgaggactttactctatggggccattgctggttgctgtgctgaagctgctacatacccatttgaagtggtccgtaggcagctacagatgcaagtaaaagcaaccagaatgaatgcgcttgcaacatgccttaagattgttgaccaaggtggggtaccagcactgtatgctggtctaatccccagcttgttacaggttctaccatcagcatcgatcagctattttgtttatgagttaatgaagatagttctgaaagtggagtgaatacaaattcattggtgagcctacaagcaagttcaaatggcgaccacgtatcttgatgaaattgccgggcatccccagtaacttatgctgtgagggtagtttcaggttggtaaaatggttgttcatctgatgctttgcacactagttgaccaaattgcacacgcggtcctattcgagacccgattcagtggcttaatagaagattgttctcttcgactcccgtcctagggaaaacatctcggccctgtccaatttccgttgacaaattttacatactttatcgttgatgtatgtgacacattgacagcaagccagagtgacatttgagtgatttccgttgtgactttctaattcacagttgagatagggatagggacatatatacaggtgttagatgtgattgtcgttgacgcacgttgggtctatctgcagtttcgtgattttgacctgtgagcatcgggtacttaacgctgccacgctttgcagttggcggatagagaggcacggccgacgggtgattaagagcatctccaagagactcttcattttttgctctctatttaactatctatttatattttcataaagactacactctatatatagcatctcagtccaacagactatctatctagtttggctagtcaggtggctagctaaatttagctagtgagagag

SEQ ID NO: 91855 - DNA, 1958 bp, Zea Mays
ctttcctgccccaagggtgcaccggtgcggtacaggcagggcggcaagatcaaccaccagcaaatcacaagaacaagagaagaatcaatccgacagcacccctctccctcgcatctacttgctcgcccagcagccgccccaaccctcgcgtccgcatcgattcgaggcagctcgctcttatatatcccattccgctcggttggattcagcttcccctcgccctccctcgtcgataaaaccgatgcaccgtgccgcctcgcgaaccctagcggcggcgggacgaggggaagaaggttacaggcacggcgcgtgaagggtcctgtcctgcccagtcccgtctggtccgccgcgatgccgtggcccgagatgtggctgcctcccgcggccggggagggggcggtggcggcggggctgtttctcgatggcgtcgatgggacggcgcacggcgcgctcctcgcggccatgcccgggtgctccctgtcgttcgggcaccagcatcggcgccgacgtggggcgccgctggggtttctgtcgctgacaatgtcggtgaaggggggtagggggttcgcgccggccccggttgggttgctccccgacgcggaggagaaggccagggcggaggagtcggacgcgctggtcgcggggaagagggctgtggaagtggccgcggaggcggagggagtgattctgctgcaggagaaggagaagaaggacggtcgtgctggagctggagcgatgaacgtgagcaagcatctctgggctggagcagttgctgccatgatctcgagttgttgctcctcttgagaggttaaagttggagtatatagttcgtggtgagcagaggaatctatttgagcttatgcatgctattgcaacaacacaagggttgaaaggcttttggaaagggaactttgtcaacatcctccgcactgctccattcaaggcagtcaacttctacgcatatgacagttacagaaagcaactgctcaaatggtctggtaacgaagaatctgcaaactttgagagatttattgctggtgcttttgctggtgttacagcaacgattatgtgcatacctatggatacaatcaggacaaagatggtagctcctggtggtgaagctttaggcggggtcattggtgttgcccgccacatgatccaaactgaaggattcttctcgctgtataagggattggtgccttctcttatcagcatggcaccctctggcgctgtattctatggagtgtatgacatactgaagatggcttatctgcattctcctgaaggaaagaaaagggtatcgatgatgaagcaacaaaaacaagagacaaatgcattggatcaacttgaactgggtactgtgaggactttactctatggggccattgctggttgctgtgctgaagctgctacatacccatttgaagtggtccgtaggcagctacagatgcaagtaaaagcaaccagaatgaatgcgcttgcaacatgccttaagattgttgaccaaggtggggtaccagcactgtatgctggtctaatccccagcttgttacaggttctaccatcagcatcgatcagctattttgtttatgagttaatgaagatagttctgaaagtggagtgaatacaaattcattggtgagcctacaagcaagttcaaatggctaccacgtatcttgatgaaattgccgggcatccccagtaacttatgctgtgagggtagtttcaggttggtaaaatggttgttcagctgaagctttgcacactagttgactaaattgcacacgcggtcctattcgagacccgattcagtggcttaatagaagattgttctcttcgactccgtcctagggaaaacatctcggccctgcccaatttccgttgacaaattttacatactttatcgttgatgtatgtgacacattgacagcaagccagagtgacatttgagtgatttc

SEQ ID NO: 91856 - DNA, 2091 bp, Zea Mays
atcaccactgagtcacgactccagatctcgcaccgctcgccatggacctcctcgacgcgaggcaccgccacacgccggatttgagctcctcccaagatgccgcctccaacatggggctcccgctcgccggtgccgcctaccagccctacgtttctgagcttctttccttctccatcgagcgcctccacaaggagccggagcttttgagggtcgacgcggagcgggtgcggcggcagatgcaggaggtggcggtggaaaactacgccgcgttcatcgccgcctctgaggcgctctccttcgtccgcgcgcagcttgagagcttcgacggccacctcgaggccatgatagaggagataccaaacttaacatctggctgcactgagtttgttgaatccgcacaacaaattttggaggagaggaagcttaatcaaacattactagccaaccacactacattgcttgacttgcttgaaattccacaattgatggacacgtgtatacggaatgggaactatgatgaagcacttgacctagaagcttttgtgagcaaaatctggaagttgcaccctgatttacctgttgtccaaggattagccactgaagtcaagaagacagtgcaatcattagtttcacagcttctccagaaacttcgatcaaatattcagttacctgagtgcctacgaattgtagcacatctgcgccgaattggagttttcagcgagtcagaattgcgcttacagttcctgaggtgcagggaagcttggctttctggaattcttgaagatctggaccaaaggaatgtttatgattacctgaaaggcatggtgacttgccacagggtacatctatttgatgttgttaatcaatatcgagcaatattcaacaatgataaatctggaaatgatgagaactatgacggcgggctgcttttcagctgggcaatgcaacaagttagtaatcacctcactactcttcaagttatgttaccaaacataacagaaggtggttctctgtccaacattcttgaacaatgcatgtattgtgcaatgggtcttggcttagtcggattggattttcgtggccttcttccaccgatctttgagaatgcggttctaaatttattctcaaagaatatgagtacggcggtcgaaaattttcaggtcattttggattcacactgttgggttccgatgccatctgttggttttgtagcaaatggtgttgtcgatgagacttctgatgatgtgactccaccttccgttttaatggagcatccacctcttgcagtgtttgtcaacggtgtttcagcagcaatgaatgagctaagaccgtgcgcaccattgagcttgaaagttgtccttgctcaggaggtggtcaagggactacatgcagtctctgactccctagtaagatacaaagctatgcggatgcttcgtggaaatgagtccgcccttttcctttcactatgccaggcattcatcgaggttgcatatccttattgtgccgcatgttttggccgatgctacccaaacggggcaacattgatctcagagcgtcaaggcacatttgacgctgtccgtcagctattgaccgtgccggcaagatctaacagttccagcatcgaaagaaggcagtcaggaggcatcgaaagaaggcagtcaggagccattgaaagaaagcagtctgttgagagcactgggatagcggtcactgataacgggctctcagccgatggacctgggctagagacgaacagttctgctgcaaccaccacctcaccggtagacgacggtccaccagcgagtaagtagcttggacctccgtttgaatcgtcaaagtccttcatcaaggcctggtttagtcaaccagagaaaaaattgctgcaaagttatattaatagagaattattcatagttttgttctcagtcttacagtgcacacaagatctcactggatatctgtatctcacttttttatcactcgaacaattaaacttctagctgttcattgttatactcgatacctagatgttgtagagtttccaaccggaacattcaataatctgattaagtgattagtacaaaccgtgtt

SEQ ID NO: 91857 - DNA, 1942 bp, Zea Mays
atcaccactgagtcacgactccagatctcgcaccgctcgccatggacctcctcgacgcgaggcaccgccacacgccggatttgagctcctcccaagatgccgcctccaacatggggctcccgctcgccggtgccgcctaccagccctacgtttctgagcttctttccttctccatcgagcgcctccacaaggagccggagcttttgagggtcgacgcggagcgggtgcggcggcagatgcaggaggtggcggtggaaaactacgccgcgttcatcgccgcctctgaggcgctctccttcgtccgcgcgcagcttgagagcttcgacggccacctcgaggccatggtgtatacggaatgggaactatgatgaagcacttgacctagaagcttttgtgagcaaaatctggaagttgcaccctgatttacctgttgtccaaggattagccactgaagtcaagaagacagtgcaatcattagtttcacagcttctccagaaacttcgatcaaatattcagttacctgagtgcctacgaattgtagcacatctgcgccgaattggagttttcagcgagtcagaattgcgcttacagttcctgaggtgcagggaagcttggctttctggaattcttgaagatctggaccaaaggaatgtttatgattacctgaaaggcatggtgacttgccacagggtacatctatttgatgttgttaatcaatatcgagcaatattcaacaatgataaatctggaaatgatgagaactatgacggcgggctgcttttcagctgggcaatgcaacaagttagtaatcacctcactactcttcaagttatgttaccaaacataacagaaggtggttctctgtccaacattcttgaacaatgcatgtattgtgcaatgggtcttggcttagtcggattggattttcgtggccttcttccaccgatctttgagaatgcggttctaaatttattctcaaagaatatgagtacggcggtcgaaaattttcaggtcattttggattcacactgttgggttccgatgccatctgttggttttgtagcaaatggtgttgtcgatgagacttctgatgatgtgactccaccttccgttttaatggagcatccacctcttgcagtgtttgtcaacggtgtttcagcagcaatgaatgagctaagaccgtgcgcaccattgagcttgaaagttgtccttgctcaggaggtggtcaagggactacatgcagtctctgactccctagtaagatacaaagctatgcggatgcttcgtggaaatgagtccgcccttttcctttcactatgccaggcattcatcgaggttgcatatccttattgtgccgcatgttttggccgatgctacccaaacggggcaacattgatctcagagcgtcaaggcacatttgacgctgtccgtcagctattgaccgtgccggcaagatctaacagttccagcatcgaaagaaggcagtcaggaggcatcgaaagaaggcagtcaggagccattgaaagaaagcagtctgttgagagcactgggatagcggtcactgataacgggctctcagccgatggacctgggctagagacgaacagttctgctgcaaccaccacctcaccggtagacgacggtccaccagcgagtaagtagcttggacctccgtttgaatcgtcaaagtccttcatcaaggcctggtttagtcaaccagagaaaaaattgctgcaaagttatattaatagagaattattcatagttttgttctcagtcttacagtgcacacaagatctcactggatatctgtatctcacttttttatcactcgaacaattaaacttctagctgttcattgttatactcgatacctagatgttgtagagtttccaaccggaacattcaataatctgattaagtgattagtacaaaccgtgtt

SEQ ID NO: 91858 - DNA, 2158 bp, Zea Mays
atcaccactgagtcacgactccagatctcgcaccgctcgccatggacctcctcgacgcgaggcaccgccacacgccggatttgagctcctcccaagatgccgcctccaacatggggctcccgctcgccggtgccgcctaccagccctacgtttctgagcttctttccttctccatcgagcgcctccacaaggagccggagcttttgagggtcgacgcggagcgggtgcggcggcagatgcaggaggtggcggtggaaaactacgccgcgttcatcgccgcctctgaggcgctctccttcgtccgcgcgcagcttgagagcttcgacggccacctcgaggccatgatagaggagataccaaacttaacatctggctgcactgagtttgttgaatccgcacaacaaattttggaggagaggaagcttaatcaaacattactagccaaccacactacattgcttgacttgcttgaaattccacaattgatggacacgtgtatacggaatgggaactatgatgaagcacttgacctagaagcttttgtgagcaaaatctggaagttgcaccctgatttacctgttgtccaaggattagccactgaagtcaagaagacagtgcaatcattagtttcacagcttctccagaaacttcgatcaaatattcagttacctgagtgcctacgaattgtagcacatctgcgccgaattggagttttcagcgagtcagaattgcgcttacagggaagcttggctttctggaattcttgaagatctggaccaaaggaatgtttatgattacctgaaaggcatggtgacttgccacagggtacatctatttgatgttgttaatcaatatcgagcaatattcaacaatgataaatctggaaatgatgagaactatgacggcgggctgcttttcagctgggcaatgcaacaagttagtaatcacctcactactcttcaagttatgttaccaaacataacagaaggtggttctctgtccaacattcttgaacaatgcatgtattgtgcaatgggtcttggcttagtcggattggattttcgtggccttcttccaccgatctttgagaagtaattggtgtttaaattatagaattttattagtgactctaaaggggttttattattgatgctgccatctgcattttgcagtgcggttctaaatttattctcaaagaatatgagtacggcggtcgaaaattttcaggtcattttggattcacactgttgggttccgatgccatctgttggttttgtagcaaatggtgttgtcgatgagacttctgatgatgtgactccaccttccgttttaatggagcatccacctcttgcagtgtttgtcaacggtgtttcagcagcaatgaatgagctaagaccgtgcgcaccattgagcttgaaagttgtccttgctcaggaggtggtcaagggactacatgcagtctctgactccctagtaagatacaaagctatgcggatgcttcgtggaaatgagtccgcccttttcctttcactatgccaggcattcatcgaggttgcatatccttattgtgccgcatgttttggccgatgctacccaaacggggcaacattgatctcagagcgtcaaggcacatttgacgctgtccgtcagctattgaccgtgccggcaagatctaacagttccagcatcgaaagaaggcagtcaggaggcatcgaaagaaggcagtcaggagccattgaaagaaagcagtctgttgagagcactgggatagcggtcactgataacgggctctcagccgatggacctgggctagagacgaacagttctgctgcaaccaccacctcaccggtagacgacggtccaccagcgagtaagtagcttggacctccgtttgaatcgtcaaagtccttcatcaaggcctggtttagtcaaccagagaaaaaattgctgcaaagttatattaatagagaattattcatagttttgttctcagtcttacagtgcacacaagatctcactggatatctgtatctcacttttttatcactcgaacaattaaacttctagctgttcattgttatactcgatacctagatgttgtagagtttccaaccggaacattcaataatctgattaagtgattagtacaaaccgtgtt

SEQ ID NO: 91859 - DNA, 2009 bp, Zea Mays
atcaccactgagtcacgactccagatctcgcaccgctcgccatggacctcctcgacgcgaggcaccgccacacgccggatttgagctcctcccaagatgccgcctccaacatggggctcccgctcgccggtgccgcctaccagccctacgtttctgagcttctttccttctccatcgagcgcctccacaaggagccggagcttttgagggtcgacgcggagcgggtgcggcggcagatgcaggaggtggcggtggaaaactacgccgcgttcatcgccgcctctgaggcgctctccttcgtccgcgcgcagcttgagagcttcgacggccacctcgaggccatggtgtatacggaatgggaactatgatgaagcacttgacctagaagcttttgtgagcaaaatctggaagttgcaccctgatttacctgttgtccaaggattagccactgaagtcaagaagacagtgcaatcattagtttcacagcttctccagaaacttcgatcaaatattcagttacctgagtgcctacgaattgtagcacatctgcgccgaattggagttttcagcgagtcagaattgcgcttacagggaagcttggctttctggaattcttgaagatctggaccaaaggaatgtttatgattacctgaaaggcatggtgacttgccacagggtacatctatttgatgttgttaatcaatatcgagcaatattcaacaatgataaatctggaaatgatgagaactatgacggcgggctgcttttcagctgggcaatgcaacaagttagtaatcacctcactactcttcaagttatgttaccaaacataacagaaggtggttctctgtccaacattcttgaacaatgcatgtattgtgcaatgggtcttggcttagtcggattggattttcgtggccttcttccaccgatctttgagaagtaattggtgtttaaattatagaattttattagtgactctaaaggggttttattattgatgctgccatctgcattttgcagtgcggttctaaatttattctcaaagaatatgagtacggcggtcgaaaattttcaggtcattttggattcacactgttgggttccgatgccatctgttggttttgtagcaaatggtgttgtcgatgagacttctgatgatgtgactccaccttccgttttaatggagcatccacctcttgcagtgtttgtcaacggtgtttcagcagcaatgaatgagctaagaccgtgcgcaccattgagcttgaaagttgtccttgctcaggaggtggtcaagggactacatgcagtctctgactccctagtaagatacaaagctatgcggatgcttcgtggaaatgagtccgcccttttcctttcactatgccaggcattcatcgaggttgcatatccttattgtgccgcatgttttggccgatgctacccaaacggggcaacattgatctcagagcgtcaaggcacatttgacgctgtccgtcagctattgaccgtgccggcaagatctaacagttccagcatcgaaagaaggcagtcaggaggcatcgaaagaaggcagtcaggagccattgaaagaaagcagtctgttgagagcactgggatagcggtcactgataacgggctctcagccgatggacctgggctagagacgaacagttctgctgcaaccaccacctcaccggtagacgacggtccaccagcgagtaagtagcttggacctccgtttgaatcgtcaaagtccttcatcaaggcctggtttagtcaaccagagaaaaaattgctgcaaagttatattaatagagaattattcatagttttgttctcagtcttacagtgcacacaagatctcactggatatctgtatctcacttttttatcactcgaacaattaaacttctagctgttcattgttatactcgatacctagatgttgtagagtttccaaccggaacattcaataatctgattaagtgattagtacaaaccgtgtt

SEQ ID NO: 91860 - DNA, 547 bp, Zea Mays
ttagttctttgaactctgcgcttgcaacattattggtatactatcttactgacattgtgacatcttctaccatgctaggtcattttggattcacactgttgggttccgatgccatctgttggttttgtagcaaatggtgttgtcgatgagacttctgatgatgtgactccaccttccgttttaatggagcatccacctcttgcagtgtttgtcaacggtgtttcagcagcaatgaatgagctaagaccgtgcgcaccattgagcttgaaagttgtccttgctcaggaggtggtcaagggactacatgcagtctctgactccctagtaagatacaaagctatgcggatgcttcgtggaaatgagtccgcccttttcctttcactatgccaggcattcatcgaggtttgtttagttttccatgatagaccagtggttttgaatctgataagagaacataacttgctacaacacacatgaaatgaaaccaaatgactcagtcttacccgtaaagcctaaattgtaaataaacagtaaacatttgtcttta

SEQ ID NO: 91861 - DNA, 2018 bp, Zea Mays
ctccgttcctcccccggccccctatataaaccggacacgaccccctcgctgcacccgaatccagttccaaacccatcgcccccacactcctatcgcgtcgcatatatatatatatatatatatactcctacacatcaccaggaggttgcgaccaagccaagtacgtagtacgctagctagctaccacgctgctgcaccggcgaccgcgcgcgtggggtgcaacgacatatatagatcatatggtgtcgacgctgcagtccacggcggcgctccggccggaggccaccaccagcaagcgcgcgccgtggctctccctcgtcggcagcgccgtcgcctcctccaccaccaccacgggttccgcgcccaacggcaagaagcggaagcgggacggcagcgacgaagacgactgcggcgaggtcgtggacgggatcgagctcaatttcgacgccgcgccgctgccccccgagtggcaacgctgcctcgacatcaagtcggggcagatccactactacaacacgaggacgcagaagcggacgtggaaggaccccaggggggagccggagtaccgcgccgccgccgaggaggaggaggaggaggactccgcgaattgcgcgccgccagggctggacctggagctgaacctcacgttcgagccgcgccgggctgtggcccacgagaagaagaggcccaaaccccccgcggctaataaggcgacacatgaccgtcgtcgtcagcccgcggaggaggccgaggacagcagcagcggcagcagcagggagatggtggccggcgtgtgcatgcgctgccacatgctggtgatgatgtgccgcgccagcccggcgtgtcccaactgcaagttcctgcacgcgccgagccgccccgtcgccccggagccggagccggagccgccggtgccactgctcaagctcggcctccagctgctctgctgccgggactagctggctggctacatacgctgcatgccccaccggcagcgtcgatcatcaaatcaaattaaacgggagcgcgtcgtccgaccgacctaccatggatggttctattctataccgtgctcccccccggcctagccatgcgtggaacgaagtggaacacagtagagcgcgcgcgcacgtgtgtgcgtccgcatgtgcaaggggtggggtggaggggctcaggatcacgttacgtaattatattagaggcagcgtaatccaatcggacagctagcgtggaggagcgaggaggagttgcatggttaatggcgagggttttttaaattggtgccctcagttttggttgtgtgctcacttatacccttagtcgtgtttttgctcagctgtgcccttcctattctatagaatagaagggcacagctgagcaaaaaacacaagtaagggtatagatgagcacacaaccaaaactaagggcaccaatttaaaaaaaccctaatggcgacgccgacgccgtccgaccgatcgatcagctgtacgtacggttcggttcaccaaggggccgggccgggtatatcgtatcatatagtatggcgatgagtggtgatgtagatatacaagtgcatagcatgggtgcagctcggaactttcgggtgtccgtcacgcattgtccgcgcgcgtgcgtgcaatgcatgtactactccgatcctcctcctacatgctgtacgtacgtaatcctaatcctaatcgatcgaacgaacttgcggaaagctggtcggcccttgtggactgtggtgtacatatatgtcattgttgcattgcgctcgctctcaatcgatcagtcttcgagagagagagagagagagactctgacctgtctatctcgatcgcattgatactgccactagaagcagtagcgattagtagcattttagcaagagagatggagaaaacgtaatataagcacggcacggccatatgcaaacttcggccagagtgagtgggagcggccgctgggaaattcgaaccggtattagttcgatctcttcagttccgtggcgctgccat

SEQ ID NO: 91862 - DNA, 720 bp, Zea Mays
atggtgtcgacgctgcagtccacggcggcgctccggccggaggccaccaccagcaagcgcgcgccgtggctctccctcgtcggcagcgccgtcgcctcctccaccaccaccacgggttccgcgcccaacggcaagaagcggaagcgggacggcagcgacgaagacgactgcggcgaggtcgtggacgggatcgagctcaatttcgacgccgcgccgctgccccccgagtggcaacgctgcctcgacatcaagtcggggcagatccactactacaacacgaggacgcagaagcggacgtggaaggaccccaggggggagccggagtaccgcgccgccgccgaggaggaggaggaggaggactccgcgaattgcgcgccgccagggctggacctggagctgaacctcacgttcgagccgcgccgggctgtggcccacgagaagaagaggcccaaaccccccgcggctaataaggcgacacatgaccgtcgtcgtcagcccgcggaggaggccgaggacagcagcagcggcagcagcagggagatggtggccggcgtgtgcatgcgctgccacatgctggtgatgatgtgccgcgccagcccggcgtgtcccaactgcaagttcctgcacgcgccgagccgccccgtcgccccggagccggagccggagccgccggtgccactgctcaagctcggcctccagctgctctgctgccgggactag

SEQ ID NO: 91863 - DNA, 2623 bp, Zea Mays
ccacctccccttccgcctccctgcactactgctaacccctgctccccaatcctgatccacccccacacccgatcccctgaatcgccgtcccatcaccccgctccgggtctgcgattcgggttttgatttcccatcgtttgggagttgggactttgggttgcgtgcgtgttcgagtgttcttgatcgctattgagatgaggaccgcgaaggcggcggcggagtggacggaggacagagagctggatttgcttctcggcgagatcccccaggtcacctccccgcaggggcggcagcgcggggtgggcgtcatcggcgacggcaacggcgtgcatggcgcctcggggtgcgacgggtacgcttcaccaatgcgcctggggggccgacgggtacactgccccccggggggcgacggctacgatgcgcagcgccacgccaaggacgcttactacgacatggtcctgaaccgtcgcgaaaatggtgctccactccgcggcggcggcggcggcggggatgcagagggcgtgggcttccccgcgccgtcaccggttccaggaccattcatcggtagcgtggtgccgccgccgcttgcgctgggggtggactacccggagcagcagctggtcgtgaaccagctccaaagcctgcgcatcggggacgcgcaggccgcgctcctgcgccagggcccagcgccagtcatgagcacgaccccgatcgaggtccccgcagcgcacggcgcctaccacgggtacaacttcgcggcgtcaggttcttccatccgccatgaacacgtgttccttgatcaggccaaagctgacgggtacgttgcagcacggccgcatcgcctcgtgtcggacgttggcctggataactttggtgtttttcccagaaccctggacaccagcactggcattggttggggccaaggtttcgtgcagcctgatttcgcccagtcctacctgctttccagtcaggctggtaatgcatatggtggtgtccctgtggcagacaacgggtttgtgagaggcagaaatcagtttgaggcattccatcctgacagcagtcccactgaggcgggtgcggagtttttcagctcgaatcccgctgcccttgatttccgaggtggaccaaagcgacactatgcatatggtgctattcctgtagcagaggcgtaccattgcgagaacagtctaatgtttggtgggaagaacatgaacttcctggaacgtgagaggaagaggagtttccggcgtgttaataacagagcaccggagcttgggaatttgaggactttgaggtttgacgatgtggttcgtgtcaaggaaggatccatctactaccacatggccaaggataaaaatgggtgccggtatttgcaggacaagtttttggaagggaagcatcatgtggatgcgatctttgaaggaatcattaaccacattgcagaccttatgatcagcagtgctggcaactatcttgtacaggagatggtggaagtgtgtgatgaagggcaaagactgaggatcatcttagcgctgacgcaggaccctgtgaagatgattgccatctctctaaacacacatgggacaagggtagtacagagattaatagagaaagttacgagcagagagctgattatactcattatttcagccctacagccaggtttcatgctacttgtcaatgaccccaatggtactcatgtaatacagaaatgtctggcaaactttggagctgaggataacaagttcatttttgagggcgctgcagccaactattttaacatggcggtacaacgccatggatgctgtgttctacaaaagtgcatatctactgcacgtggtcgataccaggccaatctaattgtgaaaatatgtgctcatggctttgagcttgctcaagatatattcgggaactatgtggtccaacatgttttgaaacagaaaattccttatgcaaatgcacgcttggcatctctgtttgaaggaaagtatatatatctctcaaagcagaaggtgagcagcaatgtggtgcagagatgcattgagttcttcccagacgatgccaaagctgtcatagtgcatgaattcctcttgctcagagggtctcatttcgaacaactggtgacagatccttacgcaaactatgtcattaacaccgcccttaacaacaccaggggccatctgctcaatgcccttgttgaagcgatccgccctcatgaggatgccatccgaacccacccctgctgtaagaggatctgcaggttcctgtccaggtggtgaaagttgtaccatctgcgtgcctttggtaccaggagtaaggtcgctggcctgtattctcgattgttgtcaatttattatgttcactagttatcacccataatgtactcctccacgccgctctacatgagcccggccagagttcagaaaggcaggtttttgttgcaaggtgtaaaagaagtctaccgccccccgtcgtgtcttcggtggtgtagtttttttgccgcacgtttgtcctgatggtgttgtagagttgtaaaaggaacccgtgtgctttcacccccttaggtttgttttgtatctgctgtactgctttccacgttggattctatgaattgttactgttt

SEQ ID NO: 91864 - DNA, 1334 bp, Zea Mays
atcgaactgcttgcttcagccttcaatctctgcgctgtgctgtgccccgcgaattgtttacgctcgctctcgagatctctctctagattctctcggcttccctcttctctctgtctcctgcaagaacccatggcggctacgacgatagattggcacgcccgcaacaacgccgcgcttcccgccgccatgtatggcgtggccgtgccggacagcaaggagctcgtgcgcgcgcttgctccgcccacgcagcaggcaccgaccatctcgttcgcgtacccccgctccggcgtggagcagcagagcgcggcgggctcgtttctgggtgccggcggtagtggcctgaccccggcacagatcctccaggtgcagtcgcggctccagttcctgcgccggccggcgggggccgcggtcgccacccagccgatgaagcggcagggcgtgccgctgccgcaggcgccggcggtgtccaagctgtaccgcggcgtccggcagcggcattgggggaagtgggtcgcggagatccgcctgccacgaaaccgcacccgcctctggctcggcaccttcgacaccgctgaggaggctgcgctcgcctacgacagcgccgcgttccgcctccgcggggactccgccaggctcaactttcccgagctcaggcgcggcggccagcacctcggcccgccgctccacgccgcggtcgacgccaagctccacgccatctgcaacggcacggacgtcgtcgtgccgctgccgcagagccggagcaacgacgccacggcggcggcgacggcgacaaccgccccgagccccttctcctcggcgagtccacacgtcaagagcgagccgggctcctccggctccgatagctcgttttccgcagacggcgacgtgtcctccactgggtcctccgacgtggtgctggatatgcaactgctcgacttctcagaagcgccatgggatgattctgagagcttcggccttcgcaaatacccctccttggagatcgactgggactcgatactactaatttcataatgcgcctttgctcgttttgtctcccccggttcctgatcaagctgttcttgcttgctctgtacttcatagattaaagattaaagtgggttattgatgtttaggtacttgtttgtttaggcctcgggtttgatcatgtctagcatcaatcctggtctgcttgtttttttaacgggattgccaggaaggaggtctcattactttgtattattttggtgaaattactagcggtctgcatgcaaaccgtttcatgcatgtatatacatatatactcttcagtcttcagaatagcatatctatccgac

SEQ ID NO: 91865 - DNA, 795 bp, Zea Mays
gaagtatggacttctgaaactttggaggttcagattctcatggaagaggtggaaaagatgaatctggatgtagaaacaattaagctcgctataacaactttgtgctgttttttgaagatggctaggtctatctggtcttctgctatgaaagacatcctgcttaagtttgcagaggaaccgtctgctgcaaatctaggaaacatgctcaagtttggacgtcttaccaaatttgctggtttttctccaataaacaatggtattcatgttgttgatttctgcttatcttcttggtcaagcaatgatgatatcgaagatgttgagcttgaagaggtaagattgaagcttgctcattatgcagaataaagataacctcaactacatggtcatcttgagcaatgttttcacacttgttcaaattacagtatgtgctgttgcaatgttcacttcttttgcggcccagtataactaatgttgaaattagatatgctcaatctggcagctttgacattttattcaagaacatatatttctctactatgataactgaaatggcgtgcatagaatcagagcacatcagcatattaatataccgtttcttatagtgaggaatcatcatctgtctacaagcttatgaatgaatcgtgtgtctcctactctcctgtcccatttttattctcctcaaccatgttcgtggtttcccttctatgttttggatgattgacctttgagaatgatgactatcctgtttgttaatgtagtctgtgccagttttattcagtaagaaaatatttaaat

SEQ ID NO: 91866 - DNA, 901 bp, Zea Mays
cccttccggccacttccgcgattgctaacctccgtcgcggcgcggccgaaccggcgaaggcgccctcctctcgtttcctcccgaaaccccggcatgggaaacaagaagtcgaagcggagcaggagcaagaagaacaaaaccaacgccgaccaggccctggccctagactacgtccgcgcctgggtgctccccgtgccgccacccctgaagccctcggcggccgacgtcgacgatttcctgccggtccaggctacacgccggggcgatgtgctgtttgagctccactcccactcaaaccacagcgacgggttcctctccccttccgcactcgtcgagcgcgcccatcgcaacggggtgaaagttcttgccctaacagatcatgacaccatggctggcataccagaagctgtgtcagcggcctccaagtttggcatgagaataattcctggagttgaaatcagtgcgctatataatccaagggaagttgctggtgcgggtgagactgttcatatccttgcatactatggtatgtgtggtccgtcgaggtgtgatgagttggacggcatgctattgaacattagagatgggcgatacttacgtgcaaagaacatgctggaaaagctaactacactgaaggtgccaataaagtgggagcatgtgaataaaattgctggtgacggagtggcacctggccggttgcatatagctagggctctggttgaaatgggttatgtagagaatttaagacaagcattcaacaaatacctaggcgatgatggccctgcatatgccaggttattgcttcatcccaaataagcatttcctatgctgaaattctttggttaaaaacaccaaggcccttgttttttttcctggcctaagaagtgaacctttggctgag

SEQ ID NO: 91867 - DNA, 789 bp, Zea Mays
cccttccggccacttccgcgattgctaacctccgtcgcggcgcggccgaaccggcgaaggcgccctcctctcgtttcctcccgaaaccccggcatgggaaacaagaagtcgaagcggagcaggagcaagaagaacaaaaccaacgccgaccaggccctggccctagactacgtccgcgcctgggtgctccccgtgccgccacccctgaagccctcggcggccgacgtcgacgatttcctgccggtccaggctacacgccggggcgatgtgctgtttgagctccactcccactcaaaccacagcgacgggttcctctccccttccgcactcgtcgagcgcgcccatcgcaacggggtgaaagttcttgccctaacagatcatgacaccatggctggcataccagaagctgtgtcagcggcctccaagtttggcatgagaataattcctggagttgaaatcagtgcgctatataatccaagttgctggtgcgggtgagactgttcatatccttgcatactatggtatgtgtggtccgtcgaggtgtgatgagttggacggcatgctattgaacattagagatgggcgatacttacgtgcaaagaacatgctggaaaagctaactacactgaaggtgccaataaagtgggagcatgtgaataaaattgctggtgacggagtggcacctggccggttgcatatagctagggctctggttgaaatgggttatgtagagaatttaagacaagcattcaacaaatacctaggcgatgatggccctgcatatgccag

SEQ ID NO: 91868 - DNA, 1591 bp, Zea Mays
tttttttttatgaaaacaggtatggggaaccaaaacccgacggagaattccaagctaatgctatatactatacatctatcgccaattcacgatacaacgggctaagaaaaaattatggaatcataagtttaattagacattacggtttgcatacttcagcaagatatttcctttaaaaaaacaaagcactgaaaacacatagtaacatgttgacacggaccctctgtatcttggttttagcttgacaagttttttttggacaatactaccaaacatgttccgttgtaatgcacagaaaatctagtagtatatttgtaccacattaaatgttgcccaccacatcattacgaatttgaaatggatgactatgaaatttgcgcagtctgccggtagcaatgaacagggcattgcctaattgttgatcaggtatatggacacacctaaatgcagttgcagtgactcactttgtccattgctcaaaaacgagtttctggccaccatttcttccaagcacctggcgctgtcaaccccgtccccacggctatgcagttggaatgacttatttccgtccattgctcgaaaagagtttctgccccccgccattcttccaagcacctcgcgctggcaaccctgtctcagggccttgtaattccctttctggacgttcagggcttgcacttggacgacttaaatcaagtgtggctaatgagttgtcacctaaacgagctctgagaaactttgctgtcttcttcggttgcttattgcctcctcccttgcctatgttatcttttgcaccagatgattttgtgttggaactagtatcactgtccagattagatgaagatccagctgccggttggacccccttggaaggtcgatacccatccttcgacagcacctcagctcctccttcccgagcctgctggtttgattgaagccttcttacagtctccagaatgttatctgctagtgcactattcacatcattagcagcactgctttctgtgacaggagctttccccttccccttctttttacggttgccctcttgtgagctagttccacctccgttttcttgtaggcttttaaatcgagtatttgtataatatgcatcagcaagttccctctgtttttgaggatcaggcaatagcctagccatttcaggaacaaggtgtgacagtccaaactgctcgacatatgaaagatactccagagtacctatgataccttgacggtattcaccagcaatctctttgaatgcagagtacctgtcctcgtccattcccagagcagaacgcattctttcaaccagagttttgtttgcagcacggaaatcctctggaacaggcaaagtttggttaccttgaggaggatcctgacttttgttgctaccataagctgtactcaatgatacttgggcagaggatccaccagacacaagattaggcgtagaaacagagtgcttcatcttgtttggagcaacaggattccacactgtgttactggagatagttggcatggcattttcccttgttggttgagttccagatcgaagctgagaatatccagacaggactaggccctgatcagg

SEQ ID NO: 91869 - DNA, 4877 bp, Zea Mays
atggggatggtgcccaacgggctcctgcccagtgcgtccgccagggtgacgcggcgactggaccccgagcgctgggcggttgctgagggccgcacggcggagttgatcgcgcgcatccagcccaacgcgtactccgaggggcgaaggctggccgtgtaccactacgtgcagcggctcatcatgaactgcctctcctgccaggtttttacctttgggtcagtccctctcaagacttacttacctgatggtgacattgatgtcactgcttttagtaatagtgaagaactaaaggagatttgggcaaatcttgtccgggatgcattggagcgcgaagagaagaatgaaaatgctgaatttcatgtaaaggaagtccaatatattcaggcagaggtcaagattataaagtgtcttgtggaaaacattgttgttgacatctcatttaatcaagttggtggactatgcacactatgttttcttgaagagattgacaacttgatcagcgaaaatcatttattcaagaggagtatcatattaataaaggcatggtgtttctatgagagtcgtattcttggagctcaccatggtcttatatctacttacgcattggagacgcttgttctgtacatatttcatatattcaacaactctttcaccgggcctcttgaggtgttgtaccgcttcttagaatttttcagcaactttgattgggagaaattttgtttgagcttgtggggcccagttcctattagttcacttccagatatgactgcggaacccccacggattgacagtggtgaattgttgctgaacaagtccttcttggatacctgtagttctgcatatggagttgtgcctcacacccaggagaaccacagtcaaccatttatttcaaagcactttaatgttattgatcctttacgtacaaacaacaatcttggaagaagtgtcagtaaaggaaatttctttagaatacgcagtgcttttgcgtatggggcaaaaagacttggaaaattacttgaatgtccaaaagaagatttaattggtgaattaaaccagttcttcacaaatacatggataagacatgggagtggcagtcgtcctgatgtgcctaccccaagtatagttgatgtgcggcctctgaaggttgttccttctgtagtttcaagcagccagagaagtgtaacatcattcaagaaaaaggctgaaaatcctaagctccatgctactcaggataatcttcgtctgaatcaagataatctcactgaagatggtcacatttatactgacccttctcagccaattcacaaaagtgacatacattatcgtaatctaccaagagcagttaatccatctgtttctcatgttcagcaccaaaaaagttacacagcacaaggcagtgctaaggtctctgaacagcttgaaagaaataattcagctggattgatgcaaagtgaaagggataagagagtgccaaatggtctctttgtcaatgacagaaatgggcagaacaggtctagatttgcaagaacccgatcaagtcctgaactcacagactcttctgcagaaggatttcgtggcaggcggactaatgcagttggtatggaaaaatctttgggtgttgattacagcagcagaagaaacatcctggttccagaaatgtctagcaaccacagcactaagtcttcacaggatgaatcagtgtcttccttgaactgtttatctcaccctagtgcagcagcttcggactcaaatagtgtttcaagcagctatcgtgatgataatggttttgtaatgaatgaagaactcccttctgtttctgaatcgtcggatatgcaccatgacgaacaagttctggttaatttaatggaatccgtgaagttgcatggattcaatggacagattcaattgccaatgcaaataccttctcatatgtctgtagcgcatcccccactgttggctccaacatctttttcacaaaagcatttgaccggggttccaccagctaacttaattgggacaccatggttacccaatatgcagttcctccatggatttgttccacctcctatggcccattacatacacaatccaaattttgcaccaaacattgaggatggtactgagactgaaaagcctaatacatcagatgtgaatcatgatgctggcaaaacctggcatgagtatggtgttgggttttctggacagttcgatcctgaagcaagagatcctcacatctatgatattgatggcaaagaacatttgtctttgcctaatggtgtagcaggtgctcccttggaaaggcagatgaaatttacagttgagaataatggtgtagatgatgaaacctatactggcatgttccaaaatcatacaagtagagaagctgctgtagattactctaagaggagtggctatgtaaatgttccttcttcacatgccagttcatccaaaggcaaaactctggattcgagtccatgggatgaaatgactgcacatacaacaagaccaccaagagaaaaatggggaaaaagatctgcctttgcagcacctgccacgaccacacatgtcaagactgggtggcagatgggaaataccactgagcatctctcgaccgaagttaatgatggccccagaaatgggacagtggtaccaatcattactgaagcttctgagatagtaacagggtctgattctttttcaacacaatcaagaactagtcaagtaccaaatgattttgatccatcacaaattggcatgcctaatccagtgtttgcaccttttcttattggatccccacagcataggcaagctgatagctctggacttacttttgttccaacaggtccaccagttccttttgttgtgctcccgtttgtctcagggaatagcgatggttctggtccccagtttgagagaagcgaaggaattgatcagcttcctgccaatactgtaggtcatttcgttggctcacttcatgatgttcaccaacaagattccagtgctacctcaacagtatcatccagtactatgactgagccatctggtgatcacaagcctgacatcttgaatagtgattttgtcagtcattggcacaatttgcagtatgggcgactctgccagaatcctcgtcccatgggtcctgttttataccctgttccggtgccgccaatgtatttacatggccatgctacatgggatggtcctggaagaccagctgcaccaaatgttaactggacacaaatggtgggcggtcaacgagtatttcctgttatgcctgtacaacctgctacagaaagaaccggtgttcttcagcactatagtgaagatacaccaagataccgtggaggcacaggaacctacttgccaaatcctaaggttcattttagggaccgacactcaaattcaagaaactacagaggaggttataatggtgacaggggtgactatagtgataaggagggaagctgggtaaactcaaaacagcgaaatctgaaccgcggctatggacgtagtcagtcagagaggtccagcatgaggtctgatagacagactactgatgagagccagtctgatagacaaaggcgaacttatagaactgactcgtaccggcatgaggcaagttctcagtatcttgtgcagggccaaccttttggatccacaagttctatgcgcaaacaaggaaacacatcacatggggtttatacaccaccatctacgtcttcaaatggtcccagtgctttatctggccctccaggaccaccattttttatggtgtactcttatgaacaaggctcaaatcatggtgctactgctacctcatctgaaccaattgaatttggatctcttgggccacttcctgcagcagatggtgatgacataccaaggtcgacacgccaaataatggctaatgggttttatgggcaaagacgtggtccatataggggcggttcctctcattcgtctcctgatcaaccatcctcacctcagcctcgtcggtagttgagtcttcatatgatggcttgatcacttggtttctgtcattgaaaccttgcgatagcaatattttggttcacccctcgtgatcatattctgcatgggtgaagatggttgggccatcagcagccacaaaaaaaaaaacacaagtatatgccctagttggttcttggtgctttgtgatctctcagaagcactgaattgtgaataccgtcaaaagcaattatcggcaggttattttaccagtcacaatggtgcttcttggattcaaaacaattatcttcagaagaaatcatggaaccatcaaacccagaatatcttcacacagaaatcagaattgaatagaagattatgagcaaggacgaactctgctctggccgtctcattatatgaattgtgtcaagggtaataacaatattagtatggatggagcaggaacaagcattgtggcgctgcatcagaaacaatctggaatgctttgggttttaatgtgtctgggcgtgcgtaagtgaaagctaataatgaattctcgtaccatttttaggtaggattaagctcatgtaacacacagcacactattcactaagatgtactatgagctaagtgaaacgtaggaacaaaggtgccgtttggtcacatatttgtaacgtaatgagtaactaataatcttaaattatgtttgtttaagtctaatcgtaattagataccacactagaaattgataccggtctatttaaatttttaccaccggtacttgagtcatcggccatggagtgtaaatcatcaacggcacccaaattcttgtgctgaagggagggatgactcctgaatacgcacgattaaaaagttatccatgccaatcttcctcggttccattcatgatt

SEQ ID NO: 91870 - DNA, 4132 bp, Zea Mays
atggggatggtgcccaacgggctcctgcccagtgcgtccgccagggtgacgcggcgactggaccccgagcgctgggcggttgctgagggccgcacggcggagttgatcgcgcgcatccagcccaacgcgtactccgaggggcgaaggctggccgtgtaccactacgtgcagcggctcatcatgaactgcctctcctgccaggtttttacctttgggtcagtccctctcaagacttacttacctgatggtgacattgatgtcactgcttttagtaatagtgaagaactaaaggagatttgggcaaatcttgtccgggatgcattggagcgcgaagagaagaatgaaaatgctgaatttcatgtaaaggaagtccaatatattcaggcagaggtcaagattataaagtgtcttgtggaaaacattgttgttgacatctcatttaatcaagttggtggactatgcacactatgttttcttgaagagattgacaacttgatcagcgaaaatcatttattcaagaggagtatcatattaataaaggcatggtgtttctatgagagtcgtattcttggagctcaccatggtcttatatctacttacgcattggagacgcttgttctgtacatatttcatatattcaacaactctttcaccgggcctcttgaggtgttgtaccgcttcttagaatttttcagcaactttgattgggagaaattttgtttgagcttgtggggcccagttcctattagttcacttccagatatgactgcggaacccccacggattgacagtggtgaattgttgctgaacaagtccttcttggatacctgtagttctgcatatggagttgtgcctcacacccaggagaaccacagtcaaccatttatttcaaagcactttaatgttattgatcctttacgtacaaacaacaatcttggaagaagtgtcagtaaaggaaatttctttagaatacgcagtgcttttgcgtatggggcaaaaagacttggaaaattacttgaatgtccaaaagaagatttaattggtgaattaaaccagttcttcacaaatacatggataagacatgggagtggcagtcgtcctgatgtgcctaccccaagtatagttgatgtgcggcctctgaaggttgttccttctgtagtttcaagcagccagagaagtgtaacatcattcaagaaaaaggctgaaaatcctaagctccatgctactcaggataatcttcgtctgaatcaagataatctcactgaagatggtcacatttatactgacccttctcagccaattcacaaaagtgacatacattatcgtaatctaccaagagcagttaatccatctgtttctcatgttcagcaccaaaaaagttacacagcacaaggcagtgctaaggtctctgaacagcttgaaagaaataattcagctggattgatgcaaagtgaaagggataagagagtgccaaatggtctctttgtcaatgacagaaatgggcagaacaggtctagatttgcaagaacccgatcaagtcctgaactcacagactcttctgcagaaggatttcgtggcaggcggactaatgcagttggtatggaaaaatctttgggtgttgattacagcagcagaagaaacatcctggttccagaaatgtctagcaaccacagcactaagtcttcacaggatgaatcagtgtcttccttgaactgtttatctcaccctagtgcagcagcttcggactcaaatagtgtttcaagcagctatcgtgatgataatggttttgtaatgaatgaagaactcccttctgtttctgaatcgtcggatatgcaccatgacgaacaagttctggttaatttaatggaatccgtgaagttgcatggattcaatggacagattcaattgccaatgcaaataccttctcatatgtctgtagcgcatcccccactgttggctccaacatctttttcacaaaagcatttgaccggggttccaccagctaacttaattgggacaccatggttacccaatatgcagttcctccatggatttgttccacctcctatggcccattacatacacaatccaaattttgcaccaaacattgaggatggtactgagactgaaaagcctaatacatcagatgtgaatcatgatgctggcaaaacctggcatgagtatggtgttgggttttctggacagttcgatcctgaagcaagagatcctcacatctatgatattgatggcaaagaacatttgtctttgcctaatggtgtagcaggtgctcccttggaaaggcagatgaaatttacagttgagaataatggtgtagatgatgaaacctatactggcatgttccaaaatcatacaagtagagaagctgctgtagattactctaagaggagtggctatgtaaatgttccttcttcacatgccagttcatccaaaggcaaaactctggattcgagtccatgggatgaaatgactgcacatacaacaagaccaccaagagaaaaatggggaaaaagatctgcctttgcagcacctgccacgaccacacatgtcaagactgggtggcagatgggaaataccactgagcatctctcgaccgaagttaatgatggccccagaaatgggacagtggtaccaatcattactgaagcttctgagatagtaacagggtctgattctttttcaacacaatcaagaactagtcaagtaccaaatgattttgatccatcacaaattggcatgcctaatccagtgtttgcaccttttcttattggatccccacagcataggcaagctgatagctctggacttacttttgttccaacaggtccaccagttccttttgttgtgctcccgtttgtctcagggaatagcgatggttctggtccccagtttgagagaagcgaaggaattgatcagcttcctgccaatactgtaggtcatttcgttggctcacttcatgatgttcaccaacaagattccagtgctacctcaacagtatcatccagtactatgactgagccatctggtgatcacaagcctgacatcttgaatagtgattttgtcagtcattggcacaatttgcagtatgggcgactctgccagaatcctcgtcccatgggtcctgttttataccctgttccggtgccgccaatgtatttacatggccatgctacatgggatggtcctggaagaccagctgcaccaaatgttaactggacacaaatggtgggcggtcaacgagtatttcctgttatgcctgtacaacctgctacagaaagaaccggtgttcttcagcactatagtgaagatacaccaagataccgtggaggcacaggaacctacttgccaaatcctaaggttcattttagggaccgacactcaaattcaagaaactacagaggaggttataatggtgacaggggtgactatagtgataaggagggaagctgggtaaactcaaaacagcgaaatctgaaccgcggctatggacgtagtcagtcagagaggtccagcatgaggtctgatagacagactactgatgagagccagtctgatagacaaaggcgaacttatagaactgactcgtaccggcatgaggcaagttctcagtatcttgtgcagggccaaccttttggatccacaagttctatgcgcaaacaaggaaacacatcacatggggtttatacaccaccatctacgtcttcaaatggtcccagtgctttatctggccctccaggaccaccattttttatggtgtactcttatgaacaaggctcaaatcatggtgctactgctacctcatctgaaccaattgaatttggatctcttgggccacttcctgcagcagatggtgatgacataccaaggtcgacacgccaaataatggctaatgggttttatgggcaaagacgtggtccatataggggcggttcctctcattcgtctcctgatcaaccatcctcacctcagcctcgtcggtaatacttgttattgtattctttgtttatcgccgttttagtatgagtagtctgaaaaaatcacatcacaaatatgtaataaaaccttatgttatctgtaaaaaaacaaatcatcatgctttcatctatattagcag

SEQ ID NO: 91871 - DNA, 1810 bp, Zea Mays
cggcttcccatcccacgctttgccgagaccgagagggaacctcccaccgtcccacgacggccgcgggcggggcaagaacatatacccgcgtcactgaaccgccccgacggcatcgcaggcaccacccaaagcaaaaccccatttgttcgcttatctttctctagatccacccccgaagaaaatggcctcctacgatggcgacgaggactccggtcgccgccgcccttcccagcaccgtccgtccggcgggggcagcggcgaccttgcctcgagcgcgaagctcgtggcggaggcggcaaagctggccctccaggaccacagcctggagaaggtggacaagggccgcgtcgccggcgcggcggccgacctgctccacgccgcctcccagtacggcaagctcgagggcaagcccgtcggtgggtacctcgagaaggccgaggagtacctccaccagtacggccgcaaggacggggccggcggcaagcatcagggggacggggaaggcaagtacggtaagaatcccggcggtggccacggagggggaaggtatgaggaggaggaggggtacaagaagaagcctagtggcgggaggtatgaggaggatgagtacaagaagaagcctggtggtggtagtggatatggaggtggaaggtacgaggaagaagaaggctacaagaagaagccaggcagcggtggctatggaggaggaaaatacgaggatgaagatgactacaggaagaaaccaagcagtggtagctatggtgggggaaggtacgaggatgaagatgattacaagaagaaacccacaagtggtggctatggtggtgggaggtatgaacaagaagataattacaagaagcctacaggtggcggctttggtgacgggaggtatgagcaggaagatgaatacaagaggcctctgagtggtggtggcagtagctatggtggaggcaggtatgaagatgatgaatatcggaagaagccgagtggtggtggctatggcggaggaaggtatgaggacgaagatgattataggaagaaacctagtgctggtggatatggaggtggaggaagatatgaagatgagtacagcaagaagccagctggtggtcatggcggagggaggtatgaggaagatgatgagtacaggaagccgagtggtggtggatatggttatggagcttccagtggtggaggtcatggaggaaggtacgaagaagaggactacaagaagaagcctagtggacactcagggggacgctatgaggaagaggaggggaacaagaaggctagtggctatagtggagggaagtatggcaaggaggaagacgacaagaagaagaagcatggcgaggatggatcagagagtggtggtattggagattacctgaagttggcacagggtttcatgaagaaacaggatggggaaggggacagtgggggcggcatgggagactacttaaagcttgcagaaggtttcttgaagaagcgctgattaatcttccatatcatgattcaggaaggacttgtttggttagtcacttgtcctgtttattgtctccaagtagtgacattttcgaggtttccatcataggatgtaatacaagtgcattgcttatgttgtctgtgtgttgtgacatgaatgcttaatgtgctgctgggataataaaagcttggatgctctgctattcatgttgtatattagttctgactaaaataatatgtatcctatgttatcgtgcttacaataagtgaaactcttgaatacattttcattgattatctattgctgttagggtcctattgtttg

SEQ ID NO: 91872 - DNA, 1168 bp, Zea Mays
gaacaattatataataagaaagcattttagtcccatgcaagttgggctggtctataggatgaataattgaaatactgtagaaatcttttagtctctgtagcgtcataaattttcagctgctatatttcgtttgcaattctaagtcaaaattgctccttgaagttggactttccttcaagactctgccgcaacacctttgcacagttgtataatcgatatttttaaaaaaatgcactgacgccagtttttcttctgttcagggcacaagaagtcgctccctgatctactgcgcgagcacaacctccctccaggtctcttccctcgtaacatcatctgctacgagtacgacgaatcgacctcgaagctggtggtgcacctgtccaagccctgcgaggtgagcttcaaggattcctccaccgtaaggtatgctcctcgtgtcaaggcgactctgtcccgaggcaagctttccggggttgaaggcatgaagaccaaggtggtggtatgggtgaaggtggccagcgtgagcatcgagagctacaagtctgacaagatatgcttcatcgccggtgtgaagaagctgagaccgaaggatgcttatgaggtccctcgtgaagccatctctgtcgaggagttctgagctcaactcaactccattggtttgcctacgtagtatcattcattcgtagcatttttcgggtcccatgtgatcggcgattgatgtgctgtgatttggtagctttgtactgatattggaagcatgtggatctgttctgcctggcagaagataacccgtgcatgttatctgacgtgacgagtccttcacatgtgtcctggtcctggttctgcattggctgctcctagagttcacgtgttcctgttttattttatatatatggtattgcactgcatgtggttagttgcacggtgttggacaccaaaatgagttgacggtccggtccttgggcccggaccgtctgcgtatcccgagattagattaactcggatatttatccttatctcgtacgtggttattcatctaatcacgtaggagtttgttggctatctcttagaaaaaggtcaagacctccttctctataaatataaaggggtacacgttggggacttactctcaaatgctataaattgagaacaagacaacaccaaaaca

SEQ ID NO: 91873 - DNA, 1197 bp, Zea Mays
ccgggccgagcgccgcagctttgaacctggttctcctgtcgctcttcgtgcgggcgtgcggcacaccaccagaagagcggccgagcggcgcagagaagagagaaccagccgagcggagcggctgcgcttccggagggaggaaggaggatggagaaggctctcaccaagctcggcagcttcacaatctcccgcaaggccaagcaggagctctccgccatcggtgacgacatctcccgtttttcgagcacggtggaggagaaggcaaaatgggtgttcgagaaactcaaagggcacaagaagtcgctccctgatctactgcgcgagcacaacctccctccaggtctcttccctcgtaacatcatctgctacgagtacgacgaatcgacctcgaagctggtggtgcacctgtccaagccctgcgaggtgagcttcaaggattcctccaccgtaaggtatgctcctcgtgtcaaggcgactctgtcccgaggcaagctttccggggttgaaggcatgaagaccaaggtggtggtatgggtgaaggtggccagcgtgagcatcgagagctacaagtctgacaagatatgcttcatcgccggtgtgaagaagctgagaccgaaggatgcttatgaggtccctcgtgaagccatctctgtcgaggagttctgagctcaactcaactccattggtttgcctacgtagtatcattcattcgtagcatttttcgggtcccatgtgatcggcgattgatgtgctgtgatttggtagctttgtactgatattggaagcatgtggatctgttctgcctggcagaagataacccgtgcatgttatctgacgtgacgagtccttcacatgtgtcctggtcctggttctgcattggctgctcctagagttcacgtgttcctgttttattttatatatatggtattgcactgcatgtggttagttgcacggtgttggacaccaaaatgagttgacggtccggtccttgggcccggaccgtctgcgtatcccgagattagattaactcggatatttatccttatctcgtacgtggttattcatctaatcacgtaggagtttgttggctatctcttagaaaaaggtcaagacctccttctctataaatataaaggggtacacgttggggacttactctcaaatgctataaattgagaacaagacaacaccaaaaca

SEQ ID NO: 91874 - DNA, 1454 bp, Zea Mays
agcgtcgtgtggtgctggaggtacgcctggatgcctaagtgatatggcgtaattagggtacgcctcagcgcctagggtacgagtaggcgacacctcaaaaaccatggtctcattatttttctcctgaccgataaaggataaacttcattacataaaacataaggacttctttcttttgcataaccgccccttcacaaccaaattctgtagcactgtaggtctgtgcatgtgacgccggttgcaaaagagggaaataaatggaactgtcaaacttggatgaggacatccaaatggtgaactgttgttggggcccaccttgctgccttattatgcgcagtttggcaatgtgacctggtatagagagctgtagcggtgacagaagacaaactcaaatggaggtgcttctttctgggtagcacaggggactaatgacagtatgggcgccaggtgattggtgtggcgtgattacagtactacacgcaactggttacaacattgaactgtcaagattacatagctgaaaaaggtaaccgctgagcagtctcggagggaacatcggataaaggctggccagcttcgtgttgtaggacgactggacgagatagcattgtcggccaggccgagatggaagtgtccagcgataatcagtggatcatgagttcacgagagaagacccttgatgatgtcttagatcttgttccgttgcgtctggatcaaaggtgatgggtttcattaaaccaattgcatctatcaagaggatatctgtatcggttatgttggcaccagatctgccgttatgtgcaattggtgatgaaaagagactcatgcaaactattctgaacatctctggcaatgctgtaaagtttaccaaggagggacacatcacgcttgtagcttccattatgaaggctgactctttgagagagttcagaaccccagaatttcatccaactgcaagtgatgaacatttctatttgaaagttcaggtaaaagatacaggctgtggagttagtcctcaggatctacctcatgtattcacaaagtttgctcatcctcaaagtggaggaaaccgaggggttaatggtagtggtcttggccttgccatatgcaagaggtttgttagtcttatgggagggcacatctggatcgacaacgaaggaaccggaagaggttgcaccgcaacattcgtcatcaagctgggcgtgtgtgacaacacaaacacctaccagcaacagctgataatgaagtgcatctgagcatttgaaacaaatctagattctagctctagctaaggttatacagatattgtgctgaaccttgatgctactattatgtgtagtaaaattttgggggtcggaattgaccaaacttatggatttattcaacgtttcaattcagtgacaaatgctactattttctatattcagacacttggtactaatttcttgatcaaa

SEQ ID NO: 91875 - DNA, 1486 bp, Zea Mays
tgcatgtgctagttattcagaattctggatccgctatgtgcaatgtatggaggataaaaggagtctagacctagcaaacaatgccctggctcgtgctactcatgtgtttgtcaagaagcagccggagatccatctgtttagtgcgcgctttaaggagcttaatggcgatatttttggagcacgtgcagaatatcagcatctgtattcagatttatgccctggctttctagaggccattgtgaagcattctaatatggaacaccgactgggagataaagaattgtcctgttcagtttatgaaaaggtcatcgctgctgagaagggaaaggaacagagccagctcttaccaacattgcttattcagtactcccgtttcttatttttggccatcagagacttggagaaggcaagggagatattaactgtgctgcatgagcagttaaatttaacaaaaccagtgcttgaggctgtcatccatctagagtcgatttttccatgcgaaaagcgtattgaatttttagactcacttgtggagaagtttgttacacctgaatcatctcagggagagttggcaagtctagttgacaaagaagaaatatcttccatatttttagagtttttggatctctttggtgatgcaaagtcaatcaggaaggcttcaactcggcatacaactcttttttcatgtaagagaagcattctgccatcaaagaaacggaaggctgatgatgctgttgtgtcagacagggacaagtttgctaaaactgggtctgttcagtcagccacaggaactgatccaaatgcttccaatcctcctgtttggcctgcgacttctgaaacatctggacatcaatggggagcttcttatgctcagcaggctgcatatcctgcatatggaacttatgactacagccatcaaatgccacagcctgctcctcaaacagctgcctatggcgcttatcctccaacatactctgttcaggcctatacacaacaaagctacacacaacctgcagcaattccggcagcaccagtgccagcagtggtaccagcacctacaccggcgtcagcttaccctcagcaacctgcggcagctcctcaaccttattatggaacaacctactactgacaagtagagtaatcttcgatggcgatctgacgagcctgttaatcagcaggtttgtcgatacgaggtcaaaggcatcacaaaaccctctgtactgccattgtttagccccccttcagacagatgccgtcgacgagatgatcacttgagaacaaatttgagattggtatagtctgcatttttgtcgttagcatgtgtcgctagggattgctattgtttttcttgtaatagcataatctttactgtagaagaggcagcgggtgctaaccaatcctatgaacatataattaacattattcactgtttcatgccacctttcggagtgctttttttttcaaccactgatgatagcgggattcc

SEQ ID NO: 91876 - DNA, 1016 bp, Zea Mays
ccacgccgctgcgcttccgatgcaaccctaaccacctcatcgccggcacgatcttccccgcccccactccccggctattgcctctgattggcggctctccgggattcacgttggtccggggtacggctcctgcgattttcacgcaatggagcaagatcagagcgtggttgtcggcagcgcggactctggtgctgcggcttttggttttgcgactggcaacccccctagcttggctgtgaccggcggaagcgccgtggcccccgacggtggagctcaggcagctgatgcctctgcgtaccaggccgagcacacggcgttgaatgggactgtcggcgatatgggtaattacccatctacaggagctgcagagaacggcgaagccgtccccaacgagacgggcgagccggttcctgagctatcgtacgaagaagccgtgctttcagcagaagaggctaggttatggagtgttgttaccgcgaattccttagattttaatgcctggaccgcacttattgaggaaacagagaaaaatgctgagaacaatattttgaagatacggaaagtgtatgattcgtttcttgcggaattccctctttgctttgggtattggaagaaatatgctgaccatgaagcgagacttgatggtgtgagtaaagttatagaggtgtatgaacgagcagttctcgcagttacttattcagtggacatttggtataactattgtcagtttgcaatttcaacatatgatgattcagatatcatacgaagactgtttgaacgtggcttggcatatgttggaacagattatcattccaatattttgtgggatgagtatattaagtatgaagagtcactggaggcttggagtcatctagctgatatatatacaagagtattggagcatcccatccagcagcttgatcggtattttaattgcctcaaggaattggcttcgaagcacagtttatcagaaatacttactgcagaagaagcctcgttgtatgttgtcacatctg

SEQ ID NO: 91877 - DNA, 678 bp, Zea Mays
acacttggagctcttgcattagcaaccgagcctccaacagacaaccttatgaagagaaatcctgttggtcgaagggaacctcttgttacaaatatcatgtggagaaacttgtttgttcaggccctttaccaagtagcaattcttctgattttcgattttgatggagtaaggattctgcgtctgcagaatgaaagccgatctgatgctgagaaggtaacaaatactttcatcttcaacacatttgtattttgccagatcttcaatgagttcaatgcacgaaaacccgaggaaaagaatgtcttcaaaggggtcacgaagaatcacctgttcatgggaataatcggtataacgacagtatttcagatactgataattcagttcctggggaagttcttcaaaatagtgaggcttggttggagactatggttggtttcagttgctatcggccttgacgaggtcctttataccatcgtccctgctagcgagacaggaggtcccagtggagcggctaaagccgagggtcgaggcacaggagagagggaactaggctctcaagtaaaagtacccgatcggactaaacccgcaagagaaggtgaagctggagaaggagcacatgtggctgttcatggacgacagcatcaaggacctcgccaaaaggggttgaagctggaggagtag

SEQ ID NO: 91878 - DNA, 1129 bp, Zea Mays
gcagcgctctcatgctattcaataatgtctaatctacctcacgtgtgtagtagatctcatcaccggtgttttgggttattagcaggtgatttctttgaactgaaaatgtttctagcgttgagatttagttatcttcttggggcatggattgattatctagatataacaccagcaccatttgttcttggaaaaggctactcgcattgattcagcagtgggaagtgtcctgggatgacaccttagatccagcagtttcttacaaaattggtcaggttgtggatgctaaagttattcatctggactataataatagccgcatatttttgtcacttaaagatgtaaaggtgatggtggagacaacacttggcaaagaagagttgaaagaggcagttttgatgtgcactagcactaatagggttagctaggatctccatgatgtgcatttgatgggggactaatttctcgggttgctagctagattggaacaacatacagactgagggcaagtatcgtcgatggagctgctaagttaaattgtttgttcagttgacagaaacaaaggcaattaactcacattctactacgtggaacaagaaacagccttgctagaggaatggtagcaggaactttgatagcatgtgttgtttattttgattgctggcatctgtctatttgcatggcctataggaagcagaaaatgagagaagtcataccactctcatgtccagaagattcggtcaaacttagtatagaacatactatatttttcttcctataaattatcacattctcctcgcgaaaaatgtgtatgttggcaaacacaatagtatgttttttcaacttgtaatggcttttcaattaaatacctttacaggcaaggtttcacaagctgagggaatgaaggttgacagatccacaactttctggtgctataaacaactttagtatggaccataaaattggtcatggtgattttggctctgtttattctgctgagcttagaggcaagaaagctgccataaagaaaatagatacaaagtcatctcaagaattccttatggaacataaggttttgacacgcgtccatcattgaaacctggtgcgcttaattggatattgtgttgagagt

SEQ ID NO: 91879 - DNA, 594 bp, Zea Mays
tgacactgtccaacctgatatcttttatgtgtggaaattactgtaacaattgatattctaggatgcattgtagcatttatttaaatggagtaccatcagaaaaataattggaaaactttttgtccttgcttttatttgacgagtaatgatcctctttctttcctttcgcgctctccttttttgcaggttcaacaattttgtcaaatcatttctgaaacgctatgaatgccaaatcgtcatcacgttcaagatggggacgggtcctcgacagccgcttcaacgccgctaactgggtctcatcttcagcagcgtcctgcgtggcgtggtggggcgaaacaacaacagggttgacggaggaagatggagctcgttcgagcagcagtggagagcaggcacacgtgcacctccatgttagagtagttgtcctctgctggtgccgcaacgatgttgagagaacagcgcggcccacctgtaagtgcaatcaactccaagtgccgtggttaggtttgagaaacctagagtgttcttgctgaaaagcagcagaacttcttcaactgcagctgagctttccagctgaacttgacttcagctgag

SEQ ID NO: 91880 - DNA, 1136 bp, Zea Mays
tctgaattctgacgccgtcgatgcataacctcctcgtgcgttgtttgtctctctacttctctagtctagcccctctgtcgctctcagacgacgggtgcgccgccgccgccgccctaagccaggtgctgactgctgaggctttctttggtctcttcgccggcgacgacacccgccagtatccacggtgtcattgcaagacaagatggtttccttcgagatgaatgacctcaagaagattgggcttggcctgacaggctttggaatattcttctcatttctgggaattgttttcttctttgacaaggggctcatcgcaatgggcaatattcttttcctgtcaggtttgggtttgacaattggtctgaaatcaactatgcagttcttcaccaagccaaagaattacaagggtactatctcatttggtgctggtttttttctggttctcattgggtggccgttttttggcatgctcttagaggcatatggctttattgtactcttcagtgggttctggccaacactttctgtgttcttgcagaggattcctatcatcggctggattttccaacaaccatttgtgacatcgttccttgaccgctacagaggaaaacgtgttccggtctagcaaccttttgcgcaatatatgcttgcggtgtagcaactagcagcctgtatttttttaactacagtagcaaactgattataccgatgtctgatccctcatgtttatatgttttctttaggattgctctttgtaaattacagccccaaactggccaaatcaaaggtccattcctttgagaccaggatgcaggttcacccatgaaatggatctgttgaagaaactcttaagcttgtatggaagtaaaagctaatatgttcctttatatgataatataagttatatattattgtgtggaccgagtttctgaacacaattgcggttcatgtaatcatgtatgtggctcgacccaggattactagaccttccaaatttttaaggggttatctaaatgattcacaatataactaggaaaaccttgaaaaaacacacatgagtggcacatgagaatcaacattttttgtgagggaggataaacaagttgtagtctccgtgtttggaaaaaatcagaaga

SEQ ID NO: 91881 - DNA, 1204 bp, Zea Mays
tctgaattctgacgccgtcgatgcataacctcctcgtgcgttgtttgtctctctacttctctagtctagcccctctgtcgctctcagacgacgggtgcgccgccgccgccgccctaagccaggtgctgactgctgaggctttctttggtctcttcgccggcgacgacacccgccagtatccacggtgtcattgcaagacaagatggtttccttcgagatgaatgacctcaagagtatggacttgtcaccactctttttttaattgtcttcccaatttttgttccatttgtttctgataggagcatagatagtttgtgctaggcatgaatgtgtattgatttgcttgacgtcctttgtttctgcctcataattcagaacttaacaagttagcatgtttgcaaattgtcttgtgatgaatgtgacaaagtcaccctcagggatgctactttgttttgaaggtttgcatgtctttaactgatatttgatgatttttcaatcatataaactgtgacatgcacctcatatcatgtaaaaacagtagttttaatgtgttgatccatcagggtaatatcatgtgtggaacgtgctgtataatttaacctgcatttttttgtctaaatgtgttagtgttacaattgaccatgagtggcagcatatatcatgtactgtgtgcctgtggtctacaatatgccaatatcacttgagtggtagttttagtgttataagtgtgtacaatgcaagagaggcaacttgctaattcttttttttcccttcaagggtgggctgggggtgttattagaaagaacaagtatatgggtctgttcatcctcgatagcatgtgtgatattctagcagtttgttactgtgtctgatctcaactgagtttgtccaatctgtggaaatattggctcaagtgcaccaactggataaagctttcaggcaaaccaaagatattaaagttcaagatgtctgctggttaggccgacacaattgccatactacacaaatactaactgcagtgctgagctgctgtctgactgctgaatcctctgaaagatgcttggatttagttgaaacaggcctaagatgtttatgctagtttttaattgactactgtaagaaacatctactcagccattagctaagagcaactccaagaacctctctgtatttttcctcattgataggaatggagattttgggt

SEQ ID NO: 91882 - DNA, 981 bp, Zea Mays
tcgcacttccctttcttgaagccaccgcaacacccgaacaaatcctcaattacaacgacgcaccaccgtccacccaagcgacgccaccgctttaaaatccccgcagccaccgaacggatacaagagctcgcccacctcgccccccccccccccccatccagctccgaccctagggtttccatccggctcttccggaagcttccgaaaatggccaccgacgagctcgcccacgccgtcgcccccgccccggccgggggagaccactccccggccttctcgttcagcatctggccgccgacgcagcgcacgcgggacgcggtggtgcggcgcctcgtggagacgctcgcgggagacaccatcctctgcaagcgctacggtgcggtgccggccgccgacgccgagcccgcggcgcgcgccatcgaggccgaggccttcgacgccgcggcctccacgggaggcgccgccgccgcctccgtggaggaggggatcgaggcgctgcagttctactccaaggaggtgagccgccgcctcctcgacttcgtcaagtcccgctccgcggacgccaaggccggtgacacgccgtcggaggaggcccgggctcctggcgcgcccgaggccgaggccgcccagcccgcggcgtgagcgccggacagccattcgttccgtttttgtatttcctgcagcctgtgtgtggcttgggtctgagtttgtatgacttgaacgttagctgtttgcacatctatgcaattcttgttcttccatgaatagccccgttctagtgcgtgttcctgtttttctgggaatccctgcccgatcctgaggttgtcaaaccatcgcagcattgacctctgtctgtgtgcagcttcgagtgatggtcgaattgttccggagaccgaattgacaagcaattaagattcctcccatctttcaagccacatttatatgtataataataatctgaccgttgatttgaaattctaa

SEQ ID NO: 91883 - DNA, 123 bp, Zea Mays
taaaggcaggggcgacacaagggtttataccggttcaggctctcgatgtgagataatatcctatgtcatatgtgtggttgttgttgtatgttgtgatgtaatctaatcttccccagagggatc

SEQ ID NO: 91884 - DNA, 300 bp, Zea Mays
ttgttaagcaggtctgggttgcctaacctttcaccagataatgctagttgcagccttgatgactggtggagcagagctgtggggaagattccccgtgatctccaatccggcttcaattctctagttattcttggcgcttggagcctttggcgtcatcgcaacgactgcgtgtttaatgggagatcgccaagcctggcgagtgctctcaccctcgctggcgatgagctcaggatgtggtgtagtgccggggcaaaagggttgaacctgctttcaactcttatgtttatgcttgacccaggg

SEQ ID NO: 91885 - DNA, 152 bp, Zea Mays
aatgacggctattataggatgatctcctcttggacactgacattgagagttttatttgggagcacgatgctgttaactatcactacttcatcttcaacatcaacggcttcacctaatagtaatgccaagtttggcattttgatcaccttcgc

SEQ ID NO: 91886 - DNA, 426 bp, Zea Mays
atggctgacgacgtcgttgatgtttctgtggccctccagaggctcatcgacaacaagctggtcgccctccaaactgcggagcaggaggatgcggtggctcgtgcgcgcgtccgggtcatcgccctgctcctggaggaagaacaggttgctgtcgcagcccttgacgccaaggttgtggctgtggcacagcagatcccttcgtcgtccgcagttgcgcctactcctccacccatcggagatgagtctgccgtcatcgccaacctgcatgcccaagcatgcggcgtacagaacacccgcaatatgattggcattgttctggacccctcttcaacaaactacgaactcgccgcccatgacctcctcgacattcctcctgccaacgatccatcctggaaacggatggacagcgttgtcgtctaccattag

SEQ ID NO: 91887 - DNA, 1724 bp, Zea Mays
atgccgccgaaacccgcgccccggctcttccagtacatctccaacaagtcgcgcaaaccgccgccgccaccagccgccagatccgctgcgcccggcagccacgacggcaccgcgtccgatgccgacgtcggtgaggtgtaccgcatcgtcacgtccgcggccacgccgtccgcgatggagtccgcgctcgcggcgtccgccgtctcgctctcgtccccgctcctcgacgccgtcatgcgccgcttccgcttcgcgcacggggacccgctccgcgcgctatcgctcctctccctcgccgccgaccgtggcggcatcgcgccgtcgccttacgccatcgacaccgcgctctacgtgctcggccgggcccgccgcttcccgcacatgtggaacctcgtcgcgaacacgcgccgcatatgtccggacgccctcaccccgcgcaccgccatgatcgtcctcggccgcgtcgccaaggtctgctccgtccgtgagacagtcgcctccttccgctgcctcgcgcgacttttccacaccgtcgacccggccgtactcttcaacgcgctgctccgcacgctctgccaggagaagagcatgtccgacgcgcgcaacgtcttccacgcgctcaagtacgagttccgagtgaaccgccacaccttcaacatcctcctctctggctggaagtcggccgaggacgccgaggcgttcgtcaccgaaatgcgggagctcggggtggagcctgacctggtgacctacaacagcttgatcgactgccactgcaagaaccgggacgtgcagaaggcctacaagctgctcgacgaaatgcggcacaaagacatttcccctgatattatcacttacacaagcttgattggcggactggggttgattggccaacccgacaaggcaaaagatttgctcaaggagatgtatgagctagggtgctacccagatgtccctgcatacaatgcagcaataaggaattttgttatagcgaagaggcttggagatgcattcgcactgatggatcaaatggtctcaaagggactgatgccaaatcccacaacttataaccttttcttcaggtgctattactgggctttcgacattggcagcgcatggcggttatatgagcgtatgcggtctgaaggatgttacccaaacacacagtcttgcatgttcattatcaggttgtgccaccggtatgggaaggtggcactggcacttgagctatggagcgatatggtcagcagcagctttggatcattaacgctggtatcagatgtgctgttggacctgctgtgtgacgaggggaagttggaggacgctgagaggtgcttctgtcagatggttgagttagggcaaaagcccagtaatgttgcatttagaaggataaagatacttatgcagcttgccaaacaggaagaatcaattgccagattaactgaaaagatgatacaatttggtcgactgccaccagtggattgccaaagagtccaacactctgttgaaagcaggcctagtaatggtgatgcagctgacgctgatatattgagagcagcttagtgcatacatttggatgatggcgatcatgaatacatcattaaactattttgttgacaagatgaacacttatgccccgtttatttcctttcattttgaggaattggaatcttactattgcattaggctatttttttagaatgtgacattccaccactttccaaagt

SEQ ID NO: 91888 - DNA, 1983 bp, Zea Mays
atggagctgaacactagaagcagcaagggcaaggccaaaaccatggccaagatcctggaggaggaggaggaggaagaggaagcggaagatgacgacgacttcttcagctcaagcggctgcgggtgcttcctttgcgccatcaaagagccggacgcccggctccgtcgagccagtctctccgccttcttcagggaactaccgtactgtgaggatgacggcggcagtaatggccaatcatgtgccgcggcggttggcgcggtgtggcgggcggccatgtccgcgccagatgaccccgaactcccctcgctcggcgcgatccggtgcatgtcccttctcctcgcccgcgcgctcgccgacgcggcgtggctccgtcgcggcgacaacgtgtacgtgccgtactacgccgcccatgtcatcggctcgtacaccatccgctcctccgcgcacgccgagctggccgtcgcggctggggccgtgcgcccgctgctggctctactcggcggcgccatgacgtgggtcgagcagcgcgcggccgcgcgagccctgggccatctcgccagctacgagtccacgttcccggccgtcgcgcgtcacgccgctgaggcggtgcagctcgccgtgcgttccgcgtccacttgcatccgcgacgtctatgccaactttgtcgcgctggcaccgagcaggaggccaaagtaccagagggacctcatgacgtgcgggctcggcggcggcgccgacgccgaggacaggaaggcggaggagtgggcgagccagctccagtgctggtcgctctacctactgagctgcctcgcgtccagggacctgtcatctcatgccatgatatgccaagactccttgttcttgaacgagctgtcccggatgtggggtggactggcgaacggcgactcgcccgccggcgtcgggctgctgcgccttctctgtaggagcccagtcggccgcgccgccatcgcggcgtgccgtgatgcactctccagtctctgtgacctcgcgcgttcgtccgatgactggcagtacatggccgtggattgcttgctcctcctcctcgacgaccgcgccgcatggcacgcagttgctgatgccacagcgccgtggctctctgacttggtcgatctccggcatctcggtccaaggcgacgactcggcgatgccattgcaactgcacttctccttgatgacgtccatgtcgtcagtgaccgtaaactaggtggggaggcaaaaagggcgatcgccagcgtgagagagctgaagggtgagaggaaggagagagaggaagcaatgcctagggatgagttgctgaagagagaaatcttagccaaggagaagaagaggcaaggcaacgacagcttcttgcaaggcgacgtggacaaggccactgatcattattccgaagctttggagctgtgccccctgagcaggaggagggagcggctggtgctgcacagcaaccgcgcgcagtgccggctcgcccggcgcgaggctgacgcggcggtgagcgacgcgacacgcgcgctggcgctggcgcggccggcgaacgcgcatgccaggagcctgtggcgccgcgcgcaggcgtacgacatgaagggcatggccagggagagcctcctggactgtctggccttcgccggagcatggctcgacggccggaggcaccctcggcgggcggcgcgcggtgcgaaccccaagctgccgtactgcgtcgctcggatgatcagcaagcagatgagcgtgacgggtctgttcgccggcgtgacgatgaaggacaacaaggttgggagtgatgattgcatgccatggtgcagcgaaaacgacagggacaatgaggacggcgaagatgatccggatgatgacgatgaaagcgaggaggaaattgctgataatgctggtttgaagatgtgcacgtcaggaagagagctgccaatcatcacgggagatgcttggacgaggttgtcccggaggacgtaa

SEQ ID NO: 91889 - DNA, 2132 bp, Zea Mays
cccgtcgccgtcaccgtacgctggtcatgggctcttggcatccgtcgtccgtcccacgccacgccacgccacagtgcctcctcgcagcttcatccactcgtctcccctccccacaccaaaaaaacaagcaagggtcagcagatagccgcattaaaaggagggaggtcacgtaaacttaatccaatccaccaaaccccaaatctctgtctcgcgctggcgcagcgcagggcaccgccacgcgcgcctcatccggtaccggcatgacgagcgcctccgagctcttcaccgcgcgccgtgccgcccgtggggcccgcctctccgacctcgacctggatccgcacgccgacgcgctccgggaccagcacggacttggcgcccggcaccggcgccgcgggtgccgcccgcgacgccagctcgacgccgccggggacgtgcggcagcacctgcacaccggggccccgccaccgcgtcgccgcgggtcgtacaccgtgaggatccctcgccccagtctctctcccgattgattattgtcgtatccgttgtgttgtggctggatcggagaatctccggcgttggcttatagaattcgtggacgctattaggattcggctcccgcgaaattcaatgatgaccggaaatgccgattttaatatcataattacatagctcgggaaatgggtatcaatagggattacgcacttgcacttgttagtgtggaacttttgtttttgataacatacttgggttaaacttcaacgatctgattggtgaaattgtaccggattgtaatcctatctgagattctgaaccaagcttctttatccttcgaattctactagaaataattgattcgtcatccatgtaatttggtatttgggttgttggctatgtgtagttgtaacttaaaaccataaacaaactggtgcacacatttgccctagtgttgtctataaccatatagtctataccaagtaccaacccagcttcatttcaggagtcctgccatgggctaccattttcatcctcattgtttgtgatgtgccatcagatgaaattatttctctgttttgctgtctgcaggatcagatcttatcgtacatagacaacaacaaccttggggttggggattctgcagctcggaggaacagacttgataggctgatgttcaggacaaatgagcggcttcctggtgctgtactgcaagcacaagcgcgtgtcctggagagactcagaggcatttctcttggttcatctgtgtccaggccatccatctcattagatgaattttcagctagcgatgtattcagaatcatcgacttcagaaacagggaagcacggcatgaagaaaatcggcaccactcatcgtcgttccacccaagcagtgaatcagatgaagaaagaccaaccgtcggttccactcactccaaccggtcaaccggacttaccaaggcagctttcctgcgtctgcaggtcgagatttttgaggctagcaaagatgatagcagagaggcatcgcctgaatgttctatttgccttgatggattttacgatggagatgagctgataaggttgcgctgtgggcacaggttccactcgacatgcttggagccatgggcgcggaaatgtgcagactgcccatactgtcgaacgaacatacggtcacgatcctgacgacaaacccttagttcagagtaagcttataaccaccatggagtttcactgttgtaaaattcgctgttgtgggcatgccagttaatccggtgctcctatggcgacatgtaatttctaatatcctgaatattttgtgttgtgtcactcagagaggtttatggtgttgtgtgcgagtggaggctagtagcagtatagcttagaaagcacccttttgtgtgtatgtagcgagggatcacgcaaatgatcctgtactactaatgataatgttctgatgtctgaatttcagttgttactgcatgcttcttgttatgtagggcgaggaacatgacttcgctatgatgcggttaaaaatgctctgcaaaatactaggctgaaggagtcaatgtcagtgtcaccagcttttacatttctctctctgagctgatttcttccaaaagcatcatcattattattattttttt

SEQ ID NO: 91890 - DNA, 1218 bp, Zea Mays
aaaaccccacacgcgcacacactggctgggtagacgccgctcgcgctccgccgctagaggctgcctgttttgctgccgcctcattgcttcgctcctcctccctcgccgccgcctcctcgtggcgagcgagtcgaatccattccctcccaccccacgggcgccggccgataccgacccagagctcggacgcgccgaggcgaggccaccgccggaagcattctcgcctgctcgccgcggggacggtagctacctaggggggggggggggggggtaaggaggagcgaggccgtcgccccgtccggtcttcgtgtgctgtgttcagcagctagcagtgcgtgccgagatgttcgcgagccggccggtggtgcacccgctggaggtggcggcgcccgcgcatccggtgcagcagccggcgccgggcgttctgatgaaggacctgcccgggatgccggggacgcccggaggcctcggcctccgcgtcctgcagctcctcttcgcagccatctcgctggccgtcatgtcgtccaccgccgacttcgccagtgtctccgccttctgctacttaattacaacaaccgtcttgcaatgtgtgtggagccttacggtagctattgtggacatatatgcactgcttgttaagcgttgtttacgaaatcgtcgggctgttactctcttttccattggagacgggatcacatggctagtgtccttatctggagcatgcgctgcggcaggaatcaccgtcctgatcgacgcagatctgatcatgtgctcagagaacccttgtgctagttttcagactgcagtggcaatggggttcatgtgctgtttctctctcttaccatcctttctcctgaacttttattcgatcgcatctagtcacggctagctgaaaagaaagaggaggatagaacctgatatcggagcagtttgagcatccaattgcggttttagtgacaacaggatagagtggcacagctgttagtgttagaattggaaggtgaaatatgtgtatggctcaccatatctagtttaacctgtaaaaaagaaatagggaacggcctgtttggccgcagctgcattaccttgcagttctatgtggtactactatgtaaaatgcttgaaaatgttatagttttaacgtgtcctgactcttcaaccatgtatattgcgagtgaagaggatgggaaatggtgctgaagaatttcgtagcagttc

SEQ ID NO: 91891 - DNA, 242 bp, Zea Mays
tccaaccgtgcgggaaggcaactagtaggcaagggcatggccaggggaccctgagagagagtaccaagcgaggtagaagaggcagcgcgcgcacatgtgccaaggcagcagccgcatggcacgccgagcgagcccgggacaaatggatgcaacggacggggaaacgggacaaaaaaccgcatgctctcccccctcggtgagtttggaccaccagccaggcccgacgttacacgcttggcaag

SEQ ID NO: 91892 - DNA, 2208 bp, Zea Mays
cacgagcgcgggcgcgggcagagggacagccgcatgtgcacgcgaccggcgcatgcacacacttgcgtggccgcatctggctccggctcgtcttccccgggcgggtgtgccggtattgcggcatctgaattggtgagcgacatcactgttcgtatagggactacaaagttttaccttcacaagtttccgctcctctccaagtgtgctcgctttcagaagttgattccaaccactggtgatgaaaatattgagatccacatccatgatattcctggtggcgcaaaggcttttggggtctgtgccaagttttgctacggcatgattgtcacactcaatgcctacaatgtgattgcagcccgctgtgctgcagagtacttggagatgaatgagactgttgacaagggcaatctgatctacaagattgatgtcttcctcagctcaagcatattccggagctggaaagactctattattgttcttggtacaacaaaggctcatctaccttgggcagaggatcttaagctggttagccaatgcattgactctgttgcttcaaaagcctctatcgacgtttcaaaagttgaatggtcatacacatacaatcggaagaagctcccaactgagaatggtcatgattcgccgtggaatggagtcaaccagcggcaggttgttccgaaggattggtgggtagaagatctgacggatctcgacattgatgcctacaagcaagtcataacagcagtcaaaaccaagggtatggtggccaaggacgtgatcggtgaggcaattaaagcctacacttacaagaagctgccgtcactaagcaaggtctcaatgatccatggcgacgcaaaagttcgggcgatgctagttacaatcacatgcctgttgccatctgagaaaggctcagtttcatgcagcttcctcttgaagctactgaaggcaaccaatttgctgaagtgcggcgatatgtgcaggaaagagcttatgaagcgcattgcacggcaattggaagaagcatcagtgtcagatcttctgatccctgcagtggatgaggacaccagtgtttacgacattgacctgattcttagcattgttgaagaatttatcagacaggatagtaagaatgcccagagacataatggtggcgaagtgaatgaccatgtatcagctcctagtgcatcaatgattacagtggcaaagattgttgatgggtatctggcagaggttgcgaaggacccaaatataccggtctacaagtttttcagtctcgctgagacagtctcggccaattcaaggccagtccatgacgggctctatcgcgccattgatatgtatctgaaggagcacccaagcttgggcaagagcgacaagaagaggctctgtgccctcatggactgcaggaagttgtcgcccgatgcatgcgctcacgctgtgcagaacgagcgcctgcctctgagggttgtggtgcaggtgctgtaccacgagcagacgagggcttctgcagcagccaccgtccgagctgacagcatcggcatcggctcctacgagagctcaaggtcaggggccacaacaaacacagaagacgagtgggacggcgtcatggccgtggaagacctcagtctgtcgtccaagacgacgaagctagagaaatgtgacgcagctagcaccgtctcggagaagaaccacggcggcaacaagggtgccaacggcagggcgaaaggtggcgtgatgccgaagaaggcggtcgggaggacgacgatgtcaggcaacaaagggcaggctggggagcgcagcagctcggactcatccgacagcgccattttgccttgccagctggagcatcccaagagggccgcagcaaggagcaccaccaagtcagccgctgtgtagtagtagctgcccggccctttgctcagtgagatgctcaaggagcactaggttttagcagtcgtcgtccgttcttttctttgcgttatgaatgttgcatagaagcaaggaccatgttcttaaacgtcttgtaggccgggagcccgggatggtacgcgtacgttgttaggtgatgttgttagcatgtaggcttgccatgaaacctatgagaccttgggttgtgctgtgagggtttatgtcataagaagcctactttgttagagagttgaagcacgactgttctgcagctgtgaattcttggtgttctgctgtgagatc

SEQ ID NO: 91893 - DNA, 2470 bp, Zea Mays
gagcgctgttgctgcgtctgaaccgatcccattatttgtttggtttcgttgtacgagcgatctctctcctggccgggctccggcacgttgtaatattcggtcttctcggcgcagcagcaacttgttcttgtgcactgctacttcgctgctctgggccgtttgccgttgatgctgcggacaagtatgggatagtgctgctgtgctgtgcagttcttgcttcttacaactggtagtggtggtggtggtctggtctccgtgtgagcatttggtctagaagagcgtgaagctgcgcggctcttctttcttgttcaagatgaagttcatgaagcttggatcgaatccggatacctttcaggacgatgggaatgaagtcagtattgcggcatctgaattggtgagcgacatcactgttcgtatagggactacaaagttttaccttcacaagtttccgctcctctccaagtgtgctcgctttcagaagttgattccaaccactggtgatgaaaatattgagatccacatccatgatattcctggtggcgcaaaggcttttggggtctgtgccaagttttgctacggcatgattgtcacactcaatgcctacaatgtgattgcagcccgctgtgctgcagagtacttggagatgaatgagactgttgacaagggcaatctgatctacaagattgatgtcttcctcagctcaagcatattccggagctggaaagactctattattgttcttggtacaacaaaggctcatctaccttgggcagaggatcttaagctggttagccaatgcattgactctgttgcttcaaaagcctctatcgacgtttcaaaagttgaatggtcatacacatacaatcggaagaagctcccaactgagaatggtcatgattcgccgtggaatggagtcaaccagcggcaggttgttccgaaggattggtgggtagaagatctgacggatctcgacattgatgcctacaagcaagtcataacagcagtcaaaaccaagggtatggtggccaaggacgtgatcggtgaggcaattaaagcctacacttacaagaagctgccgtcactaagcaaggtctcaatgatccatggcgacgcaaaagttcgggcgatgctagttacaatcacatgcctgttgccatctgagaaaggctcagtttcatgcagcttcctcttgaagctactgaaggcaaccaatttgctgaagtgcggcgatatgtgcaggaaagagcttatgaagcgcattgcacggcaattggaagaagcatcagtgtcagatcttctgatccctgcagtggatgaggacaccagtgtttacgacattgacctgattcttagcattgttgaagaatttatcagacaggatagtaagaatgcccagagacataatggtggcgaagtgaatgaccatgtatcagctcctagtgcatcaatgattacagtggcaaagattgttgatgggtatctggcagaggttgcgaaggacccaaatataccggtctacaagtttttcagtctcgctgagacagtctcggccaattcaaggccagtccatgacgggctctatcgcgccattgatatgtatctgaaggagcacccaagcttgggcaagagcgacaagaagaggctctgtgccctcatggactgcaggaagttgtcgcccgatgcatgcgctcacgctgtgcagaacgagcgcctgcctctgagggttgtggtgcaggtgctgtaccacgagcagacgagggcttctgcagcagccaccgtccgagctgacagcatcggcatcggctcctacgagagctcaaggtcaggggccacaacaaacacagaagacgagtgggacggcgtcatggccgtggaagacctcagtctgtcgtccaagacgacgaagctagagaaatgtgacgcagctagcaccgtctcggagaagaaccacggcggcaacaagggtgccaacggcagggcgaaaggtggcgtgatgccgaagaaggcggtcgggaggacgacgatgtcaggcaacaaagggcaggctggggagcgcagcagctcggactcatccgacagcgccattttgccttgccagctggagcatcccaagagggccgcagcaaggagcaccaccaagtcagccgctgtgtagtagtagctgcccggccctttgctcagtgagatgctcaaggagcactaggttttagcagtcgtcgtccgttcttttctttgcgttatgaatgttgcatagaagcaaggaccatgttcttaaacgtcttgtaggccgggagcccgggatggtacgcgtacgttgttaggtgatgttgttagcatgtaggcttgccatgaaacctatgagaccttgggttgtgctgtgagggtttatgtcataagaagcctactttgttagagagttgaagcacgactgttctgcagctgtgaattcttggtgttctgctgtgagatc

SEQ ID NO: 91894 - DNA, 1428 bp, Zea Mays
gcgcgacccttactcccaccgtcccacggccacgggcttgcggccagctcccctcgccgatcgtttccaccaaatccaccggtcttgcggccccatcttccgctccgacgatcccggggactttccagtaagtagcagcctcaagcaccaattcgtctctctgccgaagttaccaagggcaccccagttcgccgaggtggatcggtagcaaaaaccgatactggtacgttgccatggaggcagtttgatttggtggacctaacggccttccggatctcttgggagccagagcgatggcgcgcggcgctcgctttctccttgttctcgcgttgctcgccgcgctactcgccgtcgtcctccagctctaccgccacaggaagccgaggttgtggatggtggaagagctatctgtgtacaatggaaccaacgaggagttgcccatattactcgcgattttgggctcagtgtttgatgtcacgaaagggaggtcacattatggtcctggaggaggttatcatcactttgctgggagggatgcatcacgagcatttgtttctggaaattttacaggtgatggtctgactgattctttacagggtttatcaagtagtgaggtaaacagcgtagttgattggaggaaattttacttcgaaagatacatatttgctggtaaacttattggacgttactacgacagtgaaggaaatcctacgaaatatctgaagggtgtagaagtgaaggcaaagagaggtacacagcttcttgaaaaacagaagagtgatgaagctaaaatacctggctgcaattcaaaatggagccagcaagaaggtggtgaagtttggtgcgacgcgggctacccaagactggtgaggaggccaggcgacatagctctgaccggacaagttagccaaaggtgcgcttgtttccaggaaaacgagctcgacaaagccgggctagtggtgtacgaagggtgtgattacttgagccagtcttgcaaagtaaactaggctgtacatatctatccccttcccttcgtccacgaacctgtactcagcgcaaccagccacgcatcatgatgggctgggccttctgttccgtcccgcactcccgcatccatcctctcgaaacacctggtgctgcaacgtcgtgtttcagaagccaagatacgcgattgatttgattggaagatacgtgcaaccgaatcaaatgatggtaacactggcgctgccgccgtgcattattcgtgtagcgcaagatcgatcttaaaggctgtccgtgttattgtgttaatagccatggggccttggctgtcgatggatcgagtcgatgctgccttgcaagttgcaccgtcggcatcatctttcaagtctctttatcacactacatatttcaaactctgtattctacatgtatgccaatgaattgaag

SEQ ID NO: 91895 - DNA, 700 bp, Zea Mays
gcgcgacccttactcccaccgtcccacggccacgggcttgcggccagctcccctcgccgatcgtttccaccaaatccaccggtcttgcggccccatcttccgctccgacgatcccggggactttccagtaagtagcagcctcaagcaccaattcgtctctctgccgaagttaccaagggcaccccagttcgccgaggtggatcggtagcaaaaaccgatactggtacgttgccatggaggcagtttgatttggtggacctaacggccttccggatctcttgggagccagagcgatggcgcgcggcgctcgctttctccttgttctcgcgttgctcgccgcgctactcgccgtcgtcctccagctctaccgccacaggaagccgaggttgtggatggtggaagagctatctgtgtacaatggaaccaacgaggagttgcccatattactcgcgattttgggctcagtgtttgatgtcacgaaagggaggtcacattatggtcctggaggaggttatcatcactttgctgggaggttacagtcttagatttctagcgcctgtttcagtttcattgttatgaattacatgtatgtcgcagcttggtgttataataaatctaggaggataggtttcacattgctgatgttaaaacatcattcttttgacagggatgcatcacgagcatttgtttctggaaattt

SEQ ID NO: 91896 - DNA, 137 bp, Zea Mays
ggcctttcttggttgcctcagcttgtacattttgtaatgaatatgctcattttagttggcagaccagttgcttgtttggaattggtactgacgtattgctctgctaattttaggattttccagggattaatatttca

SEQ ID NO: 91897 - DNA, 176 bp, Zea Mays
tttttattttttttcttattcttgttttattgtatgtttttaaaattcttatttcaaattaaaatcttgttaaaagtttcaagcatagattaaatacacaattacaaagttctcaccataaatacaaatatatttatatatttatttaatctatccatttatttaggctatgttgc

SEQ ID NO: 91898 - DNA, 4596 bp, Zea Mays
atgggagttcacggtctgtgggaactactggctccggttgggcgacgcgtctcagtggagacccttgcgggcaagcgggtggcggtggacgcgagcatctggatggtgcagttcatgcgggcgatgcgggacgacagcggcgagatggtccgggacgcgcacctcctagggttcctccgtcgcatctgcaagctcctcttcctccgtgttcgccccgtattcgtcttcgatggcgccacgccggcgctcaagcgccgcaccctcgctgcccgccgcaggcaccgtgacgccgcgcaggccaaggtccgaaagaccgccgagaaactcctgctctcccatctggccaaggcggatgcagaccagacacagcagcacgacacacacacatacgcgccggaggaagcgctagggttcacgcggtgcggcggacgggctgagccagcagggtggcacgagtggctcaaagctagaaagcttgaagaattggcagaacaaatcaggagtgacagagctaagcatgatgccaagggcaagcaagttgagagcagtaatggaggagaaactgagaaaacaagtcaaaaccaaatcggtgataccaacaacagtgagggaaatgttgcatcgatcaatcaggagaaagtggatggaatgctggccgcatcgcttgctgcagaggaagacacagatttcactgacgagggaacacaccatcttacaagtgctccattgccagaaggagatgaaattgatgaggatgaagatgatgatgaagggatgatcttccctatgacaactggtgacattgatcctgcagtattggcttcccttcctccatcgatgcagttagatcttcttgttcagatgagggagagagtgatggctgaaaacaggcagaagtaccagaaaataaaaaaggaacctgcaaagttttcagagcttcaaatacagtcctatctcaaaacagttgctttccgtcgagagatagaccaagttcagaagtcttcgtcagggaagggtagtggaggtgtccagacatcaaaaatagcatcagaagctaatagagagtttattttctcatcatcattcactggtgataaacagatgctggcacaaagaggtgaaaaggagcataatgttgaaaacactagatcaaaaaaggaaattcattcttctgtcttcgcatctaaccccacaagtagtttgggaacaatgaagcctcccaacagcaaaactttgagcgattttgggcctgatgttgagacctatcgtgatgagagaggacggattagagtaagcagggtcagagcaatgggaattcgtatgactcgtgacattcaaaggaatttagattttattaaagagaatgaacaggttaaaagtaagggacagacacagaccaattttcacaatggatcaacaggcaatgaagagcctccagattttccagaacatctttttgaaagtaacaagctccagagttcttgtagtcctgatgtggatctttctgaaactgacagagacaaccatcagacctcgtcacaaataggaacagatatcatttctgagagttcttgttatggaaacaaggaagcaatagagatatctttctcggttgatcaaactgaagtgaaggatggcgatgaagatatatttttgcaattagtgtccgggatggcacccaacaacatattttctggaaataattgtttggttaaaaagatggaagaatctgtagattctgagtgtatttgggaagatggtgttattgaagcaggaacttctcctgtgaaaattgacatgaaggatcataagtcatctctgccagagaattgcagcgatgatgagatggagtgggaggaaggtgatagctttgtacctggagttgcttctagtagtgaacataatccatgtaatgcaccaaagggggatctggaagaagcagctcttgtacaggaagcaataaggaggagtttagaggattttgagaagaaggcatctgagaatgtgagtactggagatatacaagcatctgttgaagatagatctttgcagttctccaacaatgttcctaagatatctgaatctcttggtgaaaatgattcacattctggagtacctgttgttgacgagataaacaatgaaacaagaacagaaatcaattatgataaggatgatatggtacaaggcactggactacttggaactgagagacaagaatctgaatcacaacccccactggtgaataatgattggcatgccgatatgcacagagctcatcctctggggtctgtgcctccatgtactacattcacgagtgatctggctgaaaaaccatctgtcagtgcagaaactaacggtgaagatgtaatgatatttacaacaaaaattcctggaacagctttaggcgattgtgataaaacttccaacctaaacattatgaattctgatcaatcaaaatgcagcaaagatattgcttcaactggagaatccttgtcacaccaaaagaaccttttaattgatgaactactagccgtcactgccgaacaaaaagaaaatgctacccaggtagatttgaagtttgccacatctgaggtagattatacacaaatttgtggcaacgatgacaaccatacaatatcagcgagttatgttgacgcggagctatctcgtcttagacaagaacagatatatcttggacatgaaaggcgaaaacttgaaagtcatgcagagtctgtaagcagtgagatgtttgccgaatgccaggagttgctccaaatgtttgggttgccatatattattgcaccaatggaagctgaagctcaatgtgcatacatggaaataaataacctcgttgatggagttgtcaccgatgattcagacgtatttctgtttggagcaaggaatgtttacaagaacatatttgatgataggaagtatgtagaaacatattttatgaaggacattgagtctgagcttgggttatcacgagaacagttaatccgcatggctctgcttcttggaagtgattacactgaaggtgttagtggtatcggcatcgtgaatgctattgaagttgtacatgcatttcctgaagaagatggactgcagaagtttaaagaatggattgaatcaccagatccatcaatatttggtaaactgcatatggaaataagtggtagatcgaagaaaagaaaactcgatgaaaatgattcagatggaaaggggaaaggcctggaacctgaatgcattcaaggttctgatgataaacaatcttctaatgaggatgaacatgtcaaggaaatatttatgagtaaacataggaatgtgagcaagaactggcatgtccctgcaacttttcctagtgagaaagttgtaaatgcatatatttctccacaagttgacagttcaacggagcctttttcctggggaagaccagatttaggcctactacgtaggttatgttgggaaaggtttgggtggggcaaagagaaagctgatgaactgctgcttccagttttgagagagtataataaacacgagactcagctgcgcatggaggcattttattcattcaatgagagatttgcaaaaattcgcagcaaaaggattaagaaagccatcaagggcattacaggcaaaagctttcttgacgcagatgaatctgagcaggataatcccagtactagcaagacgatcaagaagaaagaggccagctcctcaagccatgccagaggtagagaaaaaaggaaaaacgattatggagtcatgggaagtcaagaagataatataattgacaataccaacagtttggcagagacagttgagaatactagagaaaataacaatactactaagataaaaagagggagttcctgtggtcgccccaaaggtagaggacgaagcaggacaactgcgggaagtgatgcaacaataaatcaggaggattatgaaatagaatattctacttcagcttcagatgaggattcatgtaaaaggcattccaacagttacggatcggaaggaagggcattgcgaaggtcaagtaggaaacggaaacaggtgacatacatggaagatggtcacgaagcatatggcaatgatgttccaatgcatcaaaacgatgaaaataacccaggccaacctgctgcagccgcagacgtggctggagaagacacaggatttaatatttaccatcaggatacaagtgaactaaacagcagtcagatgcatacaggtgcaggcattaccgaagatatcaatgaagattcccagcgttttgagttacgggaggacaatcaggtggattcaacaccgaaagactatttgttcaatggtggtggtttttgtatggagggcgagggcgatgaacaagaaccagcgtgtgatcaatctggtgcagaagtagaacctggaccaagtggtccatgtggcgccatggatgaagtttcagagagtgcaagcatatcgacggctatggagtgtaccgagaatgcaagaatggaggcacgcggtgcatcttcgtcgcagcaaagacgcaaggcaagccgaggtttgagtgccatgccgacgcttatcaagcgtaggagaaaatcgtga

SEQ ID NO: 91899 - DNA, 2778 bp, Zea Mays
atgcctcccactaccgtcatgctgctaccagcgtgcaccgtgctgctgctgtgctgccgtctctcgccggccgccgcgtcgtcgcccggcgatgtcggcggaggcggggcaaggaggctgctccaccagccattgttcccaatcgagtggaccccgccgccatcgccgcagccggacttctcctctgacccggcgacgccggacggacctcctggcgccttcttccctcccacgccaccggtggcccctgctggcggcggaggtacgacgacgacgtcctcgccaaccaccgtcgcctccaacgtcccggccggcgcctcgtcagggtctggtgatggcggccaccacggcggccctgccaaggggaccatcgtcgcggcgggggcggccgcgaccgcggccatcgcgctgctggccttcgcgtgcgcgttcctcatcgcgctccgcgcgcgccgccgaggggactcgcagaagctgctcggccccgaccgtgggtccgcgcgccaccactcggcgccctcggccgctgacttcctctacgtcggcacggtggagcccaccacgcccggccgccaccacgggtcccccgccgccgatctcattgggtccccgtaccgcaagctgcgcagcgagcgcgcgcgccgcgacgagcccaccgacaacctgagcccagagctccggccgctcccgccgctgcgccgcgcggccacaatgggctcctctgacgatgcatactacacgccgcgccagcgctccgggggttccggcggcggcggggttggcggcgaaacctggagtgaggccagcgcgtccagcccgcccaccaccaccaccgcgtcccgccgaagcctccccagcctcaccagcgactgctttcctccggtcacggctattgctgcgccgacaccaccccctgcgcggtcccgtcgtacgcccccgcgcacgcgcttctctgctggctcgacccctgacatcaaacagccgccttccccttccgagccgacgtcgcggcgccggttgctcaagccgttgccacctgagggcccccgcattgccatgccgatgccgatcacggcgacaacggcagaggatagtatcgggagcgcgtcgatgcgtaaacaggattacgtggcagacggtatcgttggcaacgacgagccacggccgaagctgaagccgctgcactgggataaggtgcgggcgacctccgaccgcgccatggtctgggaccagctgaagtcaagctgctcattccagttgagatattgcttcatagttcatactgcatgcgctgttaatggctggttggatgagggcatgatcgaggcattgttcatgaataactcaacgccaaccgcgccgccgagagatgcgggaaggaagactaccgtcccaccgttcaggcaggaggagagggttcttgaccccaagaaagcacagaatatcgccatcctgctccgtgcattgaatgttacacgcgatgaggtctctgatgcactgttggatggcaacactgaatatttggggactgaacttttggagactttagtcaagatggctcctactaaagaggaagaactcaaactacaagattataatgatgacacatcgaagcttggttctgcagagcgctttctcaaatctgtgcttgatataccttttgccttcaagagagttgatgccatgctataccgagccaattttgagtccgaaataaattacttaatgaaatcttttgagacactagaggcagcctgcgaagatcttagaggcagcaggttgttcctgaaactgctcgaagcagtgctgagaactgggaaccggatgaatgttggcacaaaccggggtgaggcaaaagctttcaagcttgacactctcctaaaacttgctgatgtcaagggcactgatggtaaaacaacgctgttgcattttgtcgtccaagaaatcgttcgatcagaagatgcaaaatcagaaaaagaaagtgccatgattacccgtagctctaaagacgagcagttacggaagcaaggcctgaaacttgtctctgggcttagcagtgagctaggaaatgtcaagaaagcagctatgatggacttcgatgtgttgcatggttatgttaataagctagaaacaggtcttgaaaagatcaagtcggtcttgcagctcgagagacaatgcactcaaggccagaagttcttttcgacaatgcaaagttttctcaagaaagctgaggcggagatagagaaagtcagaggggaggagaagagggccttgatgagagtaaaagacatcaccgagtacttccacggtgacaccgtgaaagaggaaccgcaccctctcagaatattcatggtggtgagggacttcctctcgacgttggatcatgtctgcaaggaggacagcaaggctgagggatcggacaagtcacaaagtcacaaaactgaattttggaaggaacagagcgcaccagctatgccaggtttagctgctgaagcggatgtcgcattggcatttgtcatgaggcacacgtttaacggtgggaggtcgaaggggtggggaaattgtggttgtggcttagaaaagctgcccactttcaaagccaaggtctcggtcggagaactgatgaaggtttggaggcgaagggacctaccacttaaatctggggctcctctggacttcgctcggcatcacaccaccttcttgggttgctccgagtacaagcctcggcaaggatcgaagaccaagcgccctagagcgaagagtgtcacgtcccagtga

SEQ ID NO: 91900 - DNA, 3735 bp, Zea Mays
cgcgtcctcctgtcgtgtcggatccgagcaaaccactgcgcaccttcccttcacttcccccacagcgcgcgaggcgcaacttccggctatgtgcttgcccacgcctgaagtcgccgtcacgtccttacgcgtcaacggcacggccccacgcgggtgagagaggagagccccccacgcacccgcgtgaatatatactcgcgcggccacggcagggttggtgggagagcgaattcgagctggtcgaatccggcagccgagcgagatggagagctatctcaaggagaacttcgggggcgtgcaggccaagcactcgtcggacgaggcgctgagacgatggcgcaaggtcgtcggcctcgtcaagaaccccaagcgccgcttccgcttcacggccaacctcgacaagcgcaacgaggccaccgccatgaagcgaaataaccatgagaagctacgtgttgccgtgcttgtttcaaaggctgcacttcagttcattcacagcgttgctccgtcgagtgagtacaaggtccctgccgatgtcaaggcggctggtttcggcatctgcgctgaagagctgagctcgattgtcgaggggcatgatgtgaagaagctgaaatctcatggtggcgtgcagggcctcgcgtccaagctatccacttcggagtctgacggcctcaccacgtccgcggacaagctagcgacccggcgggatgtttttggcgtcaacaagtttgcggaggcggagtcccgtggcttcttggtcttcgtctgggaggcgttgcaggacatgacactcatgatccttgccgcgtgcgcgttcttctcgctcatcgtcggtatcgccacggagggatggcccaagggcgcacacgacggcctcggcattgtggccagcatcctgctggtcgtgttcgtcacggcgtcaagcgactaccgccaatccctgcagttcaaggaccttgacaaggagaagaagaagatcacggttcaggtcacccggagcggctacaggcagaagctctcaatatatgaacttctcgtcggcgacatcgttcacctctccattggtgatcaggtgccggctgacgggctgttcatgtcaggcttctcgcttctgatcaacgagtcgagcttgaccggagagagtgagccagttgccgtcaacgttgagtacccattccttttgtcagggacgaaggtgcaggacggttcttgcaaaatgctcgtcacgacagtcggcatgaggactcagtgggggaagctgatggccactctcagcgaaggtggtgatgacgagacaccattgcaggtcaagctgaatggtgtggccaccatcatcggtaagataggacttatctttgcagtggtcacattcgcagtgctcacccaaagcctgttccggcgcaagatcattgatggtacgtacttgagctggactggagatgacgcattggagctgcttgagttcttcgccattgctgtcaccatcgtcgttgtggcagtacctgaagggctaccgctggccgtgacactgagccttgcatttgcaatgaagaagatgatgaacgacaaggcactcgtccggcaccttgcagcctgcgagaccatgggctcagcgacctccatttgcagtgacaagacaggcactctcacaacgaaccacatgaccgttgtcaaagcctgcatctgtggtaagatcaaagaagtggatggtgtttcggatatcaagaacctgttctctgaactcccagactctgtcatggcgattctctcccagtccatattcaacaacactgggggagacgttgtcttgaaccaggatggcaaacgtgaaatactggggacacctactgagacagcgattctagagttcgggctgtcacttggtggagactttttggcggtgcgcaaagcaagcactcttgtaaaggtggagccgttcaactctgccaagaagagaatgggagtggtaatccagctcccagagggtgcactgcgagcacactgcaaaggtgcatcagagatcatactggcatcttgcagcaagtacctgaatgaagatggcaatgtcatccccctggatgcaggaaccattgatcacttgaaggccacgatcgatagcttcgcgaacgaggcacttcgcactctctgtcttgcctacatagaagttgaggatgggttctcagtcaatgatcagatcccaacggatgggtacacctgcattggcattgtggggatcaaagacccagtgcggcctggagtgaaggaatcagttgctatctgcaggtcggcaggtattacagtcaggatggtcacaggtgacaacatcaacacggcaaaggcaattgcccgggaatgcggcattttaactgaaggtggcattgccatagaaggcccagatttcagaaccaagagtgaagaagagcttactcaactgataccaaagatacaggtgatggcaagatcttcaccactggataagcatacccttgtcaagcatcttcgaactaaactctacgaagttgtggctgtgactggtgacggaacaaacgatgcacctgctcttcatgaggctgatattgggcttgcaatgggcattgctggaaccgaggtggccaaagagagtgctgacgtcatcattcttgatgacaacttctccacaattgtcactgttgcaaaatggggtcgatcagtttacatcaacattcagaagtttgtgcagtttcagctcactgtcaatgtggttgctctggtggtaaacttctcctcagcttgcctgacagggagtgctcctctcactgctgtgcaattgctctgggtcaacatgatcatggatacactgggtgcgctggcattggcgacagaacccccaaacaatgaactgatgaagagaacacctgttggaaggaaaggaaacttcatcagtaacattatgtggagaaacatcctgggacaggccttgtaccagttccttgtaatttggtacctacagacagagggaaagtggctgtttggaatcaagggcgataactccgatctagtcttgaacacactgatcttcaattgcttcgtgttctgccaggtattcaatgaggtgagctcaagggagatggagaggataaatgtatttgaaggcattctaaacaacaacgtgttcattgctgtcctcggcagcaccgtcatcttccagttcatcataatacagttcctcggcgatttcgcaaacactacccctcttacgctcaaccagtggatcgcatgtgtttttatcggtttcataggcatgcctatcgcagctattgtgaagatgatcccagttggatctacgtagtgaattagagctaatttcgtccagaaactgaagttggacatggctacagtctgatcatggcaatggagttttctgggttgccatttgtgtacaagatagatctgtgctatgcttctattctggtcaatctttgcatcttttatcctgtagtatcttatcagccaaggttgtggactcgattgttagaaaatgccttgggctcttgtagctgttctttgctttatattttttcttggtgcttttgctaggaacattggaggctggagctgtatatgacaatcttgttgttcactcgaatgtgcttgttttgacacctatcattttgcttcatctgataagtaatgtttcagtcagaagttccagagaagggtggaatcttaatgtttctgatttgccaagaaaacggaccc

SEQ ID NO: 91901 - DNA, 99 bp, Zea Mays
agcacgtgaagcgttacgaacttatgggcctttttggttgtgtccgagcatctattgggctgacgaccattggcagcgaatgaccagctggcatagacg

SEQ ID NO: 91902 - DNA, 2494 bp, Zea Mays
ttcttatccgctgctggggtgtgggtgcgcctcgtcgtcggcgacctttctcacacccagcggagacgacccattccgattggcggagggagctctcgtccaatgggtcgcgggctcgcggcgccatgggattcacgcatcccgccgccgggcgtgcgtggggcaaaatcagctcagctaattgggtaaagcgaccgctttttccggtgtgttgtgtgtgcgtggcttggctttggctttggctcgagtccgttccatcacagcaacttgccacttgctgccagtaaacaacacaaaggcgttcaccaccggctggagatgccctgccaatagcgaggagagcccctactgggtttggttcatacccgtgttatccactacagaatcccagctcgatcggcacgagccgactggtcgctacacttgccgacttgcgtagggaggagtcctcttccagttgtcttgccctgccacagcccacaggagattcactgggctgtttgcgatggcagagttagccacggcaacgtacaaaaccagctcttgctaaggggaaaaatcacaaaattattgttgcgtctcccttttactactgtttgctgctgctgtggtggtctggataattgggcatctaaacgaaggcttgtgttcctcgctggcacaaccgagaactcatcgtcatccaatctgcagcaccaaaccttacccaggaccaggagtaggagagagagagatggaggaataaagcagggggggcacgcagcgcacggagggagagccggagggagatcaaaaggaaggaggcaaagctttgcttctgagagagggagagccggagagcgaagagaagcaggccaacccacccccacccctgcactgcacacacaatccccccatggcctctgctccagctgctgctatataagcgcgacccggacggctctgcttccccagtagtcctctcctctcctcccatccatgcttcggtccacgcacccacccagccccaccagcggcagctccgcggcgccggcgtccagctccgacgccgcggcgatggtcgggggcggcgcggcggcgggcagcggcggcgcaccgagcggcgccaagctgctgcagatcctcaacgtgcgggtcgtgggcagcggcgaccgcgtggtggtgctgtcccacgggttcggcacggaccagtcggcgtggagccgcgtgctcccctacctcacccgcgaccaccgcgtggtgctctacgacctcgtctgcgccggcagcgtcaacccggagcacttcgacttccgccgctacgacacgctcgactcgtacgtcgacgacctcctcgccatcctcgacgcgctccgcatcgcgcgctgcgccttcgtcggccactccgtctccgccatgatcggcatcctcgcctccatccgccgccccgagctcttcgccaagctcgtactcatcggcgcgtcgcccaggtatgccgccgtatgcgtatgaatatgatgccgaccgaatccatccatccatcccgattcgatcaacccaacctctggaagcaatttgagtttgttttaaaattccgggcacaggttcctgaacgaccacgactaccacggcgggttcgagctgccggagatccagcaggtgttcgacgcgatggcggccaactactcggcgtgggcgaccgggtacgccccgctggcggtgggcgcggacgtgccggcggcggtgcaggagttcagccgcaccctgttcaacatgcggccggacatctccctccacgtgtgccgcaccgtgttcaacaccgacctccgcggcgtgctgggcatggtgcggtccccctgcgtggtggtgcagaccacccgcgacgtctccgtcccggcctccgtcgccgcctacctcaaggcccacctcggcggccgcaccgccgtcgagttcctccagaccgagggccacctcccgcacctcagcgcccccggcctcctcgcgcaggtgctccgccgcgcgctcgcccggtactagcggagcgcctgccacctacggtcctggtggtcatcggtattttttaccgcctcgatttaccccgtgccgagaccggggacggggatcagataatgtggcgacccgcgccgtttgctgtgcgcgccatgactgtagactgtagtacgagtgtacgacttgttctggacttctggtacccgatttttttactgctttttaatggagagccgagcagtagcactggtactccgcatcttgccctcttctcctgcacctccacccaggtcctggtgggcctgctcgcgacacgtggcgagtactcgaggcggtgcacgagctcggtccagattcgccttcgccttgtcctacctgctacctttgttattttactgctggtagtttactgctatgagaatatgagatagggatcagccgccgccccgtcggatattctgactttgattaagcgggtagtaatggattggtttggttggcatca

SEQ ID NO: 91903 - DNA, 2347 bp, Zea Mays
ttcttatccgctgctggggtgtgggtgcgcctcgtcgtcggcgacctttctcacacccagcggagacgacccattccgattggcggagggagctctcgtccaatgggtcgcgggctcgcggcgccatgggattcacgcatcccgccgccgggcgtgcgtggggcaaaatcagctcagctaattgggtaaagcgaccgctttttccggtgtgttgtgtgtgcgtggcttggctttggctttggctcgagtccgttccatcacagcaacttgccacttgctgccagtaaacaacacaaaggcgttcaccaccggctggagatgccctgccaatagcgaggagagcccctactgggtttggttcatacccgtgttatccactacagaatcccagctcgatcggcacgagccgactggtcgctacacttgccgacttgcgtagggaggagtcctcttccagttgtcttgccctgccacagcccacaggagattcactgggctgtttgcgatggcagagttagccacggcaacgtacaaaaccagctcttgctaaggggaaaaatcacaaaattattgttgcgtctcccttttactactgtttgctgctgctgtggtggtctggataattgggcatctaaacgaaggcttgtgttcctcgctggcacaaccgagaactcatcgtcatccaatctgcagcaccaaaccttacccaggaccaggagtaggagagagagagatggaggaataaagcagggggggcacgcagcgcacggagggagagccggagggagatcaaaaggaaggaggcaaagctttgcttctgagagagggagagccggagagcgaagagaagcaggccaacccacccccacccctgcactgcacacacaatccccccatggcctctgctccagctgctgctatataagcgcgacccggacggctctgcttccccagtagtcctctcctctcctcccatccatgcttcggtccacgcacccacccagccccaccagcggcagctccgcggcgccggcgtccagctccgacgccgcggcgatggtcgggggcggcgcggcggcgggcagcggcggcgcaccgagcggcgccaagctgctgcagatcctcaacgtgcgggtcgtgggcagcggcgaccgcgtggtggtgctgtcccacgggttcggcacggaccagtcggcgtggagccgcgtgctcccctacctcacccgcgaccaccgcgtggtgctctacgacctcgtctgcgccggcagcgtcaacccggagcacttcgacttccgccgctacgacacgctcgactcgtacgtcgacgacctcctcgccatcctcgacgcgctccgcatcgcgcgctgcgccttcgtcggccactccgtctccgccatgatcggcatcctcgcctccatccgccgccccgagctcttcgccaagctcgtactcatcggcgcgtcgcccaggttcctgaacgaccacgactaccacggcgggttcgagctgccggagatccagcaggtgttcgacgcgatggcggccaactactcggcgtgggcgaccgggtacgccccgctggcggtgggcgcggacgtgccggcggcggtgcaggagttcagccgcaccctgttcaacatgcggccggacatctccctccacgtgtgccgcaccgtgttcaacaccgacctccgcggcgtgctgggcatggtgcggtccccctgcgtggtggtgcagaccacccgcgacgtctccgtcccggcctccgtcgccgcctacctcaaggcccacctcggcggccgcaccgccgtcgagttcctccagaccgagggccacctcccgcacctcagcgcccccggcctcctcgcgcaggtgctccgccgcgcgctcgcccggtactagcggagcgcctgccacctacggtcctggtggtcatcggtattttttaccgcctcgatttaccccgtgccgagaccggggacggggatcagataatgtggcgacccgcgccgtttgctgtgcgcgccatgactgtagactgtagtacgagtgtacgacttgttctggacttctggtacccgatttttttactgctttttaatggagagccgagcagtagcactggtactccgcatcttgccctcttctcctgcacctccacccaggtcctggtgggcctgctcgcgacacgtggcgagtactcgaggcggtgcacgagctcggtccagattcgccttcgccttgtcctacctgctacctttgttattttactgctggtagtttactgctatgagaatatgagatagggatcagccgccgccccgtcggatattctgactttgattaa

SEQ ID NO: 91904 - DNA, 6138 bp, Zea Mays
atggagacggctgccgcgaccgcgaggcccggcgcagcgaggaagcggcggtggaaccaatcgcagccttgccaaggggagggtccgagcgatctcaagttcgctagacttcgcttcgacggcgacggcggcgccaagggcgcgtgggaacacctcgacctcgtcctctccctccagagcaaggagctgtcgctcgaaagaaagattgagctagcggtcgaatttctaaccacactgccaaataactcaagctgcagcattcagctattgcggctggtgtcatttattggaaactggttgcagtctatcttaaattttcctgagaatagtaaaaagattctacatatttttgatccagcattggatagtagatgctgggcaattttgagagtgtgtgttgaaaagaaaccatccatttcaatatctctgaacttacttaaatcccttagtcgagttgcaagtcatggtttgggcagagttgatagcaacacatcatgtcctgacaatgaatctattgagctctttgaacaagtgtttgactgcatgtcattgcttttctcttccaatacaagagctttcttcaacgctggtgtggatttatgggcctcttgtgccattgaggttgtcaatcttgctcagaaggtgtcagctaaaaaggacaatttttgccctgttcttcagaagcttgcaaattgcctcctcgggcaattcgcatgcttcctgagattttatgcaaatccgaagaatattttccatgcttttgttgataaggttcttgggccattgttggaattgttagttttacttaattcacaagcacattccagtgaacacaagcagacaggaacaatgttgaaaattgttgaagatgttttttcaaatggactgtttcatccccaacatcttagtggatatttcggtctcaggagtttgaataaatcttctgctgctaaggatatcaaaggaagctaccatagacatctatttcagcgattcaaaggaataaaaacagaaaacaaggctgtattgctggctgggtttggctacttgtttcaattgtttgttaggagggctagaaatcaaagaacaactgtagcaccaagtagaacgactttgggtacgctgcacaaaagcaatgatggttctgaagaaccacaacatagggaatcactttttgaagtgtttattatgttcatggaacccatcgtattagagtgtaaatcgtattcccaaaaggacttctctaagttaggggtgacaaggctagtagaggtccattgcatgctgaaatccattaatgtgatgctgataacccttattgaagagaagatctatgttcctacagaggacacattggaaggatctcacttcaattttttgcaagatatttactctgtcttgatcttaatatctgaaaagatgtacaaattctggatgtctgctgtgcatctagaagatgtaaacattaagaagatagtacctttaatgtttgcagagattatttctgcagttggcaattttctagaaatcgagtacaaagttctaggagacgaccttgtgaaattgtggttaatgatttttgctttgtctgctattaatacatcttccaaggacatcgaaccctgttttctgcttgcttcaaagatttcaagcctctcagcccaagtgatttgcacattcagtgaacttcgtcaggtttcccgctcaattttcagtctgtgtgatgctgtgagggcattcagagttgagggccctgatggagtacatggctcattttctgtggcctctttatcgtcccaggagtgtttgggatcattgacaacactgttgagttccgaaacattgatgggtgctattcgcacttcaattaagtcgatgcctcaaggccagtctagccgatgtatagaggagcttacatcggatctcacagaaacattgaattggatggcagattgcagttttgaagatgatgtaagcaaactcagagagccatccattgccaggaagtctattttttgtcagaaagccgaacttcttggcagacacttatctgaagtatatgctagcattcttgattcaataactgtcactgtttcaaatagtacactggtaggaaaatctgttgaaaggttggtcaatgcagtccggcgaaatttcagtcacttggtcagaaacaaatcaaaaaatataaatggatttatttcttcaattatgggaaaaaatgtatctaaaaaactacatgccaaccggcagaagatcccaagtttttcctggattttttgcctattctgtcgcctatatatatcatgtagaagcttgtatcagcaatctattggcctcatgcctccagatgtagccatagatgcaacaaagttagtggggaatccattcattgtatgttcaggaaaggaatggaccaatccgacgaatattcttgggaagggttattttgcattgatcgatgaaaattcaaactcccttttggatgttattgagagtttatcagagtctctctcaacaaactgtgcttcttttgctccacttgtttacatcttccatgtcatggttctgcagagactcaatgaccttaacaggcagattaaggcatttcaatttttgcttgaagatgatgcttggcaaatagataataaggatataggaaacactcgactgttaaaggaatcttgcagtctggaggctgctaaattgatgagttttgtgatgaattatagatcttccctggacaaggagaataatggcactcaatcttcgggcagagaaatgactttgcatagtgtctctattggagtcctttgtgatacaattatttatgaaaaaaaggtaattttgaagaatctggcatcaagtttttgtcatgctttgaagaaatcgttttcttttgttaccaactctgatggagataatgtctttttggacacttcacctgatttgatggagacaataagtaacctggaaaatgagaagttgattggtacaggttctggtgctacgcatgcgcactgcttagacaaacactggatctgtgaggatttccttaatttttttagtgctgttcctggatttcatgcaaattccaaggcattcatacggcttataaactatattctccatcttgaaagactgctgctgcttaaattgctaggtcttcgttgtgaatcctgcaatcccatgaagttactgcgtttgtttatatgttgtcgtagggctctgataaatctcatcttgaaattcgggaaagagtgcccagaggcaaggcaatacttgtccttttcaaataaaaatggtaactcatattccctggtttggtttttgagatctgttcaggaaattgttggttcatcacataaaatatttgacgagtgtactgatgaggtgaataggttgatgttctccttgttagataagacatcagaattattttctacactagctagtttgaattcatcagtttacttgtttgatttaaagaaacaaattgaatcttcccttgatggtagtcctattaaaaaggagacttcagaacataatgaccaggcatttgatatagtagaagtatcagccttagagtgtgtcagaagtatggctgaattgttgcagaagactgcaactgggatacctgttaccataaaggacagcaagtgtgttatcaaaatagaagactgccgtaacactgtatgttggaaaagattgtcatgcagcatgtcttgcataggaggatttttgcagggacttaattcagcattagaaagcacattcaatgatcacccaatagcaagcccagaggacaggaagatgttgcttcagtattgctcaagatttagcagttatgtcgctaagtttgggacctttgtagatatttgtgttcatgtcttgtttatggataacaaagattctgcctctatagatttagtctctgttcatcttccacaagagctagattgtgcgaatggttttctgaatattgaagcaatcatggatgaattgacaaagtgtggaagtcatggagttgatctgtctaagatacagtacatggaaaatgttcttctggaaaacctgttgaaaggtgaatgcccactcatatcattcactttgagagagatatacagtatatctgctgctatcattaaatttcatggttacctatccttttcaagtgatgtttctaggcagacttgcagccctgtcgaacagctttcattgggtaccatgcttgggatagctttcatcactctacagaaagttgcagacatgtctagctggccacacatgttttgtcttgtatggattgatggggtattaagatatcttgaagtcttaggaagtgcatttacattgtctgagctcaatatttcaatagaactgtatactcagattataaatgctttattgagggctgttggtaaatgcatcttacttcaacagaagaatgctactctccctactcatgagattggctcaagcacgaaaacactgcaattacagaatgcatctggttatgcttttcctaaagatttcattgatacacagaatagattaaattcattgaaatcgaggcttcgactagtacttggaaaatttgtcagtattgcatcaaacacacatctaaatgcagctctacaagtaattgaaagggcattggttggagtgaatcattgcagtcattcaatataccaaatttacactggaaatcctgatggtgggacagtttcttctgatgttgctgctgggatcgactgcctctatatgattcttgattttgtgccaggaaacaagcgcgtttttaagaggactgtccctggcctagttggtgctttattcaacattatactacaccttcagagtccacatattttctatagtcagaacctgccacctcaaggtagtgtgttccatccagatgctggagccactgttctaatgtgtgttgaggttatcacttcatttgtgggaagacattcttttcaaattgatgcatcccatgtttcccagtgtctgcttgttcctgtgacactcttcaaagagtttaaacatcttctagcaaagtactgcaaccaaagtgtacaacaccatggagatcatgctgaatatattcttgacagacaattttcagttgatatctatgctgcatgttgcaaattgttatgcactactcttcggcaccaacaacgtgagattgggtggtgtgtggccctcctggaggattcagtaagcatactgctcggttgtttggagtccacagattcgaagatgattaacgtagctggatattttgcttggaatatggaagaggcactaaaatgtgcttcctttttcagaaggatctatgaagagatgcgccagcagagagaaaccctaggaaaacatgccatgcactttcttgctggttatatttccatgttttctggacagggtccttttcagacagggataacacgagaaattgatgaggtcctgagacctggtgtgtattccctgattgatatatgcgaggaaagtgattttcaacagctccacacatacctgggtgagggtccatgccgaaccactcttgctgatctggtgcgtgattataaattacacttccagtatcagggcaagatctaagccagcctgttctttatttttgaacaactggcgtttatcctgtcacgtctggttagaaaatctatgaagtaccatcttctggatgatcttgtgttttgggtggactaattttggcctaatggctgcttaccgacttatcaaggagacatggtggctaataaagatttaaggcttgtgaaatcaacttcataggatctacagctgcctcgtgctgttctgcaagttgacctggacacctggtaatatcaagtagatatcgacatttaattccagggtaatgtagaacatgcatgcttacccttgaataagtgatatttgaagccttatcacttgaatataattccttttccaggttttcctggtacttaacaacagcaaaaataggacggttagtatcaagtggtgtttggctaccttgtaagagatttactgattaaaacattgtaatgctaaagcttgaatagatcataattgaggaaagagaattatctagtgtcctggtgaagttctgcc

SEQ ID NO: 91905 - DNA, 2258 bp, Zea Mays
tgatcattgtggtttatggttcacattggaatttatgtgttgttcgtgcttgatgaattttctccaaaggaacaagggagacaatgagaggcgatgttgaagctatcgatcccgggaataaagctgctgcggaaccggtgggagatgtagctgcgctatcgtcaaggctggctaggaggctactacatggatcatggtgccctcctcggtgccaggggatatgcttggatcagagtaggggtaggtgagggtgaggattgtccatttatcgcctacaatttcttcaataccattgatatttaagtcatctcatcgagcttctttatatattattccgcaacttaatctattttcttgtcccaaaaatcatcaccacatctagttaccttatgttgttttgatttgttggtcgctgctccttggagaacattcatgctatggacacaaactcaggtggacgtggtgttcgacaattcaaaacatacctattacatatattggaaaaggaaaccccaggcgtttcaaagttagagtttcacagcttgcagcgaatttgggttctttttaatttgttgctttagtattgaattaacgtatgatcattgtggtttatggttcgcattggaatttatgtgttgttcgtgcttgatgaattttctccaaaagaacaagggagacaataagaggtgtgtaatatgaactctacctaatgccttgttgctctacaaaatgtcccatatgtattcttctgtactctaatcttgtttgttgttgttggtcatccttatactttcccccactattgcaaggcgatgttgaagctgccgatcccgggaataaagctgctgcggaaccggtgggagatgtagctgctgcggaacacgaaaggtattatgccaatctgtttttgcttttcctaatatatatgaacatggatgaatcacaagcaacttcctaatatatatgaacgcaaatgaagttttgcattatttaagttttaatcaaggaaatggtccaagggtgcatcactggaataagctcgagaccacaagtgtcatatctcctctaatctttactctctcaggtatatgcatgcttggcattgtcttaatttatttatcacttctaaactaagaatacgttaagctcttcatattttgttgtttatcctaatttgtctccattcggcttcatagtctggtgtctatcagaagctactcctttctacttaaaaggtttcagccatggctgtgctgaatttgcaatggtaggttccagttgaatatgttcattgctacaatgaagccgttttgttgtttgctgtccgccgccgtattcggggtcttcgcctgcctctatgggctcagggcggacaggggcctacaagatctcctcgggccaaggaatcgttcccctccggcgacctccctcctccctttcgtctcaggccttccactgtatctccatcaaagcgaaggatcagaggctactccgttaggaggagaggaaaggaattgtgagccttgtgttggagaagtcgaagactgagagtatatggtggctccattggtgtccatgttaatggctggcgtgttctagagcaactcggggttgtcgtagagcttagggagacttgccaaccttagggagacttgccaaccttgtcatcgcgtaccatgccaacagaatgcttagcttttacgcaccagcgcgtgacgccatgtgggagcaaagttgggaaaatggatattggcggtggtcgagaggtcactcttattggaagtctagaaatgccaaaggatgacatatggcttgtcacagctatcctatctggtctgattgaataatgtgcgaagatataagtcatatatttcttggcctcctatcttcgcctcaggcagctgggagtggttttatactcgctgatgacatcaagtcttaggtgcttccattgatcaataactcagggaaatatggagggatcatgatgtggttcaagtactatgatgatcaagatggctacaattcttgagtgaagagtgatgtttaggttgttgcctgtggtgtgtcacaatatctgtgtgttacttgtgtgtatgtgagaaattatgtgactctggagtctggatagtgcaataagtattactcaagtatatgattgaatcttctgtcatactattcaaattatgtcatattgtatcttttaaggtatgtaaacatccacttttagcgatgctaacaaaagaatagaacaacaa

SEQ ID NO: 91906 - DNA, 1572 bp, Zea Mays
gggtaaggggtcccgtgtttctctgacagctgggccccgcgttactcttgcctccaggccttccgggagtttggcgacccgtctcgggctcttgtgggggctagggtttaggcactaagcggcggccggcggcggcggggaggatggcggaggcggtcgtgaggtgcctccgggacggacggctcgacggcgagcacgcgccggcactggctgtggagggatcactcaagtgctgcccgctcgcggcgggtgcgatgctccacatcgcggccgcattcgcctcccaggtcgccgcagggaaggcgcaggccaggggactggtggttgtggcgtttgatcggagcccacaggtgtacctggaattcatgcgccgccgcaaccttgacgcaaatgctttggaccgatgtgttagaatattggattgctactctgacccacttggatggaagcagaagattcaaaatcagcagcatcaagggaacagtgcaaagcagttctcaacaaataaagataatattactgtttatagaagtgtgaaggatgttacaaaattgatgtcctccactactgaacttggaggaggttttgaaggagaaggcaaaacatatttttctgtggctgttgactcaattagctccatgttaaggcatgcttcagtgtcatcaatttcaggccttcttagtaaccttcgaagccatgaacaagtatcatcaatcttttggatgatacattcagacctccatgagcccaaggtaccccgagcatttgaatgtctttctactatggttgcttgtgtggagccagcacttgtggatcctgtttgtggagagagtccgggaaacatgtctatccttgagcaaaattattcaaaagcaaaatttattgttcgccttaaacgacgaaatggacgggtgaagcacctttacgagaacctgtatattgaggggaatgatatcaaatttgattcggctccttctgtaagtatagaagtgaaccaaagtctagtgcctaaggttcagttcaatcttgagctgtcagagaaggagcgtagcgacagggcaaatgttgttcttcctttcgaacatcaaggaaatggccaaccaattcatatatatgatggtcgccggtccctacctgaggctcaacgtgaccccaatttaactgcaccgccccttgtggatgaagtaaaaaatcccaaatctggaactgcaaagggtgaaatacattacttccgtgattcagatgacgagcaacctgactcggatgaagatccagatgatgatttggacatataagagtgtaggtgctctttacttcagtaggtggcatgtgcacatgaattttaaggtataggttgagaactgctatcttttgtaggttaatccttttttagcgctcccatgctttaccttgtcaatcgtagttgcaaaaaaacttgaagcgctaaaattaatgacttgtattacttattttagagtatatttgcacaaaacaaccttgctagaatcttgataaaacccaaagaatttggtgtttatatctgtttaattacatggaatgtttgccttgcca

SEQ ID NO: 91907 - DNA, 345 bp, Zea Mays
atggatgaggtgctccatacggaggtggagcatatggagcataaggaggtactccatacggaggtggagcatatgaaggaggggcgtatggaggtatctggaaagaagcttgacttccgtccacagcaggtgggggaggggcatacggacgtaccgggaatgaggcttgaattccggcttgggaagttggaggttgaccatatgaagacggtggatattgatacaaatgatagggataagggtatggtggtggacgcgcagccggaaatagtgcacggaggagtgaggctgaaacatcggagcgacgatgtagtgaagaagactcatctaacggaagggttgtag

SEQ ID NO: 91908 - DNA, 2729 bp, Zea Mays
gtttctttcattgggctcaggacaaggaggtcagcggcccaccaatgaaatgcaatctcgctctaactcgtgcttggatgggcctccgttgagcccaccaagttctcgtctcccatggccttctcttcgattcttcctcttccctccgcctgccgcgccgtcaagcaacgccgcctccggtccccatggacaccaccacaccttccacttccgtctcgccggcggccgcatccgcccccgccccctactcggactcagctcttgtctcggccgtggctgacgcgcttgtctccgcctcgtgccagtcctcgccgccacccatggacaccctcctggccccgtacctcccgcgcctcacctcctcgcaccacccgcaagtgatcgcccttgccgccgccaacccatcactcgcctctccgcacactctcctcgcctaccgccgcctcttttctcctccgtcctgtctcccatccctactcccgctcctctccattctcccctaccgcaacctcctcccaacccttctcgacttcgtcccgctcgacccattgcgccacctccaccgccacctccttgctagcttccctacaagtgcgctcgccgacgcggcgctctccacgtacgcccgcctacgcctcccccacctcgccgcacaactcctccactcattccgccgccgcgggtgcgtccgcccctccctccaggcagccaacgccgtgctctccgcactcgcgcgcagtccgtccacctcgccgcaggcctctcttgatgccttccactcccttatcgccctgcggctccaccccaatcactacaccttcaacctcctggtgcacacccactgctccaaaggcacccttgccgacgccctctccacgctgtccaaaatgcagggtttcggcctctccccagatgccgtcacctacaacaccctcctcaacgctcattgtcgcaagggtatgctcggtgaagcgcggacgctgctggccaggatgaagaaggagggtatcgtgcccaccagggccacgtacaatacccttgtctcagcgtacgcgaggcttgggtggatcaagcaggcgaccgatgttgtggaagccatgacggcattcggtttcgagcctgacctgtggacatacaatgtgctcgctgcagggctgtgccaggcagggaaggtggacgaggcatttaagctgaaggatgagatggagcagcttggcatagtatcgcctgacgtagtcacctacaatacccttgttgatgcatgcttcaagtgtcagcgctcttctgatgcactgaatctgctcgaggaaatgcgtgagaaaggggtgaagtcaagtttggtcacacataacattattgtgaagggcctttgcagggaggggcaattggaagaggcgttggggcgtctggaaatgatgacagaggagggattgacaccggatgtgattacatacaatacattgattgatgcatcctgcaaagccggaaatgttgccaaagcatttgtgttgatggatgagatggtgagaagtggactcaaaatggacactttcaccctaaacactttgctatataacctatgcaaagagaaacgttacgaagaggctgaggagctcttgcgtgcaccgccgcagaggggctttgtacctgacgaagtcagctatggtacagtgatggcagcctactttaaggagtataaaccagagcctgctctgtgtctgtgggatgaaatgatcaagaggaagttaacgcctagtatttctacttacaacacattgatcaaagggctttctacaatggggaagttgacagaggcgattgacaaattgaatgagctgatggagatggggttggtaccagacgacaccacctacaatatcatcattcatgcctactgtaaggaaggggacttggagaaagctttccagttccacaacaagatggtggagaattcttttaagccagatgttgttacctgcaacactttaatgaatgggctttgtctgtatggaaggcttgagaaagcgatgaagctttttgagtcatgggtagaaaaagggaagaaggttgatgttatcacatataacaccttaattcaagctttgtgcaaagataatgatgtcgatacagctttgcgtttctttgctgatatggaggtcagaggcttgcagcctgatgtatttacatacaatgtcctgttgtctgcactgtctgaggcaggacgatcagtggaagcacaaaaaatgctgcataaattaaatgagagcggaaaattatatggaagatttttttatccttcaataaaatcctctgtggaggcagtcgagacagggaaggacccagaggttaaatctgacattgaatctgttggaaacacacaaggtgatgatcaggagagctataataaatatataaaggaactctgcattggtgggcaactgaaagaagccaaggctgttttggatgagatgatgcaaaagggcatgtctgttgacaattcaacttatatcactttaatggaaggccttatcaaaaggcaaaagaggcaaacacatgcagctggataggatatggctgagttttgctgctctgatatgtgacattgtccatggttttgccataacttcatcagttggtcataaactgactaggtatattttctggtcctcggagaacaaccataacaacattttgaatttggattcctagtcaaattcgagtcccctaga

SEQ ID NO: 91909 - DNA, 813 bp, Zea Mays
atgcggcgtgctgtcaccccatcgtcccatatttcctccgccgacgatccgaaggcttccacgttcgcggtggacgactgggtcatcaccgtccgcgaggtgttcggccccgtgcccactcatgaggaatccatggctgccacgctcgacctcaaggacgccttcgagatcacaatggaagcttctgaggctatcatgatatgtcccagaaacgaatggcccaagaaatatgttgtatatggtatgtctaagaaggaagataacaacgaaaatttagtcgtctcatccggaacttctggacgtgttgtgcaagcattcacattgctacaggagagccctgaagctcaggttgttgtggcctcacttgcttctgataagaatgtctgggatgctgtgatgaagaacgaaaaggttatcaagttctacaagacatatgagtcaaattacttgagtaacacatcttattgccttcctacagagcttagcaagtgttctagtgttgcttcaagtgtgtcggggcatgaggtggaggatggtgaggcagctagcctgcaaagcaacacttacctccctcaaagcgctggtgaatcagtcaaggattatttggagaaaatgaaggccctggtgtccgagatgatggccaatctatcaaacattatgcaagatcttgtcgcaacctctgacgagggccgtagcaagggggagatcaagaccctgacaacgagctcctgcaaagacttttcgaatgcgccctctgcctttgtgctcctggctgttgcgtcgatcatggtagttttgcttaagcgcgtttag

SEQ ID NO: 91910 - DNA, 2532 bp, Zea Mays
cgagagtcgagacgagtacggacgtaacccaacggaaggcacgctgcgcgggcacaagccaggtgtccgagtgcccctccactctactctcacgccgtacccaccacaatgtgacgggcgacctttccagagcaacgccgcagttcgcgaactgttcgcaaggaaggcagccacccagccataccaattaccaaaccactcatcaggtcgcgttgccagccgctcaagccaagacagccccactaatctccctgggatcgcggctcgggctaagctaatcggggcgccccaaccatctctcgccaagatctcgacaaggactagcccatgcgcgtgtcaactggagtagttaagcggcgccatgggtatgcggagcaggcacccaaaggcgttgggtttccgctggtacccggcggcaacccaccggtccctaactctggtactgtggagcctagcggcattggtcgtcgttgtgaatttccatcttctcatcattcataaggaggagggtgagaatatgagtacacacgagatccgccgatcgattatgagggaactggaagtggtggaggaggagaagttccggctagctcctccccggagccggaggaatccccgggctgtgcgccgcaagggagagaagaagtcgcctacaatagtggatgagttcttggatgagtcttctgcagtgcatgatatgttcttcccagaactgaacacggctgtggatccaatcaatggtggaaatgacagcatgtacttctactacccaggaagaatttggttggacactgatggaaaaccaattcaagctcatggaggaggtgtcctgtatgataagaggaccaacacctatttctggtacggggagaacaaggatggcaaaacctacaaagctcacagcaagggagcagacagggttgacatcattggagtaagttgctattcttcgaaggacctgtgggcatggaaaaatgaagggcttgtcctccgtggtgagaagaatggaacacatgatcttcacaaatccaatgtcctagagaggcccaaggtgatatacaatgatcggactggcaaatatgtgatgtggatgcacatagatgatgcgaactacaccaaagcttcagttggtgtggccgtcagtgactctccgacaggcccattcacttatctctacagcaagcgtccacatgactgtgagagtagagacatgaccatcttcaaggatgatgatgggaaggcctacctgatatactcttctgaggacaacagcgagctccacattggtccgctaactgacgactaccttgatgtcactgatgtgatgcgaaggcttctcatcgcacagcatcgagaagctcctgcgctcttcaagcatgaaggcacctactatatggtaacgtctggctgcacaggctgggctccaaacactgcgctggctcacgcagcaacatcagtgatgggaccttgggagacgctggggaatccttgtgtgggagggaacgaggtcttcagatcaacaacgttcttctcccagagcacatttgtcttgccggttccagggctgccgggctcattcatcttcatggctgatcggtggaacccatccgatcttagagattcgcggtatgtctggctgcctctgacgatagggggagtccctgatgaagccgcagactatagcttcatgttccctctctggtcccgggtgtccatctactggcacaaacggtggcgtctccctgaggagtggagggattcttgaaaaatctgaagttcttttagaataattcaagatgtggtacattgatagataccaaagtatcgacatacgacacgtcggtctacactgtataggtcagatgtagatgcagggtttgtaaatgtgcagtttttggagtttgcactgaaatcagataaaactttgtggccttttgggcgaggtgttgtggcgatccactcgtcttactttcaagaataatctgcttgcccattcagcattggtcttaccgtttgatctagttggaaatgtgtgctgacggctatgtaacctgattcagggtctcatgatcatttggtcattctttgtgcatctgaatgtcacgcctggtgtgccggcctagctacaggtccaaggggtgacaggagacggagtgctctgctggagagttttgtctaaggtggtgtgtgatggcttcaagtttcagtttcagtgtggagctgtagtttataatatcaatttaaatattttttaaaaaataatctaaataataaataaaatgacttatctaaatgtttttaaatatcttctaaaggtttacagcttcacgattttctggagcacctaatgacctgcttcactaactctaccaaattttctggaactagagcggtccagctatcctaaacagtgcctaaatatttcatagtttgttttggcacctgtatgggctcattgtaagagagttaaactctgctatataagggagaactaagaagaaaaggagaatacaaataccgtgaccaacttct

SEQ ID NO: 91911 - DNA, 1410 bp, Zea Mays
cgagagtcgagacgagtacggacgtaacccaacggaaggcacgctgcgcgggcacaagccaggtgtccgagtgcccctccactctactctcacgccgtacccaccacaatgtgacgggcgacctttccagagcaacgccgcagttcgcgaactgttcgcaaggaaggcagccacccagccataccaattaccaaaccactcatcaggtcgcgttgccagccgctcaagccaagacagccccactaatctccctgggatcgcggctcgggctaagctaatcggggcgccccaaccatctctcgccaagatctcgacaaggactagcccatggttgacatcattggagtaagttgctattcttcgaaggacctgtgggcatggaaaaatgaagggcttgtcctccgtggtgagaagaatggaacacatgatcttcacaaatccaatgtcctagagaggcccaaggtgatatacaatgatcggactggcaaatatgtgatgtggatgcacatagatgatgcgaactacaccaaagcttcagttggtgtggccgtcagtgactctccgacaggcccattcacttatctctacagcaagcgtccacatgactgtgagagtagagacatgaccatcttcaaggatgatgatgggaaggcctacctgatatactcttctgaggacaacagcgagctccacattggtccgctaactgacgactaccttgatgtcactgatgtgatgcgaaggcttctcatcgcacagcatcgagaagctcctgcgctcttcaagcatgaaggcacctactatatggtaacgtctggctgcacaggctgggctccaaacactgcgctggctcacgcagcaacatcagtgatgggaccttgggagacgctggggaatccttgtgtgggagggaacgaggtcttcagatcaacaacgttcttctcccagagcacatttgtcttgccggttccagggctgccgggctcattcatcttcatggctgatcggtggaacccatccgatcttagagattcgcggtatgtctggctgcctctgacgatagggggagtccctgatgaagccgcagactatagcttcatgttccctctctggtcccgggtgtccatctactggcacaaacggtggcgtctccctgaggagtggagggattcttgaaaaatctgaagttcttttagaataattcaagatgtggtacattgatagataccaaagtatcgacatacgacacgtcggtctacactgtataggtcagatgtagatgcagggtttgtaaatgtgcagtttttggagtttgcactgaaatcagataaaactttgtggccttttgggcgaggtgttgtggcgatccactcgtcttactttcaagaataatctgcttgcccattcagc

SEQ ID NO: 91912 - DNA, 762 bp, Zea Mays
cgagagtcgagacgagtacggacgtaacccaacggaaggcacgctgcgcgggcacaagccaggtgtccgagtgcccctccactctactctcacgccgtacccaccacaatgtgacgggcgacctttccagagcaacgccgcagttcgcgaactgttcgcaaggaaggcagccacccagccataccaattaccaaaccactcatcaggtcgcgttgccagccgctcaagccaagacagccccactaatctccctgggatcgcggctcgggctaagctaatcggggcgccccaaccatctctcgccaagatctcgacaaggactagcccatggtgagctgcgccgattttaatatctgctagcttctgaaattgttctattgttgtattctacagctagctggtagcaggtttgttttagtttagattagctttcatttgtcctcttcgcttctctggatcaacctgccatggtgagcatcgctttctctccatcttctccttttcgcctcttcatttttcttttcctgataagtttgtgtgtggttcctgctgaattatctggtctccgtacgaatctatgcctgagcatgatgagctgtgttactggattgttgatacagttctccattttggttgcttcattttttgcggcggccagggagcgggtagtccggtagtaggccatgattaatagctgttaaggttgcctgcctctttcctttagtagttccctgacttgagtgtagaacacgaatctgggtt

SEQ ID NO: 91913 - DNA, 1161 bp, Zea Mays
atggcgaggtttgcgctcgtggcgtgcgccgctgccacggcggcgctgctgctcggcgtggcggcagcggacgtggcgtcgatcatcacgcaggacgtgtacaaccagatgctgcccaaacgcgacaacacgcagtgccccgccaacggcttctacacctacgacgccttcatctacgccttctgcacgggatacgaatatacgatccacacggaaatccctgtcggagtccgaggccgcacagaaatcccggtcggagtccgagagaccgcacgggatacgatcccatacctaccaacattgcctcaatataaaggcatgagtatcagatcatcagagatcacaaagagatcaacactagctctaccaatgtctcggttcgcttttgtcctacgtcttaccgtagcaccgagcgcgaggacaataacgacggcgccgccgtgtccgcacgtccaggagctgtttggcgacgagcatcatccacggaatatggtcgacaacatggttctgatcatcatagaccaaaccctgaccgacaccttctacggtggcgggggccaagatcaaacgaatgccacctcggcggagcagagcagcaccttgcagtaccaccttgctcgctcgaccatcaccgcctcgccgagcacgcttcacctagcacgagtcgacggcaggggacggggggaatattgggcgtgcacggacgttcgaccggacgtcgccaacaagggcatcctcggggtgctggagacgaccaatgcacgtctcgacgcggcgatccagttggaggccacgttgctcaatatggcgaaggaaagcggctactggagccctaaggtcagggagatcgccgaggtgcacatggcgttagtgaagatgagagcggcgaccgacatcgacgcgatcatgcgccaccgtcggtgcctccagaatcgtcgcctcctcatccaagattacatcacttgccgaccggatgcggatcaggcgtgcggcgcagaggcggcgctagccaagagcttaggctcactccacatagggcggaagcgaggctaccctgtccaggagacgatgagcgaccggctgccggaatcggacgatgcggagttgctgacgaagaggttgaaggccctgcacataacacatggttattcgacttcgtag

SEQ ID NO: 91914 - DNA, 422 bp, Zea Mays
gattgagaagtctacctccagcatcttcccacttcaaaacgtcttcatccgcaaggtgaagatactcatggcccccaagtttgatctcgggaagttgatggaggttcatggcgactacaaagaggacgttggtgtgaagcttgagaggcctgtcgagggtgatgaggctatgcaggaggttgctgctgccgagtagtttatttgctacttctttatctagacgaatctggacaggaggtcccttatgacgcgaacttcataaaattgtctggcgacatgttttcttctgtccctgccctaaactctaaacccaaaggttattcgtaacaagtgttttaagattatttttgtttatgtttgggttcgagtactgctgtgtgcatgattattttttgtttggttatcgataatccagtttctca

SEQ ID NO: 91915 - DNA, 649 bp, Zea Mays
aaactgaagttctcgagcacctgcagcgccgccagacactccgtagtctgtaccccaagcaccggcgcggcggcggcggctaccatggcagtcgggaagaacaagaggatctccaagggaaagaagggtggtaagaaaaagaccgtcgatcccttctctaagaaggactggtatgacatcaaggccccatcggtcttcagtgtgcgcaacattgggaagactctcgtgtccaggacacagggtaccaggattgcctctgatggtctgaagcacagagtctttgaggtttgtctagctgatcttcagggtgacgaggatcaggcttacaggaaaatcaggctccgtgctgaagatgtgcaaggcaggaatgtgctcacaaacttctggggcatgaattttaccaccgataagctcagatctctagtaaagaagtggcagacattgattgaagcccatgttgatgtcaagacaaccgacaactacatgctgcgtttgttctgcattggttttaccaagaggcgcccaaaccaggtcaagagaacctgctatgctcaggcatcccagattcggcagattcaccgcaagatggatgagattatgatcaaccaggcttctacatgtgacctaaaagaacttgtttctaagttca

SEQ ID NO: 91916 - DNA, 1066 bp, Zea Mays
ccgcggttcattcgcccacctcatctccctctcccgccccgccttagaaaaagaacacgaggagcgcgcgtgctccccggccccgcggcaggcagacacgcatcgatgggcaactgccaggcggcggagacggcgacggtgctgatccagcacccgggcggcggccgcacggagcgcgcctactgggcgctctcggcgggggccgtcatggcggcgaacccgggccactacgtcgcggccgtcatcaccgtcccgcagccgggcggcgcgggagacgacggagctgcctctgcctctgccgccgcgcccgtgaagcacctcaagctgctccgccccgacgacacgctcctgctcggccgcgtctaccgcctcgtcagcttcgaagaggtgctgcgggagttcgcgtcgaagcggcacgtgaagctgagccgcgtgacggtccgggccaaggacgaaggcgaggacgtgaagccggcgcccaagcatcgccgccgtcgcgccagcggcggcggagagcgtaaggaatcggagcggtcactcgccaaggtcatggggcagacggaggagcagctggtgccggaggcaggcccggcctcgggccccgcccccagctcctccaagcaaggggacgccgacacgccggccggcctcgacgccgacctggaggcgctcctgcagccgcacggggcgttgctcggccgccgagccggccggcagtggaggcccgcgctgcagagcatcgccgaaggcgaagggtaaaggggggcggggcggcgggcgccaccagctcgaccgttcggtccgcggtcggtgagcagccgagctccgtcgtctccgtctccgtgcaaggtcaactgcaacttgcgaggctgacagcgtattgtaaaataagttcattgttagcgcgcccgactggtgtccagatgtgtagcggcagcagttggctaagcatagcactagactagtatagtagtatccatgcatggatttgatggtgtgtttgtaataaggtaagtagtatacggtatcgcataaaatctttatcctgttctttgtgagctcaatc

SEQ ID NO: 91917 - DNA, 2049 bp, Zea Mays
tctctctctctctcgctgctttgcttgcttcccccacccccagtcagctgagcctccgccgacctcgacgaagtggcggcagaacacgcgcagttgctgagttacggcacacaccgcagcagtgcacaccacatccacacacgcgcctggcggtggagtgacaactgacaggcatcgggttgcttccggcggtggccattgccaaccccgccccatctccttcgtcatgcgtacaagacatccccacatcgccgctcctccacctcctcctcgcctgacgtcatccccgcaccggcactgcaccacaaatccatcccccctcccctcccggcccctgcattgcatccattcttcttgcttccccgaaacctcgcgcttggtctgacctgacgcaacgcgtcctcgatccctgagataaagctcgcggcattcgcttgttccgccaaattcagtcccttgaatttcctgagctgtcgaagtttttcttctggttcgattcttcggagaccccctggcatttgtgggttccgccattgctcgctggtttgatccgtcctagttgccgaagcgcctgttgatttggttctaaaatacatcgttcgtccttccaagttcaaaaggggggaaaaggctcttctttttttggatcctgatttgagtgtgtcacctttgcttccggcaatggggaacaacagcagcagcggcggcggcaacaggcgtccggagcactcggagtcggcgctgccgcccgaggcgtcgccggcggaagagctgagctcttatgaggcagcgtgccggtcggacccggagctgcgcacgttcgacacgacgctgcagcggcgcaccagccgcgccatctcgacgctggcggtgggcgtcgaggtgcggtcgatgtcgctggactcgctccgagaggtcaccggctgcctcctcgacatgaaccaggaggtggtgcgcgtcatcctcgactgcaagaaggacatctggaagagccccgagctgttcgacctcgtcgaggattacttcgagagcagcctccagaccctcgatttctgcaccgcactcgacaagtgcctcaagcgagcccgcgactcccagcttctcctccacgtcgcgctccagcgcttcgacgacgaggaaggcagcgacgccgccgccgccgctccctccgcccggtacgcgcgcacgctgcacgagctgcgccagttcaaggcggccggggatcccttcacggacgagttcttcgccgccttccaggccgtttaccggcagcagctggccatgctggagaagctgcagcagcgcaagcaccggctcgacaagaaggtcaagaccatcaaggcgtggcgccgggtgtcaagcatcatcttcgcgaccacgttcgcggccgtgctcatctgctcggtggttgccgcggccatcgctgccccgcctgtcgctgcggcattggccgcggccgctgcagtcccgctgggatctatggggaagtggatagattctttgctgaaagggtatcaggacgcgctccgtggacagaaggaggtggtgagcgcaatgcaggttggcacgttcattgccatcaaggatttggacagtatcagagtcctcatcaaccgggtggaggtggagatcagctcaatggtagactgtgtagagtttgcggagcgggatgaggaggcggtgaaatttggggtggaggagatcaagaagaagctggaaaactttatgaagagtgtcgaagatcttggggaacaagcagaccggtgtagccgggatatccgtcgggcaaggacggtcgtgctgcaaaggatcatccggcatccaaactgaaaaataaggggaaatgtaaggtatgcatgtcttaagatataaccatgtactcttgataatgttgtgatggaatgtatataagagatggacctttaggaaagtgtgaatgagtcaaatcgatttcattatcatttgattcatggtatctgtatttccatacttgattatctctttccctcccttgttactgtgcaagattattcttggcgttactgcaat

SEQ ID NO: 91918 - DNA, 240 bp, Zea Mays
atggcacacctgctgtatgagcggctccccatatctacacgtaaaatcgttgcctcgaccctcctccgacgctcgccccgccgtgggacctccgctggcgagtcccccaccgccgagggacgtccgctggcaagcttcctacagtcgccgtggcggcacatcgacaatgggaggctggaccaggaccccagctacgagaccaacctggtgatcgtctcccacgacctcacattggattga

SEQ ID NO: 91919 - DNA, 1490 bp, Zea Mays
caccagtccaccaccccaccatcagttactactgcctgcctgcctgcctgcgtctctcctccaggtccaggctccaggaatccaccccccacctcctcggattctttccccctctccagctcccccgtcctgcagccgcctgcactgtgctgccgccccgttcgcctcccggcctccagcctcctcggttcccgcgggagggccatgaagttaaggacaaaacgacctgaatggaagtcccttgtgcctctacaactgagcagattgagcaggaaatctgccatgcgtttctttttgttccccaaggttcagtcggctggtcaatcgccagatgataccccagtttatcttaatgtgtatgatttgacgccaatgaacggttatatatattgggcaggcctgggcatatttcactcaggaattgaagttcatggtgttgaatatgcattcggagcacatgactttcccaccagtggggtctttgaggtagaacctcgccaatgccctggtttcagattcagaaaatcaatatttcttggtacaacatgcttggatccaatccaagttaggcagttcatggagctgcagtcagtaaactacaacggcgatacttaccatcttatcacgaagaactgtaaccacttctgcaaggatatgtgctacaagttgaccggtaacaaaattcccaaatgggtgaatcggctcgccagaataggcgccatttgcaactgccttctcccggagtcgcttaagatctctccggttggccatgacccaaacagtcaatccgaagactcggagaagaggcgtctgaggaacccattcagctgcttctcttcgatctcgagccaccggcagctgccgtcgtcatctcctttcccaccatctcctgtgaaagggggcctcccccgttgctcgtcgaggaaaagcagcacggcgtctccgaaaaataggtagcctgccctggggcgcgcccctgcgtaacttccgagtcgtcgtgctaattcctgcggtgtcaacatctggatccgcacggcgagtgctgtgctgtgctgcgctgtagctttctgtcaggtacttgttttttggtcggtaaaaatcagatgcctgatgttgtatcatgtaaaaaacccctagcgacgtgtgctgctgatctgcctcgcaagatctgttgggagggtgaattgccactcggttctacccgccgcctatgtactctactcagggatttgtatattaatccattattctttcagctgttggaaaaagcaaaaagagagagaaaaaaaaacgctataaactataagttcaaataaatgtactggacgaggctaattttatattgtaaacgttggtgtatttttctatgaacttcattacagttaaaaaaaggctttggctgtaatttaaattggaggaaccaggagagaggagaacggatcgtggtcgtccaggtattatatatataaaagatcaacttgttgttctaa

SEQ ID NO: 91920 - DNA, 1046 bp, Zea Mays
gaagccagccaacgccaccaccagtccaccaccccaccatcagttactactgcctgcctgcctgcctgcgtctctcctccaggtccaggctccaggaatccaccccccacctcctcggattctttccccctctccagctcccccgtcctgcagccgcctgcactgtgctgccgccccgttcgcctcccggcctccagcctcctcggttcccgcgggagggccatgaagttaaggacaaaacgacctgaatggaagtcccttgtgcctctacaactgagcagattgagcaggaaatctgccatgcgtttctttttgttccccaaggttcagtcggctggtcaatcgccagatgataccccagtttatcttaatgtgtatgatttgacgccaatgaacggttatatatattgggcaggcctgggcatatttcactcaggaattgaagttcatggtgttgaatatgcattcggagcacatgactttcccaccagtggggtctttgaggtagaacctcgccaatgccctggtttcagattcagaaaatcaatatttcttggtacaacatgcttggatccaatccaagttaggcagttcatggagctgcagtcagtaaactacaacggcgatacttaccatcttatcacgaagaactgtaaccacttctgcaaggatatgtgctacaagttgaccggtaacaaaattcccaaatgggtgaatcggctcgccagaataggtaccatatgctaatgcttgtactagctcattgattccacatagtaaaggtgatagtgatttaagtggtacctgtgcatagtcagagtgcactacgcggctttaacggtcattaccaccatttttcactgtatattattgtgtccactttactttctagacatgaagtacttttccatcacataatatccatagttttgaagacggtaaggtgattgatcccttttttactttttaatattgatatttgagaaagtgtttaggaaaaaatattaataacgaagagaaaaaggataaagaaaataaaaagaaca

SEQ ID NO: 91921 - DNA, 507 bp, Zea Mays
atggtctaccaacgatccggatacacgcttcgtacatccggttgcgcgttgtatgctcgtagccgctgcggacattttcgagaagggacccgaaagcgttgtggaaaaaggggaaaaggggagcggtctgctcatgtttctctccaccacactgcttggccgactagacggagcggatctccctcccaatccaccgtcaatggccaccgacctccggagaacgcggacgacgatggagtggaggacgaacgtgccgccgtgccctctccagagcggtgcgaggtgctggtttctgcgatcgcgggggtgctggccagcacgctgagggagcacgacgagcgggtggccatcatcgttcggctccacgatggggacgtcgctgcaaccgaccgtcttaatggaggtagatgcttctccccaccccaacatcgtaccattctgtgcagacaactagagtatgcgtactgtatcgtggagtccattcaaaccaagataagtgtgatttag

SEQ ID NO: 91922 - DNA, 105 bp, Zea Mays
atgcagtctcttaatgaactcttacatgtcataatcctaagaacgtttaaccgaatgtgctggcaggaatacaatacagcaaatcaccaaagagtgaacaaatta

SEQ ID NO: 91923 - DNA, 450 bp, Zea Mays
atgaggggggcgcgggcgggagtgggcgctggctgcagcggcaggaggtgggacggcaagcctataattttcgggcttcagaactttgataggagcagtgttgcatatgttgtcacaactgtagataagacttctttgagactatatgatgtgaaaaagagaggtctctgttacactgtttttgtctgttgttttcttctagagggaggtgcaacccatgttgacatagcatgtgacaaggacttagtaaagcttgccatggatcttaccaaccttccgatctgtgtctcatctgtagatccttcagggttccattctgcagtacaagcaggagctaaaatggttgagattggaaactatgattctttttatgagatgggcattgagttctcctctgagcaggtgcttactaacccgtcctattcagagctactaaatttactattttaa

SEQ ID NO: 91924 - DNA, 2552 bp, Zea Mays
gcgagatgcccatcgcctcgcctgtgcccgcgtgtacgacgacgatgcctccacgccacgctcaccgtcccggtgagctcacctcccctagttaatgcaccgctcttgcgagtcatggctccctctttgcttgcgtgtattccccgtcctttttagcggcttctccgactccttccgatcctctcgcctcgtctccgtcgtcagtcgcctagctagcttccctcacaagcagcaaggcgggagcgaacacgccggcgaccgttagctcgacgcctcgaccgacctccgcgccgtcgctccgcccttgcaaagccgcagccgcgcgcttttatgctcgcggcagctcggtttgtggtctctactagcggtatcctctcgccctcggacctttctgcgaaagcgaagattccggtatggaggtggaggcgacgcccacgacggccgtgtcatcttccggcgtggccgcgcagctgccgccgcccggcccgcccgccaagaaaaagcgtgccctccccggcatgccaggtgattgatatttttttgttttgttttgtttttagtcgtttatagtggtccgaggtgtgtgtgcgtgccggggatagctagctctttgtcgtgatcgatggcgacggcgccgtggccgtggtggtggtggcgcagatcctgacgcggaggtgatcgcgctgtcgcccaagacgctgctggcgacgaaccggttcgtgtgcgagatctgcaacaaggggttccagcgggaccagaacctgcagctccaccggcggggccacaacctgccgtggaagctgcggcagcggagcggcaaggaggtccggaagcgggtgtacgtgtgcccggagcccagctgcgtgcaccacgacccgtcgcgcgcgctcggcgacctcaccgggatcaagaagcacttctgccgcaagcacggcgagaagaagtggaagtgcgacaagtgctccaagaagtacgccgtgcagtcggactggaaggcgcacgtcaagacctgcggctcccgcgagtaccgctgcgattgcggcaccctcttctcccggagggacagcttcatcacccaccgcgccttctgtgacgcgcttgccgaagagagcgccaaggcgcgggcggaggcgccttccgcggaggatgggagctcggcagccgccgtggttccgccaccggcacccccgcctgcgccggcgccactgcgacagcaaccgcccccgcctgcgccgcatcatgcggagccacgtaatgagactgacacgaatgcgactgaggccgtccagttcgcgccgccgcctccgccaccgccgccgcctccgccaccgccgccgccgcagttacaggtaccggtgctttcgcaagcttcggtgagcgctgctgccaacgttggcgccagcagcagcagcagcagcgtcgcggggacgtcgcagagcctgctcggcggtatgttcgcgccgtcgtcgatggcgtcagcgccgcagtacgcggacctcggcggccggccggagcgcgcccatcccgccaagcccccgccgctgtgcctcgccacggacgcatcgtcgtcgatcttctcggcggcgccggcggtgaccgccgagcgccagcagttcgcgccgccgcctccgtccccgtccccgtccgcacacatgtcggccaccgcgctgctgcagaaggccgcgcagatgggcgccacctcgtcgagctcctcgttcctgcgcgggctgggcctggacgtctcctcgtcgtcgccgggcgcctcgtcgtcaggccagcagcaccagcaccaggaggccatgcgggtgtcactcccggacgcctcgctgcagcaatggccgccgcggctggagctggagccggcgccaatgctgtcggccgggctcggccttgggctgccgtacgactccaccggggctcaggtgagcctgccggagctcatgatgggccagtcgtctctgttcagcgggaagccggcgacgctggacttcctggggctcgggatgagcccgtcgggcgcgtcggcaggacgaggcctccccgcgttcgtccagcccatcggcggcatggccgggaccggggccggcgcagccgagacgttcggcgccgggcgtggcgcgcaggcaacgccgtgggagaggaatccgactcggtacgaagaaactcactcactctcctacaagaatgctgctttgcacttgcttcctcccgagtcccgtcgcttgccgttgtctcttcccgattgcttccttgcgcttgtcgtgctgccgccactgccgcggcatttaagcgcgcggcacagcggcaacgcaaaagtggaccgcgaaaataaatgggattggttgcagcctgggacgatttcgcagcaggtggctatgaacattcatcaggcttgttgcctcctgaatggttttcaagggtccgtgtcatcagctcagagcctcagagtggtggtacaagcgttccttcactattcctatcaatgccggctctgtggcgccaggttatctcctgtgttctttcttcccccggtggttggatccattgtttaa

SEQ ID NO: 91925 - DNA, 2388 bp, Zea Mays
gcgagatgcccatcgcctcgcctgtgcccgcgtgtacgacgacgatgcctccacgccacgctcaccgtcccggtgagctcacctcccctagttaatgcaccgctcttgcgagtcatggctccctctttgcttgcgtgtattccccgtcctttttagcggcttctccgactccttccgatcctctcgcctcgtctccgtcgtcagtcgcctagctagcttccctcacaagcagcaaggcgggagcgaacacgccggcgaccgttagctcgacgcctcgaccgacctccgcgccgtcgctccgcccttgcaaagccgcagccgcgcgcttttatgctcgcggcagctcggtttgtggtctctactagcggtatcctctcgccctcggacctttctgcgaaagcgaagattccggtatggaggtggaggcgacgcccacgacggccgtgtcatcttccggcgtggccgcgcagctgccgccgcccggcccgcccgccaagaaaaagcgtgccctccccggcatgccagatcctgacgcggaggtgatcgcgctgtcgcccaagacgctgctggcgacgaaccggttcgtgtgcgagatctgcaacaaggggttccagcgggaccagaacctgcagctccaccggcggggccacaacctgccgtggaagctgcggcagcggagcggcaaggaggtccggaagcgggtgtacgtgtgcccggagcccagctgcgtgcaccacgacccgtcgcgcgcgctcggcgacctcaccgggatcaagaagcacttctgccgcaagcacggcgagaagaagtggaagtgcgacaagtgctccaagaagtacgccgtgcagtcggactggaaggcgcacgtcaagacctgcggctcccgcgagtaccgctgcgattgcggcaccctcttctcccggagggacagcttcatcacccaccgcgccttctgtgacgcgcttgccgaagagagcgccaaggcgcgggcggaggcgccttccgcggaggatgggagctcggcagccgccgtggttccgccaccggcacccccgcctgcgccggcgccactgcgacagcaaccgcccccgcctgcgccgcatcatgcggagccacgtaatgagactgacacgaatgcgactgaggccgtccagttcgcgccgccgcctccgccaccgccgccgcctccgccaccgccgccgccgcagttacaggtaccggtgctttcgcaagcttcggtgagcgctgctgccaacgttggcgccagcagcagcagcagcagcgtcgcggggacgtcgcagagcctgctcggcggtatgttcgcgccgtcgtcgatggcgtcagcgccgcagtacgcggacctcggcggccggccggagcgcgcccatcccgccaagcccccgccgctgtgcctcgccacggacgcatcgtcgtcgatcttctcggcggcgccggcggtgaccgccgagcgccagcagttcgcgccgccgcctccgtccccgtccccgtccgcacacatgtcggccaccgcgctgctgcagaaggccgcgcagatgggcgccacctcgtcgagctcctcgttcctgcgcgggctgggcctggacgtctcctcgtcgtcgccgggcgcctcgtcgtcaggccagcagcaccagcaccaggaggccatgcgggtgtcactcccggacgcctcgctgcagcaatggccgccgcggctggagctggagccggcgccaatgctgtcggccgggctcggccttgggctgccgtacgactccaccggggctcaggtgagcctgccggagctcatgatgggccagtcgtctctgttcagcgggaagccggcgacgctggacttcctggggctcgggatgagcccgtcgggcgcgtcggcaggacgaggcctccccgcgttcgtccagcccatcggcggcatggccgggaccggggccggcgcagccgagacgttcggcgccgggcgtggcgcgcaggcaacgccgtgggagaggaatccgagtagctcgccgatcctgtaactaaaaacttggatagcaatgcaagtagtttggattgaaccccaggcgctgtgattttgggcaaaaggaagaggaaacagtagacgccaggttcgattagcagctacgtagtcttatgttgcactgccggttcttgctgttcttttgtttctcttagctcggtacgaagaaactcactcactctcctacaagaatgctgctttgcacttgcttcctcccgagtcccgtcgcttgccgttgtctcttcccgattgcttccttgcgcttgtcgtgctgccgccactgccgcggcatttaagcgcgcggcacagcggcaacgcaaaagtggaccgcgaaaataaatgggattggttgc

SEQ ID NO: 91926 - DNA, 1811 bp, Zea Mays
cgacatcagcattctttcaaacgaagaccggccggccataagtgtgtgagaagagacagtggcactggacacagcaagtagtgtcgaacgagagccacatcccgctctccacccgggcgcgcgtgtcctccgtttcgccatgtccaactccaagcagcacgacgccgccgacgacggcggcatcccagcccccgaggcgccggcaaagcgcccaccgcttaacaagtacgccctcgcctgcgccgtcctcgcttccatgaactccatcctcctcggctacgatgtgtcggtgatgagcggagcgcagctattcatgaagcaggacctcaagatcacggacacgcagatcgagatcctcgccggcatcatcaatatctactcgctcgtcggctcgctcgcggcgggccggacgtccgactggctcggccggcggtacaccatggtgctcgcggcggccatcttcttcgcgggcgcgctcatcatgggcctcgccccgagctacacgatcctcatgcttggccgcttcgtggcgggcgtcggcgtcggatacgcgctcatgatcgcacccgtgtacacggccgaggtctcgcccacgtcggcgcgcggcctgctcacgtccttcccggaggtgttcatcaacacgggggtgctcctcgggtatgtctccaactacgccttccacggcctccccgtgcacctcagctggcgcgtcatgttcctcgtcggcgccgtcccgcctatcttcctcgcactgggggtcctcgccatgccggagtcgccgcggtggctcgtcatgcaggggcgcatcggcgacgcgcgccgcgtgctggccaagacctccaactcccccgccgaggccgaggagcggctcgccgacatcaagaatgccatcggcatcccagacggcgtcggcgacaacgacgacgacgtggtggtggtcgcccgcaggaacaagggcagccatggcgaaggggtgtggagggacctcctcatccgcccgacgccgcccgtccgccgcatactcatcgcctgcctcggcctccagttcttccagcaggcctccggcatcgactccgtggtgctgtacagcccgcgggtgttcgagaaggctgggcttaggtcgaacaacaactctttgggcgccaccatggcggtgggcgcgaccaagacgctgttcatcctggtggccacgttcttcctcgaccgcgtcgggcggagaccgctgctgctcacaagcgcgggcgggatggtggtgtcgctggtgacgctggcctcggcgttgcgcgccatcgaccggctcccagagggacaggcgacgtcgctggcgggcgtgagcatcgcggcggttctcacgttcgtggcgtccttctccatcggcatgggcccgatcgcgtgggtgtacagctcagagatattcccactgcggctccgcgcgcagggctgcgcactcggcacggcgatgaaccgggtcatgagcggcaccatcaccatgtccttcatctcgctctacaaggccatcaccttcgccgggagcttctacttgtatgcaggcattgctgctgccgggtggctgttcatgttcttcttcctgccggagacgaggggcagcaacctagaggacaccgagaagctcttcggcggtggcgaccacgacgaggacaaggaagatggacacgatgcgcagaagtccactgagttgagtagtagccaacagtgacctgatctgtatctgatagtatgtacgctagtaaaaaacacagactgttttttttttacttagattactgcacctttaaagcacgagtttcttt

SEQ ID NO: 91927 - DNA, 801 bp, Zea Mays
attgtgtgaagaacaaacttaatcgtgagaaggtgcaatttccacagtgcacaggatctcaatcatatgttgcaaaagcttatgtagtgagacaagaaaaatataaagatgtcaaacctagtgcaattgatcttttcaaggagatgcattgcagcaagaaaaaaggatttagtgaagttgttcagaaagccataggtgatatggaagcaatggtggcaacaccagctgaagatggacagcttgcaaagtctgcaacagaagttgtttccaatgtgctgccgggttcaagtaaatttcttcacaatgctggccctttgccctcctccaagagaagcaacacagggactgtttcagcaagaatgcaagaccttcggtctcaattggtcaatgagaggtgagaaaaagatggacttcgagaagatatggataccttaaaagccaagtcacaagcatctgaggcaaccattgctaatcaatcaactgagattgcagatttaaagaagtccttagcagaaaatagcatcctacttcgacagatattaagtattagtcgtgatcaggtgaatccttaagcatgcttgctaagatgctggtgtcaaccatcctgaagacacatctcacaaaactgtggacctctttttatccttatgtttgctatatggaactgcaacttacagtctattatatgtgttctcttgctatagagttttagtacttgtctggttaaagaattatgaaccatgttcttttgtgtgttggacatattatgcttgaaatatatggatgttggaaaaagttgtg

SEQ ID NO: 91928 - DNA, 528 bp, Zea Mays
gttctaaaagggttgtggcccctaatgttcatggacaatagattagattcactaggcaaatgagtgctgccataaatcaacaatcctccctaagcctaactactactacacaagctggttcaagagccaccacaaaccaagaatccacccaaaacttggctgctgcaacacaatttacttcaagtgttgccactgagcaagattacaccgcaggcctgactactgctgcacaacctagatctcccacacaagctgaggtcaatgaccacaatagagatgaagaattggtaccaaggcaaagaagtaggggcaaacaacttgaatccttgagcagagggttaggcactaagattccaatccaaatctctaatgggaagcgaaggccagagccacctattcagactgcaaagtttgcatcggagggtgggatcatattgaggcaacacattccaatatttccgcactagaaggagtacaagaatcaagagaacgagggtaaaattacagacttcattgggaagcttgttg

SEQ ID NO: 91929 - DNA, 1756 bp, Zea Mays
aatgaatgatgactgtgcgttcttcgtcggccatctcgatccaccgagcagacatctcggtgatgagcggcgcgcagctgttcatgaaggaggacctcaagatcacggacacgcagatcgagatcctcgccggcgtcatcaacatctactcgctgttcggctccctcgccgccggcctcacctccgactggctcggccgccgctacaccatggtgctcgcggccgccatcttcttcacgggcgcgctcctcatgggcttcgccccgggctacgggttcctcatggtgggccgcttcgtggccggcatcggcgtcggcttcgcgctcatgatcgcccccgtctacaccgccgaggtggcgcccacctcggcgcgcggcttcctcacctccttcccggaggtgttcaacaacttcggcatcctcctcgggtacgtctccaacttcgccttcgcgcgcctccccgtccacctcagctggcgcgccatgttcctggtcggcgccgtgccgcccgtcttcctgggcgtcgccgtcctcgccatgccggagtcgccccgctggctcgtcatgcggggccgaatcgacgacgcgcgccgcgtgctgcagaagacctccgactcccccgccgaggccgaggagcgcctgctcgacatcaagaaggtggttggcatccccgagggcgtgtccgacgccgacgacgtggccgccatagtccgcgccagcggcaagggctcgtcgtcgtcgcgccacgacggggtgtggaaggagcttctcatcaacccttcccgccccgtgcgccgcatgctcatggcggggctcgggctcatgttcatccagcaggccacgggcgtggactgcgtggtcatgtacagcccgcgggtgttcgagcgggcgggcatcaagtccaagaccaactcgctgggcgcgtccatggcggtgggcgcgtgcaagaccttcttcatacccatctcgacgctgctcctggaccgcatcggccggcggccactgctgctggcgagcggcggcgggatggccatcttcctcttcacgctggccacgtccctgcacatgatggaccggcgccccgagggggaggccaccgcgctgggcgcggtcagcatcgcggccatgctgtcgttcgtggcgtcgttcgcgtccgggctgggccccgtcgcctgggtctactgctccgagatctacccgctgcggctgcgcgcgcaggccgccgccatcggcacggggctgaaccggatcatgagcggcgccaccaccatgtccttcctctcgctctccaacaccatcaccatctccggcagcttctacctctacgcctgcatcgccgccgcagggtgggtgttcatgtacttcttcctgccggagacgatgggcaagagcctggaggacaccgtgaagctcttcggcaaggacgcggacgacgaggacgtcagcgacatccgtcgtcacgtgcccactaagaagccgtctactgagctgagtgctcagcactgatcgagtaatgtgctacgcaacacgtgtcctcccgagtgtggccgaagcttatgttccgtaaagcttcgatgatgtagtataatatttttttttgtgtgtcggaactgtggtgaatctatgtatatcccgcgcctcttttgtttattagatttgtacattttttgttgatctcgtggcatggtgcgtgtgcgtagaaaaaatattattaaaaatatctatctctgcctcgtgtggcctacatgttatatttt

SEQ ID NO: 91930 - DNA, 2079 bp, Zea Mays
gtacagagtcacggatgctccctagcccctatataaaagggcccaggccaaagcacggaccaaccactcgctagcagcgaagagtgactccggcgggcattctctgctggtacaccaataatcgaggagcagctagcgtgcgagagacaacagagccagaggccgcccggccggccagtacagagaaccaagctagtgccaaaccgacagaacacgcctgtgatcggtaggtctacaccaccgacacttggccatgagcacggccacggacgccgtcccggtcgccgtggcgccggcgaagcgcccgcccatcaacaagtacgccttcgcctgcgccctgctcgcctccatgaactccgtcctcctcggctatgacatctcggtgatgagcggcgcgcagctgttcatgaaggaggacctcaagatcacggacacgcagatcgagatcctcgccggcgtcatcaacatctactcgctgttcggctccctcgccgccggcctcacctccgactggctcggccgccgctacaccatggtgctcgcggccgccatcttcttcacgggcgcgctcctcatgggcttcgccccgggctacgggttcctcatggtgggccgcttcgtggccggcatcggcgtcggcttcgcgctcatgatcgcccccgtctacaccgccgaggtggcgcccacctcggcgcgcggcttcctcacctccttcccggaggtgttcaacaacttcggcatcctcctcgggtacgtctccaacttcgccttcgcgcgcctccccgtccacctcagctggcgcgccatgttcctggtcggcgccgtgccgcccgtcttcctgggcgtcgccgtcctcgccatgccggagtcgccccgctggctcgtcatgcggggccgaatcgacgacgcgcgccgcgtgctgcagaagacctccgactcccccgccgaggccgaggagcgcctgctcgacatcaagaaggtggttggcatccccgagggcgtgtccgacgccgacgacgtggccgccatagtccgcgccagcggcaagggctcgtcgtcgtcgcgccacgacggggtgtggaaggagcttctcatcaacccttcccgccccgtgcgccgcatgctcatggcggggctcgggctcatgttcatccagcaggccacgggcgtggactgcgtggtcatgtacagcccgcgggtgttcgagcgggcgggcatcaagtccaagaccaactcgctgggcgcgtccatggcggtgggcgcgtgcaagaccttcttcatacccatctcgacgctgctcctggaccgcatcggccggcggccactgctgctggcgagcggcggcgggatggccatcttcctcttcacgctggccacgtccctgcacatgatggaccggcgccccgagggggaggccaccgcgctgggcgcggtcagcatcgcggccatgctgtcgttcgtggcgtcgttcgcgtccgggctgggccccgtcgcctgggtctactgctccgagatctacccgctgcggctgcgcgcgcaggccgccgccatcggcacggggctgaaccggatcatgagcggcgccaccaccatgtccttcctctcgctctccaacaccatcaccatctccggcagcttctacctctacgcctgcatcgccgccgcagggtgggtgttcatgtacttcttcctgccggagacgatgggcaagagcctggaggacaccgtgaagctcttcggcaaggacgcggacgacgaggacgtcagcgacatccgtcgtcacgtgcccactaagaagccgtctactgagctgagtgctcagcactgatcgagtaatgtgctacgcaacacgtgtcctcccgagtgtggccgaagcttatgttccgtaaagcttcgatgatgtagtataatatttttttttgtgtgtcggaactgtggtgaatctatgtatatcccgcgcctcttttgtttattagatttgtacattttttgttgatctcgtggcatggtgcgtgtgcgtagaaaaaatattattaaaaatatctatctctgcctcgtgtggcctacatgttatatttt

SEQ ID NO: 91931 - DNA, 1919 bp, Zea Mays
cagcgaagagtgactccggcgggcattctctgctggtacaccaataatcgaggagcagctagcgtgcgagagacaacagagccagaggccgcccggccggccagtacagagaaccaagctagtgccaaaccgacagaacacgcctgtgatcggtaggtctacaccaccgacacttggccatgagcacggccacggacgccgtcccggtcgccgtggcgccggcgaagcgcccgcccatcaacaagtacgccttcgcctgcgccctgctcgcctccatgaactccgtcctcctcggctatgacatctcggtgatgagcggcgcgcagctgttcatgaaggaggacctcaagatcacggacacgcagatcgagatcctcgccggcgtcatcaacatctactcgctgttcggctccctcgccgccggcctcacctccgactggctcggccgccgctacaccatgggcttcgccccgggctacgggttcctcatggtgggccgcttcgtggccggcatcggcgtcggcttcgcgctcatgatcgcccccgtctacaccgccgaggtggcgcccacctcggcgcgcggcttcctcacctccttcccggaggtgttcaacaacttcggcatcctcctcgggtacgtctccaacttcgccttcgcgcgcctccccgtccacctcagctggcgcgccatgttcctggtcggcgccgtgccgcccgtcttcctgggcgtcgccgtcctcgccatgccggagtcgccccgctggctcgtcatgcggggccgaatcgacgacgcgcgccgcgtgctgcagaagacctccgactcccccgccgaggccgaggagcgcctgctcgacatcaagaaggtggttggcatccccgagggcgtgtccgacgccgacgacgtggccgccatagtccgcgccagcggcaagggctcgtcgtcgtcgcgccacgacggggtgtggaaggagcttctcatcaacccttcccgccccgtgcgccgcatgctcatggcggggctcgggctcatgttcatccagcaggccacgggcgtggactgcgtggtcatgtacagcccgcgggtgttcgagcgggcgggcatcaagtccaagaccaactcgctgggcgcgtccatggcggtgggcgcgtgcaagaccttcttcatacccatctcgacgctgctcctggaccgcatcggccggcggccactgctgctggcgagcggcggcgggatggccatcttcctcttcacgctggccacgtccctgcacatgatggaccggcgccccgagggggaggccaccgcgctgggcgcggtcagcatcgcggccatgctgtcgttcgtggcgtcgttcgcgtccgggctgggccccgtcgcctgggtctactgctccgagatctacccgctgcggctgcgcgcgcaggccgccgccatcggcacggggctgaaccggatcatgagcggcgccaccaccatgtccttcctctcgctctccaacaccatcaccatctccggcagcttctacctctacgcctgcatcgccgccgcagggtgggtgttcatgtacttcttcctgccggagacgatgggcaagagcctggaggacaccgtgaagctcttcggcaaggacgcggacgacgaggacgtcagcgacatccgtcgtcacgtgcccactaagaagccgtctactgagctgagtgctcagcactgatcgagtaatgtgctacgcaacacgtgtcctcccgagtgtggccgaagcttatgttccgtaaagcttcgatgatgtagtataatatttttttttgtgtgtcggaactgtggtgaatctatgtatatcccgcgcctcttttgtttattagatttgtacattttttgttgatctcgtggcatggtgcgtgtgcgtagaaaaaatattatt

SEQ ID NO: 91932 - DNA, 423 bp, Zea Mays
atgacgtggctgcagcaggtgaaacgacaccaaacgcgtggtagcatgagagagggccgagaggaaaatcaaatgccagatgcacaaacactaggcagagggaattcaaatgacacacgcacatttccccgaatacttggcatgcgacccgcgttcacgcagaaaccacgggcacgggccaagcctgctggtaaaagcaactttttacggagaggaaacgggagggaggaacgcacaagcgagttgaacctgcaggtgcaggcaagcgacgagtggtgccacgcgcttcccccgagcccggcggcgtcacggcagcaacagaaccgggcgtggaggcggaggcacggcagcatcagcgccgcgcgtgaaggcggacgctacagttgcagatccaaggaacccaaacggccccgaagcggctga

SEQ ID NO: 91933 - DNA, 395 bp, Zea Mays
gatttcagcgtaaaacgtaaactaaaacaacgtaaatgagtacgaaatttagtataaaacacacgcacaatctcacttcgcaagagattgttgtaaaacacatcaaaaagtgtcataaatttggcgtaaaacgcagtaagactgtttttttaatggaagcataaaacacaacaagaagtgtcgtaaaatttagtttgaaaatgcataaatcatgatggtctcatagggcacttgttttgttcacagtatatcaaaatataaagcacaacgatattttgccaatattgttgcaatcatacacgatttatttgacatgacaaaaaacgagaagctaagccctgtcttcggtacttcagacatttggaaccattagcctttagttaggtcgtggtccg

SEQ ID NO: 91934 - DNA, 757 bp, Zea Mays
gtgtcgaaacaattgttcttgccacaaacggtacttttgtccaagtagtgtaactctacgtactacgttctgtgaacaacctggtgggtcgtttatttgcattgcatgcatatgcaggtgatggcgtacttcacgatctcggcggtggccgtggcgatggaggcggcgatgatcggcaagtacgggtcgcagcagttccagtggatgaagacgtgccacctctacaagcgtttctgcgcgcaggcgggtggcgccgtggcctgcgcggtggcggccagcctgaacatggtcggcgtctcgctcgtctcggcgttcaacctcttccggctgtacggcagcggcaaagggaggaagtgatctcggtcggcctgctgccactaggaacacagggccggcagcgccgcctgttctcttaggttttaacacccagtatggaaccatagcgccatggatggatggatggtctcttcttctccggtttgagtttttctggtgttgggtaggcatacctgtcgtctgtcagcgtagacataaaaaaaaaggtctctgggacgctcgcccatgtatgtatgtatatgatgtgaagtgatccaaggtggttcgcgtgctatggcaataaacgtgtgggaaagcgatgtatcgtcgatgactgtcgccgcctgcagggatggcaggggaatttactctctgggttattatacaatgcggtagctggctttgctgatgctgtgccaactgccatcatttactcctgact

SEQ ID NO: 91935 - DNA, 1159 bp, Zea Mays
acctcctactcccgtaggccgcagcgtgcatcgcggctcccgctcccacactcgcctccctcatcagtggcagctagtagcggcagcacccgcagctcgcaggagagagagagagagagagagagagagagagcagccatgaaccacggaggcggagccgacaacggtgtgagccccggcaacgtcccggtgtgctactacggcgcggcggggcgcgtgccggcggcgctggagcggcgggtgcgcgccgcggagctgttcatgcggtgcgcggcgtgcgggctcgcggtgctcgccgcggcgctgctgggcgccgaccgccagacccgcaccttcttctccgtggagaaggcggcccggttcaccgacatgcagtcgctcgtattcctggtgatagcaaacgggatggcagcgtgctacagcctgctgcagggcgggaggtgcctggtgagcatcctcacaggtggtggcgtactaatcaacaggcccatggcatgggccatcttctcctgcgatcaggtgatggcgtacttcacgatctcggcggtggccgtggcgatggaggcggcgatgatcggcaagtacgggtcgcagcagttccagtggatgaagacgtgccacctctacaagcgtttctgcgcgcaggcgggtggcgccgtggcctgcgcggtggcggccagcctgaacatggtcggcgtctcgctcgtctcggcgttcaacctcttccggctgtacggcagcggcaaagggaggaagtgatctcggtcggcctgctgccactaggaacacagggccggcagcgccgcctgttctcttaggttttaacacccagtatggaaccatagcgccatggatggatggatggtctcttcttctccggtttgagtttttctggtgttgggtaggcatacctgtcgtctgtcagcgtagacataaaaaaaaaggtctctgggacgctcgcccatgtatgtatgtatatgatgtgaagtgatccaaggtggttcgcgtgctatggcaataaacgtgtgggaaagcgatgtatcgtcgatgactgtcgccgcctgcagggatggcaggggaatttactctctgggttattatacaatgcggtagctggctttgctgatgctgtgccaactgccatcatttactcctgact

SEQ ID NO: 91936 - DNA, 2618 bp, Zea Mays
gcagcgaagcaggcctccttcttcacaagcgcttctgctaacaggcatcgtcgcatctctgtataggtatttctgaaaccagccgtcgtacgtccatcccaccgggagcaccggcgacgatgccgccgcgaacggtgtccgatgggggagacgacaacggcaccgacgttgctagccgaacgtcgtcgcaccgccgcacggagcacgggcatgggtacaaagtcggcgtcccaccggagaagaacctcctcgccgagatctctgacgcggtgaaggagacgttcttcgccgacgacccgctgcggcagtacaaggaccagcccaggtccaagaagatctggctcggcctgcagcacatcttcccggtgctcgactggagcaggcattactccctcggcaagttcaagggtgacttcatcgctgggctcaccattgccagcctctgcataccccaggacatcgggtattctaagcttgctaacttgccagcagaggtgggactatacagtagcttcgtgccgcctctgatatacgcagtgatgggcagctccagggacatagccatcggcccagtggccgtggtgtcgctgctgctcggtactctccttcagaatgagatcgaccccaagacacacccgctcgagtacaggcgcctagccttcacagcaacctttttcgcaggggtcactcaggcagcgctcggattcttcaggctagggtttatcatagagttcttgtctcatgctgccattgtcggattcatggccggcgctgccatcaccattgcgcttcagcagctgaaaggattccttggaattgcaaacttcaccaagaaatccgatattgtatctgttatgaaatcagtttggggaaatgttcaccatgggtggaattggcagacaatactgataggagcgaccttcctggcattccttctggttgccaagtacattgggaaaaggaataaaaagctcttctgggtgtccgcaatcgcacctctcacttcggtgatcatatccacattttttgtgtacatcactcgtgcagataagcatggcgttgcaattgtcaagaacataaggaaaggcatcaacccaccttcagctagtctaatatacttcaccggcccatacttggcgacaggattcaaaattgggatagtagctggaatgataggcctaacggaagcgattgcaattggaagaacatttgcagccctcaaggattaccagatagatgggaacaaagaaatgatggctctagggaccatgaacattgttggttcactgacttcttgctacgtagccacaggttctttctcgcggtcagcagttaattacatggctggctgcaaaacagcagtgtcaaacgttgttatgtcaattgtcgtaatgcttactttgctactgatcaccccattgttcaagtacactccaaatgccatcctttcctcgatcatcatatcagcagtgcttggtttaattgactatgaatcggcttaccttatctggaaagttgacaaactggactttctagcatgcatgggagcattttttggagtcatattttcatcggtggagtatggcttgctcattgcggttgcaatatctcttgctaaaattcttctccaagtaacacggccaagaacagttttacttggaaaccttccacgaacaactatatacaggaatgtagaacagtatcctgatgctaccaaggttccaggggtgctgattgttagagtggactcagctatatacttcacaaactctaactatgttaaagagagaatcctgaggtggctaagagatgaggaggagcaacaacaggaccagaagttaacaaaaactgagtttctaattgttgacctgtctcctgtaattgatatcgacacaagtggaatccatgctttggaggagttggcgaaagctcttgaaaaacgcaaaattcagctggttcttaccaatcccgggccggcggtgatccagaagctccgctcagcgaaattcacggacatgattggtgaagacaagatattcctcacggtcggcgacgctgtgaagaaatttgctcctaagatggtcgataatgtctgatggagtttctgggtcatgtacagtacgagcaagaagtctatctattatgtggcaaagttcagtggcaattatggatttatagagcagaaacagaacagaacgggagtaaataacatggttcgcggaatggtaaataaagaagatgctccggagttggagtgcatcacgtttgcgaggtgtggttggatagaaaacagttggtggcctagttgggcgtctatgtcagtccttgtggttgtggagtctgttccgcgttggcaagcactcagtgatggagatcaaatgcttcatggatcagcagatatgggtgcctgatgattaacatatcatcattgatcgtgaaagaagagttacctcgttggggtttcaggctttgtgtatatcttacagtacttagctcctttccttgtagtttaagttgttatgatgagcttttacatttggcttatatatgtatattctgtaacgttgatgcattgttaagtgttcctgaccccaaaaaaagggggtgcaaaaacgtga

SEQ ID NO: 91937 - DNA, 1377 bp, Zea Mays
atgcctgcaaacatgatctccaagatccttgagaagtcgtctgtccttccgctggtggacgatgttattgcacccatccatgtgaagaccgctggaggagctcctcggaccagtgtgctgcgcaatccgaacatggagaagcttcagaagggctacctgttcccggagattagcatcaagcgtgaagctcacctgaagaagtaccctgatgccaaggtcatcagcctgggcatcggcgacacaaccgaacccattccaagcgtcgtaacgtcagctatggccgagtatgtacttgcgttatccactccagaagggtaccagggttatgggccggagcaggggcaaatgaatctgcgcaaggtcatagctgaggaagtgtacccagacatggggattcaagagtccgaggtgttcatctcggacggagcgcagtgtgacatcgctcgcctccagacgctgttcgggcccaacgtgaccatagccgtccaagatcccaccttcccgggctacgtggacaacggcgtgatcgtggggcagaccggcagcgcggacgaggccggcaagtacgccggcatcgcgtacatgcggtgcgcgccggagaaccacttcttcccggacctctcccgcgtgccgcgcaccgacgtcatcttcttctgctcgcccaacaaccccacggggcacgcggcgtcggcggcgcagctgcgcgagctggtggacttcgcgcgccgcaacggctccatcatcgtgttcgacacggcgtacgcgtggtacgtgtcgtcgtcgtcggaggccgctggcgacggggacaagacgaagccgcggtccatctacgaggtgcccggcgcccgggaggtggccatcgagatctcctccttctccaagttcgccggcttcacgggcgtccgcctcggctgggcggtggtgcccgacgagctgcgctacgcggacggctcccccgtcgcgcgcgacttcgaccgcatcgtctgcacctgcttcaacggcgcctccagcgtcgcgcaggccggcggcctcgcctgcctctccacggaggaaggccgggacgccgtgcgccgcgtcgtgggcgtctacaaggagaacgcgcgggtgcttgtggacaccttcgcgtcgctcggcaaggaggtgtacggtggcaccgactcgccctacgtctgggtgcgcttcccgggccgccgctcctgggacgtgttcgccgagatactcgacaagacgcacgtcatcaccgtgccgggcagcggcttcggccccggcggcgagggcttcatccgtgtcagcgcgttcaacagcagggacagggtgctggaggccgcagctaggctcaagaagttccttcctggactcagcgctgttccgctctaa

SEQ ID NO: 91938 - DNA, 1960 bp, Zea Mays
ggttttcaaaaactttattctcaaacagggccttactaagttaaaaaaaaggtggaagtcgtatccacaattcaatcaaacatgttctgaaagtagaccgtgtcatgtaaacacgcactaagttaaaaaaaaaagtggaagccgtgtccatgtattgtttcacagagatatactgagacgaaatccccagatgagactgaaaaatgatcgaccacgtcacctcgaaccttccacgcacacgctagcagtagcagccagcggctctccggcccccaacaaccgcgcgagcgcgacgacctactcctctctccgtgctgccattacatatagcgcagctgcaggctgcagctccgaccaagcaaaccttcatctatcgagtcgcccgtcaccacagctgatattgaggcgacgcgccggccgtccagatcaaccaaaaaagaaaaaaagaaaaaacagtagccatgtcgcggctcctcctcctcggggccgccgtgctgctgctcgcgtcggccgccacggcgcaggactgcctgtccgcgacgttcagcggcgggcggaccttcgggcggtgcaacaacctgccgtcgctgagcgccagcctgcactggacgtaccacccggagaacggcaccgcggacgtggcgttccgcgcgccgtcggacgccagcggctgggtcgcctggggcatcaaccccgaccgcggcggcagcatgggcggcagcagcgtcttcgtggcctcgccctcgcaggacggcagcggcgcggtgtccatcctcatgacccacctggagagcacgtcgcccagcctaaccaacaacacgctcaagttcaaggtgcccgtcggccccgccgccgagtactccaacggcgcctacaccatattcgccacggtggagcttcccggcaactccacgcagcagttcacggtgtggcaggccggcgcgaccagcaacggtgccatctcccctcacccgacggcgccggccaacttggccagcacccagaggctggacttcctctccgggtccagcaccgccgcctcaaactccaggcttcaccgccgtaacatccacggcatgctgaacgcgatcgcctggggcgtcctgatccccgtcggcgccatcatcgcgcggtacctgcgcgtgttcgagtccgcggacccggcgtggttctacctgcacatcgcgtgccagtgctccggctacatcctgggcgtggccggctggggcctggggctgaagctcggcagcgagtcggccggcgtcacctaccagccgcaccgcagcatcggcatcgccatcttctgcctggccacgctgcaggtgttcgcgctgctgctccggcccgacaagaagaacaggtacaggctgtactggaacatctaccaccactccgtcggctactccgtcatcgtcctcggtgccgtcaacatcttcaaggggctcgacatcctcaagccggacagcggctacaagaccgcctacattgtcgtcctggccacgctcggcggcgtcgcgctctgcctcgaggccatcacgtggcccatcgccatccggaagcgcaggcgtaacgccgccgacaaggcgtccaacggcaacggctggcagcagggtgcgtagggggccaggtcgatcgccgggctttgtgcgcgtgtgtcgttgtgctatagttttgatgcgagagagaggtctgatatcgatgtgctgatgccgttgttcagagagagagatcgttgctgatgtgtttctttcctgttactactgcctctgtagtctgtactcctacctagaagagtagctcctttgattttttttcttctgttttgttgttgaattttattagggttctatagtgccatttgtacacattttttcccttcttattgatgtacgtacgactgctttgattattgtatggtttcagtcagatgacacggctttccttactgctcaagttaaaa

SEQ ID NO: 91939 - DNA, 118 bp, Zea Mays
tttcactaaggatacggcaactcactttagccgaggagaaattaacttgtattaggtgctgtttggttcagaaaatgtgacataaacgtcattgtaacaaagtaacgggatggtttcc

SEQ ID NO: 91940 - DNA, 303 bp, Zea Mays
gctgtagaaattgaactgactggtggaggagttggcgttgaaacggatgcacaggtcgggggcgcctctagcaacaagaccgccggcgaaggagaacatctagcgaaggaaggacgaggaggcgacttcggatctgtggccgatgcagtgatttgtgcctccatggatccgaacctgggcgactccgggactgttgccggcgacaaagatctcgtggctccaaactcagttgttgttgccgaatatgacggcgcagccgccgccatcacggccgatgttggagcgctcgtgagtgatggatag

SEQ ID NO: 91941 - DNA, 2214 bp, Zea Mays
atggatggaattcagagggatggagatgtatcaccgctaagtttaatgaaaggttctctttggcccattttcacaaaacaacaactacaagagaaggagaaagaacttaaatcaagctataaagcagtaagagattcaagaaaggaaagtgggactagttggaatgactccctatgtatgatattagctgaacctgaggctcacccaaaggttgcaaggtttcgcaagaagccctttcctcttttctactctttagaagcactttatgaaggtagtgtggctatgggagacttaaatttcacatcaagtcaacaattgcctccttatgctcctctacctgttgatactcttgctccccctgctattgttcctcctcttgctcctcctgctagcgttcctcctgctcctacttttgttgttccttcagctaggagtacgtctaaacagactctccatccattcaatacaaatccatttgatttggatggacaagagatgacaagtgaagctcaatctatgtcagctattcatgaagcaagggagggagaaggtagcaaaagcagaaagcgtaagcagagccatgttggagcagctctcgaagactatgtggagttcaaaaagtgccaaactaacaagacacttgatgctcttaaagaactttccatgaggaagtgtatgaaggaaatggaagcaatagatggattcacagatgaggagaagtcatatgctgtggaggtctttgagtccgagattaatagagaggctttcatgtcgacaatgaaccacaatgttcgaagaatgtggctaaagcgcaaaatcagccctaaaattttgaatatccagcctctaaaccttggcccgcccctgcgcgccgcgcccaccgctccgaatctaccggacgtcaatgctgggcagttgggcctcaaccctaaccccatcgccccgcccaacccatcggtgccgcgcccgcgctcgtcgtcgacgcagaggcagagccccagcgccatctacttccaacctgccatgccaatcgacgaccccaatctcgctgcatactgggacgatcacgaccccgccttcaacccgtacacctccgctttccagagcacgctgttggcaaacccaccatcggactacgggtcccgctgggtctccccggcggcgcctcgcgggtacccagccccgacgctgggggaggttcgcttccgcctgcttcgcggaccgatggagcctgaacttctatcgtccttgatcacctcgacccacgtggcccggctgctcatggacggcgacgagcaagtgcgccggagcgtgctcgccacgttcaagtgcgacgtgcgctgcttcatgaagaggcagatcgtcctcctcgccatggttcgcgcctgcatgtggcggcccgacgagatccaagacatcgtccgtaccgtgtactgcaccaacggctttctttcgggcgtcgtgaaaaacaaccacgggttaacagctctgaaggagctgataacggcagtggttgttcatggccggctgctgaggccgctcatccaatgtctccttcgtgaacccctattctatcaaagcccggagcttgttgagcactgcttcgtcacgatgccttacgatcatagcaagtttctgatcctgttcgccatcgtgcacaatgtcgagctgctctccacgtcccttgggtcgagaagcatggcacaatgcttcatgtacgcgagagacagagagcttgagaatatcgagacgtacatcctggactgcaccaccgcactcgccacgagcaaatatgggaactatttcttacagcgggccatcgagtacggcggcgagcgcctccaggtggacatcgccaagcgcatcgcggcggacgtggtgagcctgtcgttggaccagttcggaagctacgtggtggagtcgtgcttcctccagattatgcgctcgacgatggcgccgctgcagctcgtgctcgacgctttcctcgccctgggcgacgacgacctcgccgagctcgtgcagggcagcttctccaactacgtcgtcagcaagctgctccgcgtcgccaaggaccccaaaccggcgcatgcgagggagctggcgcggcgtatcgagaggcttccgactgcggtccaccgcgagatgcacgcgcgccgggtgatggtggaagtccggaagacgcttcaaaggccgcaggcaatcaggctttactag

SEQ ID NO: 91942 - DNA, 4124 bp, Zea Mays
gtccgctcggcccgtcgccgcgctcgctcctctggtcggtggacggcaccgtgccgagtgccgagtgccgaccggtcggaacggaagaaaccatccgctcatccccgttttctcttgtcccgttcaccacgcctgctctctcccttgtcatcttctggcgacgactgggcgactgccgacggccgctgctgccgccggccgctgctgccgccctagaccaggtggccagctcttgtccgagaccgttgctggcgacgagaatccaatagcttaacccctatgcaccaagggaagtcggatcctcattgctggtacaatgagcaggccgaatacccgcaacaagaacaagaggcctcgcgctgatgaatccaatagcccatctgtggctgttttcaagaagatacattccactggtgatatctcaaaaagcgatatctgtcagctttacatggtgtggaaaccgctttgccacggttgccatggtaactccaaggactcaccaaattgtttctgcgggttgattcccattggcaatggggttcgtaaatctggcctctggcagaaaactcaggaaattatccgtggtcttggtcctaatccatctagtgatcttcgtgattctagcgagacacctgctgggttgactaacctgggagcaacttgttatgcgaatagtattctacagtgcctttacatgaacacatccttccgatctggtattttctcattggatctggatgttttgaagaagcatccagttttagatcagctggttcggttgtttgcacaactacagtctagcaaaatggctttcattgattcaacgccttttattaaggcattggaattagacaatggtgtccagcaggatagccatgaatttctcaccttgtttctgtctctccttgagcaatcactaagtcactccaaggtccctggaactagagaaatagtgcaacatctgtttcgtggcagtgtatctcatgtaacaaggtgctcatcatgtggaaaggattcagcagcatcttcaaaatctgaagacttctatgaactcgagctgaatattaaaggtttcaataatttggaagaaagtctagacgactactttagtgaagaaggactagttggggagaatcaatacttttgtgaatcatgtcagaaaagggtagacgccactcgctgcataaaacttagatcacttcctccagttgttaattttcagctgaagcgttatgtattcctcccgaagacaacaaccaagaaaaagatttcttcgtctttcagtttcccagggcagcttgatatgggaaaacggttgtcaaaccctacatctagttatacatatgaactagctgctattttaattcacaagggtaccgctgctaatagtgggcactatgtggcacatataaaagatgaaagcaatgggcagtggtgggagtttgatgatgaaaccgtatccaaacttggtttgcacccttttggtgaaaacttaggaaaaacatcaaataaagatgataggaaacctcaaggcatttctatagaaggttctgttacgaacaataacaatggacaccaggaggctgcatcatcttctagccccggggagatgttttcatctacagatgcttatatgctgatgtacaaatgtaccaataaggatggcaatgctactgaaagcaacaaaattatggaattcaataatagtttgcttccacaccattttcttgatgaaattaatgaacaaaatgcatcgtgtatgaaatcctgtgaagaataccaaagcaagaaaggcagccatttggcatatataacagagaggcgccaagaagtaaaatctattctgatagaagcacccgcaaatccagaggacaattcatacttttggatttcaacagactggcttcgccaatgggcagataacatcactcctcccttatccattgacaatggaccaattcaatgtgagcatggaaaagttccagtgtctaaactcacatcaatgaagcgtctatcagctgcagcttggcagaaattattttcaaaatatggaggggggccaacattgagtggtgatgatttttgcatggtgtgtcttaaagatggggcgaaaaatgcagtatctgctgatgtctaccgtgaccgcaaagaatcatttaaaaaccttgcagaagcagctcttgctggtagttgttcagatagtccttcttacttcatctcaaaggcatggttgactcattggctccgcagaaaaaatgctggtatcctttctgatgctgataatggaccaacgagtgctttaagatgtcgccatgggtatctcctgccggagcatgctccaggagcaaagcgggtatccgtaccagagagcctgtggttatttctctatcaaaccatcagcgagaaggttgatgatgttgttacttttccatcagactgtcaaccatgcaaaatctgtagtcaggaattgtctgatgttgcttctgttgagggtaatcttagagcagtgaaacttgagcaacgatacaaacatgaaaagttaatatctgggaagagctttgcacttcgtcctggtgaaaaatattatttggttccttcatcttggttgtcagagtggagagcttatattacaacgacgggaaaaaatatttcttcactaccagaacctcaaagtcttgaagctgttgtcagttcacttatatgtgaaaagcattcgagattgctgcaaaagcctttggatcttgtttgtaagcgcggaagcatcactcagaaaacatcaaataacgatggtttaacaatcatcccagagtatgattggaagttattctctgaggagtggagtgcgacgcctggaaaaggtatatctgctgaaatcgcttttagcaaggacgctcaagataaagtgcacggttcctctgaagcaatgccgattacggatggaaatttggaccagtctctttatggtgcaaatgacgattttggggccagagagccctatgtcagaactgatcctgaggtttgtgaagaatgtgttggagaaagagagagctgtgcattggtgcagaagctcaactaccagaatgaagatatccacgtttattttgtccgtggaaaagcaccaccaaagtctatcaaagaagcatctaaagatgttcctgtatcagatcgtcggatttcaaagcgttccaggaggacaagctctgggaattcaatcagtttgaaagtctctggttccacatccgtctatcagttgaaactcatgatatgggaatctttagggatcgttaaggagaatcagaagcttcacaaaggaaatgttgagattgaaggtgacttggctactcttgccgacaagagtatctttcctggggatgttctttgggtcagagactctgaaatctttgagaaccgtgacatagcagatgagatttcagagcagaagggtgatatactgcaggttgaggaaggctttagagggactcttttgacatcaagtgtttcagcacagctttgtcagggcataacatttagtgaatgagtttcttccgtgagatatatggctgcacatacctgttggcataagctagttaaggtctctagaaggtacctgattgcttcagagggtagtcaatcatgtcagttctagcagtcctggcgaaaagttatgtctatgcttctctccatgctgtcacactaaggatgtcaaatgtatcctcgcttgaggaaaacggaagaaggctcttccttcttccctaatgtaatggtgacttaggtataccactgggctacggggctgtgatgcctgcatgcttagtgtttttttttcctgttgttggccatgcgggaccgtgagggctacgagcgacttgcattgtacttggtggttgtgcacacatcggcttattgacaggtagattactatgaaagtctcaaggcgatgcagagcattgtgcagttttttcatgccttttattttaccttagatcctaagggtgtgcaatgccatttgatatatatatacctttatgatcactctggtttgctcacctctcgttgctcatagaacagagttacgaagtcgaaaccttttccttcatttagaaaatcaatcgttattttttctg

SEQ ID NO: 91943 - DNA, 3986 bp, Zea Mays
gtccgctcggcccgtcgccgcgctcgctcctctggtcggtggacggcaccgtgccgagtgccgagtgccgaccggtcggaacggaagaaaccatccgctcatccccgttttctcttgtcccgttcaccacgcctgctctctcccttgtcatcttctggcgacgactgggcgactgccgacggccgctgctgccgccggccgctgctgccgccctagaccaggtggccagctcttgtccgagaccgttgctggcgacgagaatccaatagcttaacccctatgcaccaagggaagtcggatcctcattgctggtacaatgagcaggccgaatacccgcaacaagaacaagaggcctcgcgctgatgaatccaatagcccatctgtggctgttttcaagaagatacattccactggtgatatctcaaaaagcgatatctgtcagctttacatggtgtggaaaccgctttgccacggttgccatggtaactccaaggactcaccaaattgtttctgcgggttgattcccattggcaatggggttcgtaaatctggcctctggcagaaaactcaggaaattatccgtggtcttggtcctaatccatctagtgatcttcgtgattctagcgagacacctgctgggttgactaacctgggagcaacttgttatgcgaatagtattctacagtgcctttacatgaacacatccttccgatctggtattttctcattggatctggatgttttgaagaagcatccagttttagatcagctggttcggttgtttgcacaactacagtctagcaaaatggctttcattgattcaacgccttttattaaggcattggaattagacaatggtgtccagcaggatagccatgaatttctcaccttgtttctgtctctccttgagcaatcactaagtcactccaaggtccctggaactagagaaatagtgcaacatctgtttcgtggcagtgtatctcatgtaacaaggtgctcatcatgtggaaaggattcagcagcatcttcaaaatctgaagacttctatgaactcgagctgaatattaaaggtttcaataatttggaagaaagtctagacgactactttagtgaagaaggactagttggggagaatcaatacttttgtgaatcatgtcagaaaagggtagacgccactcgctgcataaaacttagatcacttcctccagttgttaattttcagctgaagcgttatgtattcctcccgaagacaacaaccaagaaaaagatttcttcgtctttcagtttcccagggcagcttgatatgggaaaacggttgtcaaaccctacatctagttatacatatgaactagctgctattttaattcacaagggtaccgctgctaatagtgggcactatgtggcacatataaaagatgaaagcaatgggcagtggtgggagtttgatgatgaaaccgtatccaaacttggtttgcacccttttggtgaaaacttaggaaaaacatcaaataaagatgataggaaacctcaaggcatttctatagaaggttctgttacgaacaataacaatggacaccaggaggctgcatcatcttctagccccggggagatgttttcatctacagatgcttatatgctgatgtacaaatgtaccaataaggatggcaatgctactgaaagcaacaaaattatggaattcaataatagtttgcttccacaccattttcttgatgaaattaatgaacaaaatgcatcgtgtatgaaatcctgtgaagaataccaaagcaagaaaggcagccatttggcatatataacagagaggcgccaagaagtaaaatctattctgatagaagcacccgcaaatccagaggacaattcatacttttggatttcaacagactggcttcgccaatgggcagataacatcactcctcccttgtaagttcacaacagatgctccctccatacatccattgacaatggaccaattcaatgtgagcatggaaaagttccagtgtctaaactcacatcaatgaagcgtctatcagctgcagcttggcagaaattattttcaaaatatggaggggggccaacattgagtggtgatgatttttgcatggtgtgtcttaaagatggggcgaaaaatgcagtatctgctgatgtctaccgtgaccgcaaagaatcatttaaaaaccttgcagaagcagctcttgctggtagttgttcagatagtccttcttacttcatctcaaaggcatggttgactcattggctccgcagaaaaaatgctggtatcctttctgatgctgataatggaccaacgagtgctttaagatgtcgccatgggtatctcctgccggagcatgctccaggagcaaagcgggtatccgtaccagagagcctgtggttatttctctatcaaaccatcagcgagaaggttgatgatgttgttacttttccatcagactgtcaaccatgcaaaatctgtagtcaggaattgtctgatgttgcttctgttgagggtaatcttagagcagtgaaacttgagcaacgatacaaacatgaaaagttaatatctgggaagagctttgcacttcgtcctggtgaaaaatattatttggttccttcatcttggttgtcagagtggagagcttatattacaacgacgggaaaaaatatttcttcactaccagaacctcaaagtcttgaagctgttgtcagttcacttatatgtgaaaagcattcgagattgctgcaaaagcctttggatcttgtttgtaagcgcggaagcatcactcagaaaacatcaaataacgatggtttaacaatcatcccagagtatgattggaagttattctctgaggagtggagtgcgacgcctggaaaaggtatatctgctgaaatcgcttttagcaaggacgctcaagataaagtgcacggttcctctgaagcaatgccgattacggatggaaatttggaccagtctctttatggtgcaaatgacgattttggggccagagagccctatgtcagaactgatcctgaggtttgtgaagaatgtgttggagaaagagagagctgtgcattggtgcagaagctcaactaccagaatgaagatatccacgtttattttgtccgtggaaaagcaccaccaaagtctatcaaagaagcatctaaagatgttcctgtatcagatcgtcggatttcaaagcgttccaggaggacaagctctgggaattcaatcagtttgaaagtctctggttccacatccgtctatcagttgaaactcatgatatgggaatctttagggatcgttaaggagaatcagaagcttcacaaaggaaatgttgagattgaaggtgacttggctactcttgccgacaagagtatctttcctggggatgttctttgggtcagagactctgaaatctttgagaaccgtgacatagcagatgagatttcagagcagaagggtgatatactgcaggttgaggaaggctttagagggactcttttgacatcaagtgtttcagcacagctttgtcagggcataacatttagtgaatgagtttcttccgtgagatatatggctgcacatacctgttggcataagctagttaaggtctctagaaggtacctgattgcttcagagggtagtcaatcatgtcagttctagcagtcctggcgaaaagttatgtctatgcttctctccatgctgtcacactaaggatgtcaaatgtatcctcgcttgaggaaaacggaagaaggctcttccttcttccctaatgtaatggtgacttaggtataccactgggctacggggctgtgatgcctgcatgcttagtgtttttttttcctgttgttggccatgcgggaccgtgagggctacgagcgacttgcattgtacttggtggttgtgcacacatcggcttattgacaggtagattactatgaaagtctcaaggcgatgcagagcattgtgcagt

SEQ ID NO: 91944 - DNA, 897 bp, Zea Mays
gcattctagctattatagctagctatagctatttcttttcgcctctcccacccgcccggtcgcccggagtagcaagcgtctccgatccgatccatcgtgcgagcatatccacggcgatggaggcgagagcggccatgagctggtactgcggctcccttctggccgtggccatcgcgctgttcctgtccgtgtccctcggcgtgcgcgccgccggcgccggcgccggcgttgacatcaaggtgtcgtgtgcagcgacgccggacccggacgtgtgcctgcgcgcgctccaggcggacagcgactccaagaccccgcgggacctggcggaggcggcgctccgcgcggcgacgaccgcgggcggcgcggcgggcgactacgcgcggcacgagatggacgtggtgaaggacaacgacatgtggcagtgcctgaacgagtgcgccggggagatcgaggaggcgctggaccacctggacgacaccgagggcggcctcgacgacggcaagctccacgacgtgaagctgttcctggacacggcggaggaggacacgtggtcctgcgacgtctgctgcaagcacgccccatccacgcccgtcaaaaccacgctgctcgccaagaacaaggacttcgaggcgctcatgcgcgtcgcccacgcgctcatcaagcgggccaccggtggcgccggtgacgcgccggcgccggcgcccgccgcccgcgccaagattcattaattgattattaattcgttgattaatccgcggagcgccatacatatctcgatccatattgtatttgtttgtttatagtatatatcgatgtggggtacgtttatatgtacctgccattgtcatttgattaggtacgttgttgcaaacttttaccacagtatttatcttcaca

SEQ ID NO: 91945 - DNA, 2341 bp, Zea Mays
ggaccacacacaaaccgccgccgccgctaccttcaccactgcggactgcaccagctgcccgccgactactccgtttctcttcctagtacattgccgcgtcgaaggcgaggtcctcagcagcgccggcggactccgctcgcacgccatactcagcctactccgtcttcccctgtctagcagacaccctcttcccctctccactcccaatcttatcgtcgcctccctcgacgtcgctgctgcctccacttcaccatggcgcttcacgccccggtcctcgttctgaaggactcgctgaagcgggagtctggcgcgaaggttcaccaagccaacatccaggcggccaaggctgtcgctgacatcatacgcactacattgggtcccagatccatgctgaaaatgcttctggatgctagtggaggtattgtggttactaatgatggtaatgccattttgagggaaatagacattgcacaccctgctgccaagtctatgatcgaactaagtcgtacacaggatgaagaagttggtgatggcactacatctgtcattgttctagctggagagatgctacatgttgcacaggcattcatcgacaagaactaccatccaactgttatttgccgagcatataccaaagcgcttgatgatgctattgctgtacttgacaaaattgcaatggctgttgatgtgaatgatcgtggggcaatgctaggccttgtgaagagctccattggtacgaaattcactggccagtttggtgaccttattgctgaccttgctattgatgctactacaacagcaggtgttgaccttggtcagggtatgcgtgaagttgatatcaagaaatacattaaagttgaaaaggttcctggtggtcagttggaggattctagagtccttaaaggagttatgatcaataaggatgtcgtggctcctgggaaaatgaggagaaagatagtaaacccccgtatcatcctgttggactgccctgttgagtataagaaaggagaaaatcagaccaacgctgagttgatgaaggaagaagattggcaggttctgttagagatggaggaagaatacataaagaacctgtgcggtcaaattctaaaattcaagcctgatttagtcataactgagaaagggctcagtgatctcgctatccattatttgagcaaggctggggttagtgcaatccgtagacttaggaaaactgacaacaacaggattgctaaagcttgtggagcagttatagtgaacaggcctgaggagctccaagaatctgatgttggaacaagagctggcctgttcgaggttaagaagataggtgatgagttcttttcctttattgttgactgtaaagatcccaaggcatgtactgttctgttgaggggagcaagcaaggatgtattgaatgaagttgagagaaacctgcaggatgccatgtccgttgcaaggaacattttgaaaaatccaaaactccttcctggaggtggcgctacagagctgactgtatcagcaacactgaagcaaaagagttcttcagttgaagtggccctatgaagctgctgctctagcatttgaggcaattccaaggactttggcccaaaattgcggtttgaatgttattaggataatgacacaacttcaaggaaagcatgctaatggtgaaaatgcgtgggttggcattgatggaaggactggtgatattgtcgatatgaaagagcgaaagatctgggattcctacagtgttaaagcacaaacgttcaagacagcaattgaggctgcttgcatgcttttgagaatcgatgacattgtcagcggtatcaagaagaagcaggctcctggagcctcagctccaaagcaaccccaaattgaaactgagggcgatgctgacaatgagcagatgattccagagtagaggctgtggcgaacctgcactggcaaagttatttactagtgtcaaggtagcacttcgagcagagttcattttggtggttagccttagcttaaagatgcaccttgttttatatagtttgatgagtggtacgagggttttgggatccaggttttgagtgtggttgctgctcgttttgatttggactgatgaaaaagcagtgaaactagcctttatttatggctaactttgcctgttgtatgccgcaaatctactttttttcttggcaacgtctcgtttcgcacgatccaaactgagtcttaatgctgtctttttttcatgacccgagcttggtcttaccattacaactttacaacttcgggtcattggatcgacggcacttgatgagtcattattgttaaaagctttctttgatcctaccaatac

SEQ ID NO: 91946 - DNA, 2361 bp, Zea Mays
cccaactctggaccacacacaaaccgccgccgccgctaccttcaccactgcggactgcaccagctgcccgccgactactccgtttctcttcctagtacattgccgcgtcgaaggcgaggtcctcagcagcgccggcggactccgctcgcacgccatactcagcctactccgtcttcccctgtctagcagacaccctcttcccctctccactcccaatcttatcgtcgcctccctcgacgtcgctgctgcctccacttcaccatggcgcttcacgccccggtcctcgttctgaaggactcgctgaagcgggagtctggcgcgaaggttcaccaagccaacatccaggcggccaaggctgtcgctgacatcatacgcactacattgggtcccagatccatgctgaaaatgcttctggatgctagtggaggtattgtggttactaatgatggtaatgccattttgagggaaatagacattgcacaccctgctgccaagtctatgatcgaactaagtcgtacacaggatgaagaagttggtgatggcactacatctgtcattgttctagctggagagatgctacatgttgcacaggcattcatcgacaagaactaccatccaactgttatttgccgagcatataccaaagcgcttgatgatgctattgctgtacttgacaaaattgcaatggctgttgatgtgaatgatcgtggggcaatgctaggccttgtgaagagctccattggtacgaaattcactggccagtttggtgaccttattgctgaccttgctattgatgctactacaacagcaggtgttgaccttggtcagggtatgcgtgaagttgatatcaagaaatacattaaagttgaaaaggttcctggtggtcagttggaggattctagagtccttaaaggagttatgatcaataaggatgtcgtggctcctgggaaaatgaggagaaagatagtaaacccccgtatcatcctgttggactgccctgttgagtataagaaaggagaaaatcagaccaacgctgagttgatgaaggaagaagattggcaggttctgttagagatggaggaagaatacataaagaacctgtgcggtcaaattctaaaattcaagcctgatttagtcataactgagaaagggctcagtgatctcgctatccattatttgagcaaggctggggttagtgcaatccgtagacttaggaaaactgacaacaacaggattgctaaagcttgtggagcagttatagtgaacaggcctgaggagctccaagaatctgatgttggaacaagagctggcctgttcgaggttaagaagataggtgatgagttcttttcctttattgttgactgtaaagatcccaaggcatgtactgttctgttgaggggagcaagcaaggatgtattgaatgaagttgagagaaacctgcaggatgccatgtccgttgcaaggaacattttgaaaaatccaaaactccttcctggaggtggcgctacagagctgactgtatcagcaacactgaagcaaaagagttcttcagttgaaggtgtggaaaagtggccctatgaagctgctgctctagcatttgaggcaattccaaggactttggcccaaaattgcggtttgaatgttattaggataatgacacaacttcaaggaaagcatgctaatggtgaaaatgcgtgggttggcattgatggaaggactggtgatattgtcgatatgaaagagcgaaagatctgggattcctacagtgttaaagcacaaacgttcaagacagcaattgaggctgcttgcatgcttttgagaatcgatgacattgtcagcggtatcaagaagaagcaggctcctggagcctcagctccaaagcaaccccaaattgaaactgagggcgatgctgacaatgagcagatgattccagagtagaggctgtggcgaacctgcactggcaaagttatttactagtgtcaaggtagcacttcgagcagagttcattttggtggttagccttagcttaaagatgcaccttgttttatatagtttgatgagtggtacgagggttttgggatccaggttttgagtgtggttgctgctcgttttgatttggactgatgaaaaagcagtgaaactagcctttatttatggctaactttgcctgttgtatgccgcaaatctactttttttcttggcaacgtctcgtttcgcacgatccaaactgagtcttaatgctgtctttttttcatgacccgagcttggtcttaccattacaactttacaacttcgggtcattggatcgacggcacttgatgagtcattattgttaaaagctttctttgatcctaccaatac

SEQ ID NO: 91947 - DNA, 888 bp, Zea Mays
cccaactctggaccacacacaaaccgccgccgccgctaccttcaccactgcggactgcaccagctgcccgccgactactccgtttctcttcctagtacattgccgcgtcgaaggcgaggtcctcagcagcgccggcggactccgctcgcacgccatactcagcctactccgtcttcccctgtctagcagacaccctcttcccctctccactcccaatcttatcgtcgcctccctcgacgtcgctgctgcctccacttcaccatggcgcttcacgccccggtcctcgttctgaaggactcgctgaagcgggagtctggcgcgaaggttcaccaagccaacatccaggcggccaaggctgtcgctgacatcatacgcactacattgggtcccagatccatgctgaaaatgcttctggatgctagtggaggtattgtggttactaatgatggtaatgccattttgagggaaatagacattgcacaccctgctgccaagtctatgatcgaactaagtcgtacacaggatgaagaagttggtgatggcactacatctgtcattgttctagctggagagatgctacatgttgcacaggcattcatcgacaagaactaccatccaactgttatttgccgagcatataccaaagcgcttgatgatgctattgctgtacttgacaaaattgcaatggctgttgatgtgaatgatcgtggggcaatgctaggccttgtgaagagctccattggtacgaaattcactggccagtttggtgaccttattgctgtaagcatctttcttccatgtggaacttcaacaattccctccaaattatagttcactttggttttgtcccaagtcaaacttcttttactttgaccaagtttaaaaaaa

SEQ ID NO: 91948 - DNA, 1065 bp, Zea Mays
cccaactctggaccacacacaaaccgccgccgccgctaccttcaccactgcggactgcaccagctgcccgccgactactccgtttctcttcctagtacattgccgcgtcgaaggcgaggtcctcagcagcgccggcggactccgctcgcacgccatactcagcctactccgtcttcccctgtctagcagacaccctcttcccctctccactcccaatcttatcgtcgcctccctcgacgtcgctgctgcctccacttcaccatggcgcttcacgccccggtcctcgttctgaaggactcgctgaagcgggagtctggcgcgaaggttcaccaagccaacatccaggcggccaaggctgtcgctgacatcatacgcactacattgggtcccagatccatgctgaaaatgcttctggatgctagtggaggtattgtggttactaatgatggtaatgccattttgagggaaatagacattgcacaccctgctgccaagtctatgatcgaactaagtcgtacacaggatgaagaagttggtgatggcactacatctgtcattgttctaggtatgggtatttttttgtgaaatttcttttcggaaagttgatggctatgatgaacatcattgcaatttatttgcatcaaactaaagcagtgctatttgcagtatcatccaattatggtgtaacagttgaatctgttttgagtcgagcttagctgttggctgttactatgtgcctcaactagtatttctcataagcatgttaagaacaaacggtttgtgtgcaaattgatgcctactaataaaattctagataatctctgccattgtttttgaggcatcatataggcgtctaggcacccccggtgctgggtgtcacaggatgccacaagaacttttttctgtctccgggccaaccccatttccattaatcgcccgacaaaatacagatgtttgtgatcaaaccaatataagtgagaggggaaacataagtgaggggaaacagaccacaaaacattatcaaaccttattaaaatgacagtctgtttcagatcatcattctag

SEQ ID NO: 91949 - DNA, 804 bp, Zea Mays
atagctctcgcacaaaccaaagagggcacaaatattccgtacaggtcatgtcccttgtataatgtattgccatgccaatcagagaccaagacagctccaacgacagatttcaggtcggtcatccatcttatgctactttaggagtcacccaaaaatatgaactttttgcccatataatattctagtgatttatagtatcccttcccttaaccaaagttgaatagcaggaattacacgtggaccaattacttggcatcacatcaaatgagcagcgtggaggtgagatcggcgcccagatcgtgtgaagaatcagactattccggatgagatcagccagggtacctcacctttcgattcagaggtggatgcaggagcaacgcgaagaggaggctgatggcagaggatgtgaggatgcggaggcaaagctcctcagccgcatgccagacgcggcccgtgtattcccgccagcctcggctgacccccgtggcggccatgcgaggcgaggggggtgcacggtgccgaacgcggagggagggagcgattccgagaggagaatgaggagccatgcatcgggggcacagcaggggcgagatccgcgatgactgctcaggagtggtcgagatccgtggttgcctgcttgggcgtggggaaggatccggcgggagctgcggctacctgctcgagcgtggggcaggggcacagtgtgcgttgggcgagatacgcgggcgtgggggcgagatacgcggacgcaggggcatggcggtggtggagcctaggtgtggacgctgatgtgggcggggggca

SEQ ID NO: 91950 - DNA, 780 bp, Zea Mays
atagctctcgcacaaaccaaagagggcacaaatattccgtacaggtcatgtcccttgtataatgtattgccatgccaatcagagaccaagacagctccaacgacagatttcaggtcggtcatccatcttatgctactttaggagtcacccaaaaatatgaactttttgcccatataatattctagtgatttatagtatcccttcccttaaccaaagttgaatagcaggaattacacgtggaccaattacttggcatcacatcaaatgagcagcgtggaggtgagatcggcgcccagatcgtgtgaagaatcagactattccggatgagatcagccagggtacctcacctttcgattcagaggtggatgcaggagcaacgcgaagaggaggctgatggcagaggatgtgaggatgcggaggcaaagctcctcagccgcatgccagacgcggcccgtgtattcccgccagcctcggctgacccccgtggcggccatgcgaggcgaggggggtgcacggtgccgaacgcggagggagggagcgattccgagaggagaatgaggagccatgcatcgggggcacagcaggggcgagatccgcgatgactgctcaggagtggtcgagatccgtggttgcctgcttgggcgtggggaaggatccggcgggagctgcggctacctgctcgagcgtggggcaggggcacagtgtgcgttgggcgagatacgcgggcgtgggggcgagatacgcggacgcaggggcatggcggtggtggagcctaggtgt

SEQ ID NO: 91951 - DNA, 1506 bp, Zea Mays
ctagctgtcttgagagagctgagccaggagcggagggaagaataccacgcgctgggtccgaaccggagctggactggattcttcaaggcttccattccattccatgggggttcggttttctggagtaggaaagggaggtagaggtggacgccagggttcagcgataccacctcaagaaagcaggcctattggaatagcggaaatgaacagcagcggggagtacgatgctgcgttcgcagccacaattgcagcagcagcatttgcaatcgctgcccgtgaggataagctcgcggctcaaaagaactccgtccccatcgaggaggtgaccccttccctatcgccagtcaatagagctgaaggcaccaaaaagcctgcaggaggcaacaaaatcgcgagatggtttagcggcaaggagcctatagaacacgacgacgacgacgaggggccagttaatgtatcggtaaggaggccactgaaaccagcacctggaaagcctgaggacgtgcctgcagatcatcacaaggtggcacccaggatgcttgagacttctctgggtgtgaggaagggttcgggatcttccagcaggtcggcagagaggaaatggagcaaggagtttgagcaagaacaggctgttcagaaagcgccctcggccgtgaggccagccacgtcataccgctctggacggaatggagaaggcgcggcaggagtagctgctactggcggcacgggatctaaggctgatgaatgggagaaggcaaagcttggaagagttagagaggagtatgagaagatgatggagaccatagccgaatgggaaactgagaagaaggtgaaggcgagacgccaaaaagagcagaaagagaccgagctggacagaaagagagaaaaggcactagaagaatacaacctggagatgacaaggatcagcaaaatctctggaggagcaagggcgatggcggaggagcgaaaatacaacgataggaaaaagatcagagagaaggcgcgcaagatgcgatccacaggaaagcctccccgcacgtgtgcttgcttttgagaacagctgcatacgctgaaatttggaaccaaaaccaaatgaaggacgtcattttggacggttgtaaaaggcacgcaatagtgacgttctgtattgtaatatgtatttggctttgacaagttatgagtgcacattccactgaaggcaacatcaacatatttttgaagggtgtggagttaaggaataaaaaaaaagatccaccatgcatcaacattcaagatgaagcatggagtaggaactgccccaagaacaacgagaacgaaaacatatattcatcataaaggtcaagatttaggattcccattcaaggtataaggtgtgagactagtatcatccaattcaagtgctgaggttcttcttgagctttggccaccagacttctcagattcattcctatttttgttgattgttgtctcctcatcctgtgtaccagattcatctgattccactta

SEQ ID NO: 91952 - DNA, 1574 bp, Zea Mays
acaaagggattaggcgcactccacccatcatctagctgtcttgagagagctgagccaggagcggagggaagaataccacgcgctgggtccgaaccggagctggactggattcttcaaggcttccattccattccatggggtaaagcgatcccattcccactcctatcgtctgcctccaagacaacagttttaatctgcttgcttgcgctctgctgcctctggttcacgttcaccgcctctattccatggggtaaagcgagcagttttaaatacgagaggccctcgcttgtcactgaagccgcggcttcttgtgccttgcaacctgccgttggggcttcttctctacaaatacgttgcgcgccatggatggcgactcgaagaagctgaggcttcgggttgtcttctttttttctccgtaaaagctgaggtgaaaaaagggttcggttttctggagtaggaaagggaggtagaggtggacgccagggttcagcgataccacctcaagaaagcaggcctattggaatagcggaaatgaacagcagcggggagtacgatgctgcgttcgcagccacaattgcagcagcagcatttgcaatcgctgcccgtgaggataagctcgcggctcaaaagaactccgtccccatcgaggaggtgaccccttccctatcgccagtcaatagagctgaaggcaccaaaaagcctgcaggaggcaacaaaatcgcgagatggtttagcggcaaggagcctatagaacacgacgacgacgacgaggggccagttaatgtatcggtaaggaggccactgaaaccagcacctggaaagcctgaggacgtgcctgcagatcatcacaaggtggcacccaggatgcttgagacttctctgggtgtgaggaagggttcgggatcttccagcaggtcggcagagaggaaatggagcaaggagtttgagcaagaacaggctgttcagaaagcgccctcggccgtgaggccagccacgtcataccgctctggacggaatggagaaggcgcggcaggagtagctgctactggcggcacgggatctaaggctgatgaatgggagaaggcaaagcttggaagagttagagaggagtatgagaagatgatggagaccatagccgaatgggaaactgagaagaagaccgagctggacagaaagagagaaaaggcactagaagaatacaacctggagatgacaaggatcagcaaaatctctggaggagcaagggcgatggcggaggagcgaaaatacaacgataggaaaaagatcagagagaaggcgcgcaagatgcgatccacaggaaagcctccccgcacgtgtgcttgcttttgagaacagctgcatacgctgaaatttggaaccaaaaccaaatgaaggacgtcattttggacggttgtaaaaggcacgcaatagtgacgttctgtattgtaatatgtatttggctttgacaagttatgagtgcacattccactgaaggcaacatcaacatatttttgaagggtgtggagttaaggaataaaaaaaaagatccaccatgcatcaacattcaagatgaa

SEQ ID NO: 91953 - DNA, 1457 bp, Zea Mays
acaaagggattaggcgcactccacccatcatctagctgtcttgagagagctgagccaggagcggagggaagaataccacgcgctgggtccgaaccggagctggactggattcttcaaggcttccattccattccatggggtaaagcgatcccattcccactcctatcgtctgcctccaagacaacagttttaatctgcttgcttgcgctctgctgcctctggttcacgttcaccgcctctattccatggggtaaagcgagcagttttaaatacgagaggccctcgcttgtcactgaagccgcggcttcttgtgccttgcaacctgccgttggggcttcttctctacaaatacgttgcgcgccatggatggcgactcgaagaagctgaggtagaagcggtgcacgcagcagggcctagagcctccgtctgctgaagggtttgatcctgatttcatctatgtgtctggcaggcttcgggttgtcttctttttttctccgtaaaagctgagggttcggttttctggagtaggaaagggaggtagaggtggacgccagggttcagcgataccacctcaagaaagcaggcctattggaatagcggaaatgaacagcagcggggagtacgatgctgcgttcgcagccacaattgcagcagcagcatttgcaatcgctgcccgtgaggataagctcgcggctcaaaagaactccgtccccatcgaggaggtgaccccttccctatcgccagtcaatagagctgaaggcaccaaaaagcctgcaggaggcaacaaaatcgcgagatggtttagcggcaaggagcctatagaacacgacgacgacgacgaggggccagttaatgtatcggtaaggaggccactgaaaccagcacctggaaagcctgaggacgtgcctgcagatcatcacaaggtggcacccaggatgcttgagacttctctgggtgtgaggaagggttcgggatcttccagcaggtcggcagagaggaaatggagcaaggagtttgagcaagaacaggctgttcagaaagcgccctcggccgtgaggccagccacgtcataccgctctggacggaatggagaaggcgcggcaggagtagctgctactggcggcacgggatctaaggctgatgaatgggagaaggcaaagcttggaagagttagagaggagtatgagaagatgatggagaccatagccgaatgggaaactgagaagaaggtgaaggcgagacgccaaaaagagcagaaagagaccgagctggacagaaagagagaaaaggcactagaagaatacaacctggagatgacaaggatcagcaaaatctctggaggagcaagggcgatggcggaggagcgaaaatacaacgataggaaaaagatcagagagaaggcgcgcaagatgcgatccacaggaaagcctccccgcacgtgtgcttgcttttgagaa

SEQ ID NO: 91954 - DNA, 2604 bp, Zea Mays
cggaagagagaggaggaaggggagaagaagcaagcgaagcgagacgagagcagagcattgccgcgtagccgccccccgctcccggaagacaaatcaatccccaatcccccccgtcccccaaaatcccctggggattcaccgacaggcccccccgcgccgccggcccccgtatctgcactcctcgcacgcggcgacgcgcattgctatttcattccctctcttttcttcttcccctattggcatcacccgtgcgattagcatgtctctgcccaatgccaccgcctcgccgccgccgtcgccggaaccctaggccgcaggactccgagctcccgtcggcgggggagggggaggatgcagctgcggatctcgccgagcatgcgcagcatcaccatctccagcagcaatggcgtcgtcgactccatgaaggtgcgcgtcgcgccgcagccgcccccgccgccgccgccgctgcacggggccgcccggcgcggcgggggaggtggaggggggtggtactggcgcgcagtcgcgttcccgctcgtcgtcgcgctcggctgcctcctgcccttcgccttcatcctcgccgccgttcccgcgctcgaggcaggcggaagcaagtgctcctccgtcgattgcttggggaggcgaatagggcctagtttccttggtaggcaggggggtgattctacaaggctggtgcaagatctgtatagaacttttgatcaagttaacaacgaggaatccccatccgatgaaaagttaccagaatcattcagggattttcttttggagatgaaggataaccattatgatgctagaacatttgctgttagattgaaagctacgatggaaaacatggataaggaggtaaagaggtcaaggttggcagaacagctgtataaacattatgctgcaactgctattcccaaaggaatccattgcttgtctctgcgccttactgatgaatactcctcaaatgctcatgcacggaaacagttaccaccaccagagttgctacctttgctttctgataattccttccaacattacattctagccagtgataacattcttgctgcttcagttgttgtgagctcaactgtacgatcttcctcagtgcctgagaaagtagtcttccatgttattactgataagaaaacatatcctgggatgcattcatggtttgctcttaattccgtatctcctgcaatagttgaagtaaaaggtgttcaccaatttgactggctgacaagagaaaatgttccagtactagaggctatagaaagccatcgtggagtcagaaatcactatcatggagatcatggaacagtttccagtgcaagtgacaatcctaggatgcttgcttcaaagttgcaggctcgaagccccaaatacatatccctgctgaaccatctccgcatttatttgcctgagctctttcccaacctcaacaaggtggttttcctcgatgatgacattgttgttcagcgtgacttgtctcccctttgggctatcaatcttgaagggaaggtaaatggagctgtggaaacatgcagaggggaagacagctgggtgatgtctaagcgtttcaggacatatttcaacttctcgcatcctgtgatagctcggagccttgacccagatgaatgtgcttgggcatatggtatgaatatatttgatctggcagtttggaggaagacaaacatcagggatacataccatttctggttgaaggagaatctaaaatctggtcttacactctggaaatttggtaccttaccaccagcccttatagcatttaggggtcatgtgcatggtatagacccatcatggcacctgcttggcttaggataccaagacaagacagatattgagagtgtcaggagggctgcagtgatacattacaatggccagtgcaagccatggctagacattgcttttaagaacctacaaccattttggacaaatcatgtaaactactccaatgacttcgttagaaactgccatattttggagcctgagcgtgtcaaggagtgatttgcagcaaatgctggacatagcgagggagtatagtttatggttcgcttgttggctggagaggctgattgctgctgtataagtataataggtaatcaagaaagcaaccggcattcaatacaactgaccatcccctgcgaaaactggcattcaaatatctcaggagtcttcatctgtatcataggggaacacaattcttaccatctgtatcatactgttgcatcattcttttctatactgtaactgcggaaaaggagatctgggactgggctgacctttggtcgcagaataattcagaaggctagaagattgagtgattggttgatcaagacgaagaaaggaggcggatattgtgtggtggcaagtttatatgctttccatccatccatccatttaattctttttacactcgagtcattgaaattttgttctggtagttttgtgattgatttggtaggttggagatgattgtagtagagatgccattgtttgtggagtaacctacaggatattgttacaattgttgacatactatagatgtgcagataattcttacaagagtatttgcgc

SEQ ID NO: 91955 - DNA, 1687 bp, Zea Mays
gacagggtgactccgtgaccgtgagtgcctacccgccgaccgcacgaaccccactcggtcactcccagtctccatctcccactacggcactaccccatccccggtgcggcgccaccttcccggcttccccttccgacctcccccctctcgtcacttatggtgcccagccgctcgctgcgcaactactagcgcaccgtcccctcctcagccatggccgcggcgtcgttcgcccgcgccttatgtctccacatgctcctcctcttcctcgtggttggctcggcgcgctgcaagacggtgaagagagacgtgaaagcattgaatgagatcaaatcttcactaggctggagagttgtatactcatgggtcggtgatgatccttgtgggcatggtgatctacccccctggtctggtgtgacatgttctcagcaaggggattacagagttgtgacggaactggaagtctatgctgtatcaatagttggccctttcccaacagcagtaactaacctgttggatctaagaagattggatctccacaataacaagttgacaggaccaattcccccacagattggacggttgaaacatctcaggatattgaacctgaggtggaataagcttcaagatgtgcttccacctgaaattggtgaactgaagaaactgacacacttgtatttgagcttcaacaacttcaaaggcgagattccagtggagcttgcaaacctgccagaactccgttacctttatcttcacgagaaccgcttcaccgggcgaatcccccctgaacttggaacgctaaagaacctacgtcacctcgacgtgggcaacaaccacctgacaggcactctcagggattttatcggcaacgggaacggcttcccgtccctgagaaatctataccttaacaacaatgagctgactggtgtgctgccagaccagattgcaaacctgacaaaccttgagattctgcacttgtccaataacaagatgatcgggtcgatatcgcctaagctagttcacattccaaggctgatctacttgtacttggacaataacaacttcattgggaggataccggaagggttgtacaggcatccatttctgaaggagctgtacgtacatcgaaggaaaccacttcagaccaggaaccagatcgaagggaacgcacaaggtgctggaactgcctgacgccgacattctagtctagcaagctcgtttaggggacctgaggtcttggcgtcctgcagtagtagactgctgccggtaccaggatcacttctgtctgtcgctgtactattccgtggcaaaactacagttgagaaaaaaaaattctcttggaaaaaaaagaggcaaaaaaaagtgaatagtagaggccacggtcacactgccgtcatcgttagatgagccatgagtgtacaggttgtattgttctgccctgcatcttcgctgtatgatggagatgccggtcagatgtaaagccagcacatcgcatggcaccgacagtcctggtacaactagtggccaatgatatggcctttttcggaagcaaatttggtgccaccaatgcttgagagcgtgggcatgtgggggaggagaatccgctaataccaggctggatctgccctaaactctagaactgggtcgtttctgtagtaggaacttgcaaaaaaaaaaaaagaaaaaaaga

SEQ ID NO: 91956 - DNA, 1683 bp, Zea Mays
gacagggtgactccgtgaccgtgagtgcctacccgccgaccgcacgaaccccactcggtcactcccagtctccatctcccactacggcactaccccatccccggtgcggcgccaccttcccggcttccccttccgacctcccccctctcgtcacttatggtgcccagccgctcgctgcgcaactactagcgcaccgtcccctcctcagccatggccgcggcgtcgttcgcccgcgccttatgtctccacatgctcctcctcttcctcgtggttggctcggcgcgctgcaagacggtgaagagagacgtgaaagcattgaatgagatcaaatcttcactaggctggagagttgtatactcatgggtcggtgatgatccttgtgggcatggtgatctacccccctggtctggtgtgacatgttctcagcaaggggattacagagttgtgacggaactggaagtctatgctgtatcaatagttggccctttcccaacagcagtaactaacctgttggatctaagaagattggatctccacaataacaagttgacaggaccaattcccccacagattggacggttgaaacatctcaggatattgaacctgaggtggaataagcttcaagatgtgcttccacctgaaattggtgaactgaagaaactgacacacttgtatttgagcttcaacaacttcaaaggcgagattccagtggagcttgcaaacctgccagaactccgttacctttatcttcacgagaaccgcttcaccgggcgaatcccccctgaacttggaacgctaaagaacctacgtcacctcgacgtgggcaacaaccacctgacaggcactctcagggattttatcggcaacgggaacggcttcccgtccctgagaaatctataccttaacaacaatgagctgactggtgtgctgccagaccagattgcaaacctgacaaaccttgagattctgcacttgtccaataacaagatgatcgggtcgatatcgcctaagctagttcacattccaaggctgatctacttgtacttggacaataacaacttcattgggaggataccggaagggttgtacaggcatccatttctgaaggagctgtacatcgaaggaaaccacttcagaccaggaaccagatcgaagggaacgcacaaggtgctggaactgcctgacgccgacattctagtctagcaagctcgtttaggggacctgaggtcttggcgtcctgcagtagtagactgctgccggtaccaggatcacttctgtctgtcgctgtactattccgtggcaaaactacagttgagaaaaaaaaattctcttggaaaaaaaagaggcaaaaaaaagtgaatagtagaggccacggtcacactgccgtcatcgttagatgagccatgagtgtacaggttgtattgttctgccctgcatcttcgctgtatgatggagatgccggtcagatgtaaagccagcacatcgcatggcaccgacagtcctggtacaactagtggccaatgatatggcctttttcggaagcaaatttggtgccaccaatgcttgagagcgtgggcatgtgggggaggagaatccgctaataccaggctggatctgccctaaactctagaactgggtcgtttctgtagtaggaacttgcaaaaaaaaaaaaagaaaaaaaga

SEQ ID NO: 91957 - DNA, 103 bp, Zea Mays
gaacttatccaagtgcctgaactattcaaggttcctctttcccaaattaagccatttctagtgagttttgagctatttttcatattgaatcttctgatttcat

SEQ ID NO: 91958 - DNA, 2384 bp, Zea Mays
gtagcctttctctatgacacgtgccccttcccccctcttaagctaagggacccttgggcagcccggcatcttctccaccctctgcccctctcgatttcttcttcccatctcccaatccatcgcaacccaaaccctactccaggcagatctccgtctccgccgccgctgccggcgtgagcacagcatcagatccgctgtgatggcgttccgccgcatcctatccaccgcggtgcgccgccgctcggccgtggccgccgcggcggccgggaacgcgcgcgaggcctccacggccgtcgctgcggcgccaggtgtgctcgcccccgatgcgaccgcggtgcgcgctcccgtgatgccgtatgaccgcatcgccgacgccgtcaacgccaggctccggcggctcgagcacccagacccgcgcttcctccgctacgccagccccgtgccgtcccacgcggaccacatggccatccttgcggcgccagagacccgggtcaccacactgcccaacggcctgcgcatcgccacggagtcttccctcgccgcgcgcacggctacggtcggcgtgtggatcgatgcgggcagcaggtacgagaacgaggaggcggtcggcgtcgcgcattttgtcgagcacatgctgttcaagggcacggggaagcgcagcgccgcgcagctggagctggagatcgaggacatgggtggccaccttaatgcgtacacgtcgcgggagcagacgacctactacgccaaggtgcttgacaaggacgtgccccgtgcgatggaggtcctctcggacatcctccagaactctaatctcgaccaggcccgcattgaacgtgagcgcgaagtgatcctacgagagatgggggaggttgagggacagtctgaggaagttatatttgatcatctccatgcaactgcattccaatatacatctcttggcagaccaatcttgggttctgcagagaatgtcaagtcaatcaccaaagaggaccttgagaactacattgcaactcattatacagctcctagaatggttatcacagctgcaggcaatgtgaaacatgaagacattgttgagcaggcaaagaagttgttcaataagctatcaactgaccctacaacaacaaacatgttggtcgctaagcaaccagcctctttcacgggttctgaggttcgaatcattgacgatgacatgccccttgctcaatttgctgttgctttcaatggagcatcatgggtagatcctgattctgttgcactgatggttatgcaatcaatgcttggttcatggaacaagagtgctggtggaggaaagcacatgggttcggagcttgtacagaaagcagcaatcaatgacattgctgagagtgtaatgtcattcaacatgaattacaaggacactggtctttttggtgtctatgctgttgctaaggctgattgcttggatgatttggcttttgcaattatgcatgagatgagcaaattgtcataccgggttacagaggaagatgttatccgtgcacgtaatcagctgaagtcctcaatccaactccaccttgatggttcaactgctgttgtcgaggacattggccgccagctgctgacctatggacgaagaattcctaccccagagctttttgcaagaatagatgctgttgatgcaagcactgtgaagcgtgttgcaaaccgcttcatctttgatcaggatgttgctattgctgcgatgggaccgatccaaggacttccagactacaactggttcagacgccggacctacatgctccgttactaagatcaatctgccggtgtaccatgtttacggtgtgcaaggacaaagataaaatttgcctctttcggcgtctgtatatcaaggcctcagcactgcacatcgcttgctgcgatagaggtttttttcttcttcagaatttgttttatttcttttcttgctcagaatccacaaatctgccaataatgataggcaggttcgactgacgtggcttacttgggtggtcagcctatgttatttttcttacaatgagtcatgacccttaccgttccatcttttgttggaaggtttttactttggcaaataatttgatgtggctcgttatatgtaaagatggtacagttttagcttgtgcaattttttttataccttgttggaaggttattacaaagagcagataactgttgcgagaactaagcagtttgtactgctcccaacccttgtaaaccaagtgacgtgcacgttccccacttgcaactggccgacggacgtggtgtacatgcgggatccaatggcctcctcgccatgactcgactcttcacttgtatatatatatgatgggaatgcaataaagaaacagtgccctcgcgttcattta

SEQ ID NO: 91959 - DNA, 2054 bp, Zea Mays
ttctcatcgtcgccttcacggaaacatctcgtcgacccaaatccatccatccacccacaaccacaaggcgaaatccacgatccagtcaaacccccgccgcgcaccgagctccaaaccctatcgatgtcgacggcggcggccacgaagactccgaccaagcccctggccgcggctgccaggactccgaccaagccccagccccccgcggtggccaagacgccatgcctgtctcgcgcgcggccctcccacgcgtccgagaactccaaccccaacatcccgggcacgccgcctcccccgcagtcgacgccgtccaagcccgtcctcaagtccccgccgcccgcgggcgccagatccgccaccgcgaggaagaagccctccacgcccgcgccgccgccggagcgggagcggcgattcctcgtggcgaagaagggcgcgcggcggaggcgcaacgtcgcgaccgtgggaggcggcgggggagagatcgacttcgacaagtgccgcgaggctgcccgcgaggcgctgcgcgcgtcgcagggtgacttcttccgcaaggagctcgccgcgtctaccgccaccggagaggagcaactgggacaggaggcggaggaggtgaagcaggtggctgaagagggtgtggaaggtggagcactcgaggagcggccagaggaggggaccgacgcggagttggaggggagcagcaaggttagggcgatgaggtctaaggcgatggcgaagacggtgaccagcgttccagaacctggctctggccgcgtaaaaaatatggtgcaggccttcgagagcctgctcaacatctcagaaaggtccggtgatggctcacgggcgctgcccgggttgcagctgtggaaggaggagtctgagagtaatctggggttcccaccattgtcggtattctcttcggctgatttccagaatgcagggtctgatagactctgctcttcgctagatggaaacaccgtcaggttgacctgggacagcaggacatcggctggcgagggtaggagcaggcgaaactcatctgagtcaataaggagcagaacatcggctggcgagcgcaggagcaggagaaattcatcggaatcactaaggagcagctggaacaaaaagctcaaggtcaccagccagcatccattcaagctgagaactgagcaaagaggaaagtttaaggaacagcagttcgttcagaaggtgcaagagatgcttgtagaggaagagaataaacgtattcatattgcacaaggattgccatggactaccgatgaacccgagtgtttgataaagcctgcagtcaaagaaagaactgagccggtagaccttgttttgcatagcgatgtgcgtgcgcttgaacgtgcagaatttgatcagcatgttttggaaaggaacaagttcgctgagcaacaaagactagaatgggagaggcaacaggaattagaggaagaagaaaggataaggcaactgaggaggaccgagctggttcctaaagctcaacccatgccatactttgaccgccccttcatccccaaaaggtcgactaaaccggctacagttcccatggaaccgaaattccacctcaggccagaaaagatatcctgcaatgtatggagcttggaaagctgaatccacaacagcagtgccaacatccactatggcaatcgagaagtacagagcatcaacacacatgatccaaaaaatgtttccatccctgtcttcgtcattcttgattcgtcgtcttccatatgtgaagaaattgctatcaggcgtgtttttcagctttgctcggatcgcctggcctctaatttctgttatgtacatgcatatgcaaatcgttggctctgtgcttcagatgcaatcccaccaaggttggaattttgctgcccaagaaactgatcaagaaattcaaagatgaatttcggtggtacattattgacttcagatgaatagtcgagtaatctgttgctgttgctgacttggttgtgtatgggcataagtgtaggtgtagcaaactgaaactttgcacaattaaatttctgcactcc

SEQ ID NO: 91960 - DNA, 2050 bp, Zea Mays
ttctcatcgtcgccttcacggaaacatctcgtcgacccaaatccatccatccacccacaaccacaaggcgaaatccacgatccagtcaaacccccgccgcgcaccgagctccaaaccctatcgatgtcgacggcggcggccacgaagactccgaccaagcccctggccgcggctgccaggactccgaccaagccccagccccccgcggtggccaagacgccatgcctgtctcgcgcgcggccctcccacgcgtccgagaactccaaccccaacatcccgggcacgccgcctcccccgcagtcgacgccgtccaagcccgtcctcaagtccccgccgcccgcgggcgccagatccgccaccgcgaggaagaagccctccacgcccgcgccgccgccggagcgggagcggcgattcctcgtggcgaagaagggcgcgcggcggaggcgcaacgtcgcgaccgtgggaggcggcgggggagagatcgacttcgacaagtgccgcgaggctgcccgcgaggcgctgcgcgcgtcgcagggtgacttcttccgcaaggagctcgccgcgtctaccgccaccggagaggagcaactgggacaggaggcggaggaggtgaagcaggtggctgaagagggtgtggaaggtggagcactcgaggagcggccagaggaggggaccgacgcggagttggaggggagcagcaaggttagggcgatgaggtctaaggcgatggcgaagacggtgaccagcgttccagaacctggctctggccgcgtaaaaaatatggtgcaggccttcgagagcctgctcaacatctcagaaaggtccggtgatggctcacgggcgctgcccgggttgcagctgtggaaggaggagtctgagagtaatctggggttcccaccattgtcggtattctcttcggctgatttccagaatgcagggtctgatagactctgctcttcgctagatggaaacaccgtcaggttgacctgggacagcaggacatcggctggcgagggtaggagcaggcgaaactcatctgagtcaataaggagcagaacatcggctggcgagcgcaggagcaggagaaattcatcggaatcactaaggagcagctggaacaaaaagctcaaggtcaccagccagcatccattcaagctgagaactgagcaaagaggaaagtttaaggaacagcagttcgttcagaaggtgcaagagatgcttgtagaggaagagaataaacgtattcatattgcacaaggattgccatggactaccgatgaacccgagtgtttgataaagcctgcagtcaaagaaagaactgagccggtagaccttgttttgcatagcgatgtgcgtgcgcttgaacgtgcagaatttgatcagcatgttttggaaaggaacaagttcgctgagcaacaaagactagaatgggagaggcaacaggaattagaggaagaagaaaggataaggcaactgaggaggaccgagctggttcctaaagctcaacccatgccatactttgaccgccccttcatccccaaaaggtcgactaaaccggctacagttcccatggaaccgaaattccacctcaggccagaaaagatatcctgttactgtcgacagcaatgtatggagcttggaaagctgaatccacaacagcagtgccaacatccactatggcaatcgagaagtacagagcatcaacacacatgatccaaaaaatgtttccatccctgtcttcgtcattcttgattcgtcgtcttccatatgtgaagaaattgctatcaggcgtgtttttcagctttgctcggatcgcctggcctctaatttctgttatgtacatgcatatgcaaatcgttggctctgtgcttcagatgcaatcccaccaaggttggaattttgctgcccaagaaactgatcaagaaattcaaagatgaatttcggtggtacattattgacttcagatgaatagtcgagtaatctgttgctgttgctgacttggttgtgtatgggcataagtgtaggtgtagcaaactgaaactttgcacaa

SEQ ID NO: 91961 - DNA, 1488 bp, Zea Mays
ttctattccatccctagttttttatctttcgtaacggttccatctattttctctccctatatcccgctacaaccataaaatattatttcatatactattttttatctactattaatttttctttgttaataattagagccggaccaataacatagtagaaagggtaccgtagtaggcagcgcctgcttgttgcctctacgggggggagggggagcggccgcgcgagccgctgcagacagccacggcaagcgggttgcggtgcggacagtctcacctcgcttatacaatccagtcgaccgttttctcagtctttagcctagcatgagagcagccttcaagtgaacacgcccgcgtccgtcttcgtcggacccttctccggcgacgagcaccccccacgccagttgcagatatctggtcatcagtacagaacttgaagtgtagattgtgatgtcggtgccgatgtataacaaacagaactcattgggcaccccccctccccacaagacaaatcccttttctgattctgaagggccatcaagggcacagtctgtcccagtacgacgcaccaatcaatctgtgcaagagttggaagattatgctataaccaaagcaagagaaaccacacacaaagtaaatgattgtgtcagggctgctgaagccatcagggaagatgctacacaaaccatgctaactttacaccgtcaaggtgagcagatcatgcggtctcatcaagtagcagctgacattgagcaggaccttacagtgagtgagaagcttctgggaagtctgggtgggctattttccaagtcatggagaccaaagagaaatcatcagataaaaggaccagtctcaggaaataactattctgcgacaacagctaacgacacggaacagagggggaagctaggaattgccccagcacgtcaagaatatcccagtcatgtacaaaccacacctgtatctgcaatggaaaaagttcaggctgagagaacaaagcaggatgatgcactttccgacctgtgtagcacattgggacaactcaaggaaatggcagtggatatgggcacagaaattgacaggcaaaacaaagctctggttcctttaagcgacgacgtcgatgaactgaatttcagactgaaaggtgcgaatcagcgcggacgccggttgctaggcaagtgatatggaacctgaattcgggcagtttggagaccgtcgcctcgactgcaggattttaagaaccttgttgtttacatgttttagagcaaactagaaacataggcgctgccgcgcccttcagggtgaatcagcccgtgttctttggagtgaatcaggccacacttgttgtattagtgagagaatgatgatctattttgtgtcattatggatttcatagattattttccctgaactgcatttgtttcaataacataggagggaactttctttgaatggcattaaggcgaatttttaaggtgtgtccattattcc

SEQ ID NO: 91962 - DNA, 1596 bp, Zea Mays
ttctattccatccctagttttttatctttcgtaacggttccatctattttctctccctatatcccgctacaaccataaaatattatttcatatactattttttatctactattaatttttctttgttaataattagagccggaccaataacatagtagaaagggtaccgtagtaggcagcgcctgcttgttgcctctacgggggggagggggagcggccgcgcgagccgctgcagacagccacggcaagcgggttgcggtgcggacagtctcacctcgcttatacaatccagtcgaccgttttctcagtctttagcctagcatgagagcagccttcaagtgaacacgcccgcgtccgtcttcgtcggacccttctccggcgacgagcaccccccacgccagatatctggtcatcagtacagaacttgaagtgtagattgtgatgtcggtgccgatgtataacaaacagaactcattgggcaccccccctccccacaagacaaatcccttttctgattctgaagggccatcaagggcacagtctgtcccagtacgacgcaccaatcaatctgtgcaagagttggaagattatgctataaccaaagcaagagaaaccacacacaaagtaaatgattgtgtcagggctgctgaagccatcagggaagatgctacacaaaccatgctaactttacaccgtcaaggtgagcagatcatgcggtctcatcaagtagcagctgacattgagcaggaccttacagtgagtgagaagcttctgggaagtctgggtgggctattttccaagtcatggagaccaaagagaaatcatcagataaaaggaccagtctcaggaaataactattctgcgacaacagctaacgacacggaacagagggggaagctaggaattgccccagcacgtcaagaatatcccagtcatgtacaaaccacacctgtatctgcaatggaaaaagttcaggtctgtctgcagaattaactatgaagtgtgtgagtgtgacctatggaaccgagtactatcttctctacatttattcttctagttcttcttcttcatgagagttaaacattgatttctttccttctttctttaggctgagagaacaaagcaggatgatgcactttccgacctgtgtagcacattgggacaactcaaggaaatggcagtggatatgggcacagaaattgacaggcaaaacaaagctctggttcctttaagcgacgacgtcgatgaactgaatttcagactgaaaggtgcgaatcagcgcggacgccggttgctaggcaagtgatatggaacctgaattcgggcagtttggagaccgtcgcctcgactgcaggattttaagaaccttgttgtttacatgttttagagcaaactagaaacataggcgctgccgcgcccttcagggtgaatcagcccgtgttctttggagtgaatcaggccacacttgttgtattagtgagagaatgatgatctattttgtgtcattatggatttcatagattattttccctgaactgcatttgtttcaataacataggagggaactttctttgaatggcattaaggcgaattttt

SEQ ID NO: 91963 - DNA, 1213 bp, Zea Mays
gactgaactggagttactgttggcaaattatagcgtcgatgatcgcttactcggtctatcatgcaaggttcgcggacccgttcttcttcggagactacccggcgacgatgcgggctcgggttggagagaggctgcccaagttcaccgcagacgaggctgcccttgtcaagggggccctggacttcatgggcataaaccactacaccactttctacacgaggcataacgacaccaacatcatcggacggctgctgaacgacaccttggcggacaccggaaccatcagcctgcgtgagtcctcatcgtgtgtgtttgcaagttcatttcaactgaaaaaaaagaaacctgaaagatgagaaaccttgaaggctgctactgagccttcaaactgacaacacgtgccaagcttcctatctgtctgtccaaaaaaacttctagcgacacttgaaatttgaaaccgtgggtagctgatacttcgcaatttcacagccttcgacaagaacgggaagcccattggagatcgggctaattcgatatggctgtacatcgtacccagcgggatcaggaagctgatgaactatgtcaaggagcggtacaatagcccaacggtttacatcactgaaaatgggatggacgacggcaacagccctttcacctccctccagaacgccctcaaggacagcaagaggatcaagtaccacaacggctacctcaacaacgttgctgcctccataaaggaggacgggtgtgacgtgcgtgggtacttcgcgtggtcgttgctggacaactgggaatgggccgccgggtacacctccagattcgggctctacttcgtggactacaaggataacctcaagaggcaccccaagaactcggtccagtggttcaagaccctgctgagctccagctgaaggcgtcacacgggctgtgattggactgaccatttacccgacaccatacccttatcctgttgtgtcaagcactcaagctccaatcaatgtaaaataatgttacccctctctctctctctctggtagaaaaacatgtcgtgtagggctacatttagttacacattaaaagggcatatcagtaacttcaaacttagttcgtttgaaagcataagttacacgtgtggatttgtattgaaatacactttgtaaaaaaaagtcatgtttgtaaataaattaaataatatagcctagaataaatcagc

SEQ ID NO: 91964 - DNA, 1937 bp, Zea Mays
acacaaaaacctacgcgcacccggccgctctccagtgggcaggcagttggcctcctttcctcgccgcgctttggagcccacctcggtctcggtgcagtgtctcgctcgcgcgtgccggcgtgcgtgccctggtggcccatggggaggaggataatgaagagtgggcgacgcacgacgatgcagccgcggccggcgcttcttctcctcgtcctcgtcctcggcgtgtcgctgcgtggatgcattgcgcagggcgggggcggaggaggagggctcacgcgggggagcttccccaagggcttcgtcttcggcaccgccgccgccgcttaccaggcaagatttcagacttcagcaacgcggatgttgcagttgaccagtaccaccgtttcgaggaggacgtgcagctcatggcggacatgggaatggatgcgtatcgcttctctattgcctggtcaagaattttgccaaatggtacgggccaagtcaatcaggccggcatcgaccactacaacaaagtgatcaatgcactactatcaaaaggaattcagccatatgtaaccctgtaccactgggacctcccccaggccctggaagacaggtacaacggatggctggacaggcagatagttaatgactttgcggcttatgctgagacatgcttcaaggcgttcggagaccgtgttaagcactggatcacgctcaacgagccgcacacggttgcagtccaaggctacgatgctgggcttcatgcgccagggcgttgctcggtgctgctccatctatactgcaggacagggaactctggcactgagccctacatcgttgctcacaacttcatcctagctcatgccaccgtttcagacatgtacaggaggaaatacaaggcagctcagaatggtgagcttgggatcgcatttgacgtcatctggtacgaaccaatgacaaacagcacgatcgacattgaagctaccaagagggcgcaggagtttcagctaggatggttcgcggacccgttcttcttcggagactacccggcgacgatgcgggctcgggttggagagaggctgcccaagttcaccgcagacgaggctgcccttgtcaagggggccctggacttcatgggcataaaccactacaccactttctacacgaggcataacgacaccaacatcatcggacggctgctgaacgacaccttggcggacaccggaaccatcagcctgcccttcgacaagaacgggaagcccattggagatcgggctaattcgatatggctgtacatcgtacccagcgggatcaggaagctgatgaactatgtcaaggagcggtacaatagcccaacggtttacatcactgaaaatgggatggacgacggcaacagccctttcacctccctccagaacgccctcaaggacagcaagaggatcaagtaccacaacggctacctcaacaacgttgctgcctccataaaggaggacgggtgtgacgtgcgtgggtacttcgcgtggtcgttgctggacaactgggaatgggccgccgggtacacctccagattcgggctctacttcgtggactacaaggataacctcaagaggcaccccaagaactcggtccagtggttcaagaccctgctgagctccagctgaaggcgtcacacgggctgtgattggactgaccatttacccgacaccatacccttatcctgttgtgtcaagcactcaagctccaatcaatgtaaaataatgttacccctctctctctctctctggtagaaaaacatgtcgtgtagggctacatttagttacacattaaaagggcatatcagtaacttcaaacttagttcgtttgaaagcataagttacacgtgtggatttgtattgaaatacactttgtaaaaaaaagtcatgtttgtaaataaattaaataatatagcctagaat

SEQ ID NO: 91965 - DNA, 1764 bp, Zea Mays
aagccgtgtccatggcgcgccgttctaaaccctaaacctttcgacctgctttatactagacctcatcgagaatctcacgcgtcggcgaccatggcggcgtctccgtcttctccccatgccgcccccggagttagcggccagagcctgtccccctcagcgccgtctccccacctccccaactatttcatgtggagagaatttgtctggggaggaatggcaggtgcatttggggaaggcatgatgcatccagttgacactctgaaaacaaggcttcagagtcaagctataatgacaggggctaagaagaatatattccagatggtcaggacagtttgggcttctgatggtctaagaggtttttacagaggaatcagcccaggtgttactggatctcttgcgactggcgctacatatttcggtattattgaatcaaccaaagcatggttggagattgctaatcctaatctaagtggacactggtcacattttatcgctggagcgattggtgatacacttggatcctttgtctatgtgccttgcgaagtcatgaaacaaagaatgcaaatccaaggcacccaaaaatcttgggcatcagctgtagccaaaggaaatatttctcaaactcatgggatagagatgtatgggtactacaatggaatgttccatgctggctgttctatctggagagaccatggcttgaaggggctttatgcaggatactggtctacgcttgccagagatgtcccttttgctggtctaatggtcactttctatgaagcaatgaaaaagatgtctgagtatgggaaaacaaagtatttgccacacagtgatttgcatgttagcaactcctttgaaggacttgttctaggaggattggcaggcggctgtagtgcatacttgacaacccctttggatgtgatcaagacaagactgcaagtacaaggatcaacgtctaggtacaatggatggctggatgctataacaaagacgtggacttccgagggggtgcgcggcttgttcaagggaagtgttccgagaataatatggtatgttccggcatcagcattcacattcatggcagtggaattcctaagggaccatttcaacgacaaggttgatgcggatgcccatgaagtaacctccctgtcaatggacacaaaatcagaagttgagaaatcagcttagggtttcttttcttatgatctatgaagtgtattggtatccctccccggtggaaattatccggcgggatctttctgtcttgggcaacaaactatgtttcggtcatgtaaatgcggaggacattcattggcagctgggcggagacattgttgtgtaccagaaagaaagtaattgacaacaacatgatcatattgtggcgggaaatttggatccatatcattaaaagatcaccactttggatccataccattactatctcacttacatgtgggtcgacatgagtcaatgacatgtggggtccatggtatatatttaaagtttggatcttttaatggtatagatccaattgttcctattgtggcagcaattttcttagatagatagatattggtgagtggatggaatgagagaagtgaacatgtaacgtttctggaacgaaagaccaatgccaccggtgtattagagcttctgaatctctgttgctgatgttattgccattcttgcgtattgaaatattggatcgatttgccataaatcgtatcctgcgcagcgcagtcgaattggttacaaaatcaagaaaaa

SEQ ID NO: 91966 - DNA, 1786 bp, Zea Mays
ggcagaaacgtgaccaaagccgtgtccatggcgcgccgttctaaaccctaaacctttcgacctgctttatactagacctcatcgagaatctcacgcgtcggcgaccatggcggcgtctccgtcttctccccatgccgcccccggagttagcggccagagcctgtccccctcagcgccgtctccccacctccccaactatttcatgtggagagaatttgtctggggaggaatggcaggtgcatttggggaaggcatgatgcatccagttgacactctgaaaacaaggcttcagagtcaagctataatgacaggggctaaggctcagaagaatatattccagatggtcaggacagtttgggcttctgatggtctaagaggtttttacagaggaatcagcccaggtgttactggatctcttgcgactggcgctacatatttcggtattattgaatcaaccaaagcatggttggagattgctaatcctaatctaagtggacactggtcacattttatcgctggagcgattggtgatacacttggatcctttgtctatgtgccttgcgaagtcatgaaacaaagaatgcaaatccaaggcacccaaaaatcttgggcatcagctgtagccaaaggaaatatttctcaaactcatgggatagagatgtatgggtactacaatggaatgttccatgctggctgttctatctggagagaccatggcttgaaggggctttatgcaggatactggtctacgcttgccagagatgtcccttttgctggtctaatggtcactttctatgaagcaatgaaaaagatgtctgagtatgggaaaacaaagtatttgccacacagtgatttgcatgttagcaactcctttgaaggacttgttctaggaggattggcaggcggctgtagtgcatacttgacaacccctttggatgtgatcaagacaagactgcaagtacaaggatcaacgtctaggtacaatggatggctggatgctataacaaagacgtggacttccgagggggtgcgcggcttgttcaagggaagtgttccgagaataatatggtatgttccggcatcagcattcacattcatggcagtggaattcctaagggaccatttcaacgacaaggttgatgcggatgcccatgaagtaacctccctgtcaatggacacaaaatcagaagttgagaaatcagcttagggtttcttttcttatgatctatgaagtgtattggtatccctccccggtggaaattatccggcgggatctttctgtcttgggcaacaaactatgtttcggtcatgtaaatgcggaggacattcattggcagctgggcggagacattgttgtgtaccagaaagaaagtaattgacaacaacatgatcatattgtggcgggaaatttggatccatatcattaaaagatcaccactttggatccataccattactatctcacttacatgtgggtcgacatgagtcaatgacatgtggggtccatggtatatatttaaagtttggatcttttaatggtatagatccaattgttcctattgtggcagcaattttcttagatagatagatattggtgagtggatggaatgagagaagtgaacatgtaacgtttctggaacgaaagaccaatgccaccggtgtattagagcttctgaatctctgttgctgatgttattgccattcttgcgtattgaaatattggatcgatttgccataaatcgtatcctgcgcagcgcagtcgaattggttacaaaatcaagaaaaa

SEQ ID NO: 91967 - DNA, 1671 bp, Zea Mays
gccaagggcaaggacgctgatttggcaaagtccaccaaggtttccaagatgggcgccaaatctgaggctgccgtcgcggctgggaaggcgaagaaaccaccggcggccaattcgaccgcgaatgtcggtgccaagccgtccaaatcaggcaagaaggcgccagtgcttgccgacgccaaggcaaaagccaatgcgaccgtcgtcagcaaggaggagtcggcggcggaggtggaggttgaggaggacgtggtgttgaccaagcaggcagaggaaggcaccgacgaccttatctctgagttttgggacctgcccagtcgactgcaggagacgctgatgccagacctggcatgactctcgcagcactccatggcgtacctgtccgcgtcgaacgccgagattgccgacggcgtgcgtccgatcctcggtggccggtgggcggcggtggccgcttccgcgacatcagtggcggtgctgctgctgctgccgctcttcatgctcatcgcactggtgcggcgcatgggcccgtacctgtcgctcctccaccgcgcgctgctgatggcgcaggcatacctcgccatctacttcgcgacgctggcgctcaccgcggccgccacggggctggagccactgcgcctcgtccacgcggcctcctccgccgcctcgcctggacgcaggccgcacagtcactcggcttcatggcctacctcgtgctccagatggtggacctcgtcgctgtcttctcgggcaccacctccccgaggacgacgaaacgggatgccgccaaggccctcgggcttgggtagatggtggtcggcctcgccgccgctgtcttccaccgcgccgcggcaggggccgcgccccacgccaactggcgcgtgtacgccgtgtacgcggcctgcttcgcaatcgtgtgcgcctgcgcgcgcgccaagaggaggaagaaggcctacctcgcgggcaccgaccgcgccgccgaggagtggaagaagagttgagctgatcgcatcgggaacagagagagggaacttctctgggagaaaagaaatgctaatacggttgtcggtggaagcctaactgcacatgcgcgtgaacgtagaacgtaaccctgaatttaggaagaaaaaggagggtatacaagtaaaagaatacgggagcaagttgtgattttccttttttcttcccttttctacatttattattcatataacatgttccccttaaatgcatcaatagggtgttcggccgaggaaagaggttgtccatcattttcttactcctcatcttgctcatcaaccatggttgttctgtcttgtcctttgagaagtgagtggagggtaggatcccgccttcttatattcgtcacgttacaactcttatccttcgattccgcaacgaaggaactatggcttggtatggtaggaggatggatatgctttgtagcagaatcagatgctggatttatattctcttttctattcttttcaagcgagaaacgaataattcatgaggaactcccggttatattctattcattatacttgccttggttgttccgaatctagggacgagcagggattagtatagtatagaagtgactcatgaattacaactcttatccttgattattatattatagtgtggaagacgaagatcttaaagaagaaaagatgg

SEQ ID NO: 91968 - DNA, 769 bp, Zea Mays
cgaacaactagaacctcacggtctgtcacagctgcagacaatggattcggtaggacgatatcgaggaagtcacttgacatggctatcaggcacatggacattcgacaaaatttgggtggcattcgtggtacatctctatttccccatagcatccgatctactactaccaagggacgagcagctcgagcctcagatccaggccattccgtctcaaatggtgaccgatacttcacagataatggcagcagcaatgggcacatctctggagattctagtggtgctctttcacataacggtgggagctcaattggttcccctgatagggaaacctttgcgacaaaagatgttctgtgtgaactggatatatatgccaattcaagatatgaggcgatggtgctgaaggaggacaccaagaacatgagttggttgcacagcgtggatgacaagtcggaccagagcccggtgtttgatcataggttcgagccgctccctgagccatttggtccgctatgaactgtttatattatccgtgaagattccactcgctttgttcgtcacttgctatctctttctgtttgatcgcccacctcccccatctatttataaatctgctataacagataaagatcgtggggtttgttctttctcctttaatagctggagtctcgatttcgagtgaccaatgctggaatccaatgtacggaccaacatatatactaaattctcatcctcggctatcatttttttattatgttttaagcttcaactc

SEQ ID NO: 91969 - DNA, 2043 bp, Zea Mays
tcccctctcacccttgccgccaccgtcctctatctgccgttccaccggcggcgtcgcctcccacagtcccactgaagcctctcgcggacccttccagaacttgtcctcgaccgccccgtggtccggcctcttaccgctccgcttcctcctacaccggatttaggcttattgacgataatgtgctaggagaacgaatttgggtggcacgtgagtggtgatccgttgccctccctgacaaagacgttatgtctatgaagaggcattttgcgatattcaccaccgcaagcctcccatggatgacaggaacatccatcaaccctttgttccgggctgcttatctggcaaaggatggtgataaggatgtcacactggtgatcccttggctttgtctaagggaccaagagttggtttaccctaacaatattgtatttgactcgccttccgagcaagagagctatgttcgccactggatcgaggagaggattgactttaggccatccttcagcatcaaattctacccaggaaagttttctaaagaaatgagaagcatcctccctgttggggatattacagaatgcattccagatgaagttgctgacgttgctgtattggaagagcccgagcatctaaattggtaccaccatgggcgaagatggaaaaataagttccgtcgagttataggaattgtccatacaaattatctagcatatgtaaggagagaaaagaatggtcaagttattgcttgtttcctaaagtatgctaacacttgggtaactcgaatctattgccacaagattatcagattgtcaggtgccacccaaaatctgcccaggtctgttatatgcaatgtccatggtgttaatccaaaatttcttgaggtaggcaagctaaagttgaggcagctgcagaatggggagaaagccttcacaaagggggcatactacatcgggaagatggtatggagtaagggatacagggagcttcttgatctgctgtccaaatatcagagcaagttggttggtcttgaagtggatttatatggcagcggagaagattctgatgaggtctgtgaatctgccaaacgtttaagtttgtctgtcaatgttcatcctggtcgtgatcatgcagatcccttgttccacgagtataaagtattcatcaatcccagcaccacagatgtggtctgtacgaccaccgctgaagccctggcaatgggaaagatagttatatgtgccaatcacccgtcaaatgagttcttcaagcagttccccaactgccgtgtctatgacaatgaagacgagtttgtacaactaaccctgaatgctctatcagagcagcctgctccattgacagacacgcagaggtacgagttgtcatgggacgctgcgactgaaagattcatcgaggcctctgatataaatcctcatgtgccggagtccagggcccatcaaaactctagggctttgttgcctgcttttctaagaactcgtaaactgaaacagaacttagaggatgcgtcagtttacctgcaccaagccctgtcaggtctggaagtcactcgctgtgcgtttggtgctgttcctaagacgctgcagcctgacgaacacctctgtaaagaccttggtttggctcctccggcaaagaagagaaggctgaaaattaagaagacgtaacgttggtgctgttccaaagatgacgtaacgtttaagatgagcaatgcttcgcctcatgtacagcacaatgtggtagacatttttactatttttcttctcaaaagagacattatcatacagtccggactccggtgggatttctaatggaggtttaatgcttcttttgactatttattactgggacgtgtgaactggggattagcacattgtaaattggtgtgctagcagctagcttagagagctaaggattctttgaatagtgctgtaattgtgtgagccgattaatggatcgtaatgaactgtgatgtctggtgtactcgagctcatcgtttaggccctcttttgaatgtgagaatttctgtttgctgtt

SEQ ID NO: 91970 - DNA, 1888 bp, Zea Mays
ggaaatatatttgctcagctgctatactcattctgcgcttgcttgattcattggtctgtgatttgcagacgataatgtgctaggagaacgaatttgggtggcacgtgagtggtgatccgttgccctccctgacaaagacgttatgtctatgaagaggcattttgcgatattcaccaccgcaagcctcccatggatgacaggaacatccatcaaccctttgttccgggctgcttatctggcaaaggatggtgataaggatgtcacactggtgatcccttggctttgtctaagggaccaagagttggtttaccctaacaatattgtatttgactcgccttccgagcaagagagctatgttcgccactggatcgaggagaggattgactttaggccatccttcagcatcaaattctacccaggaaagttttctaaagaaatgagaagcatcctccctgttggggatattacagaatgcattccagatgaagttgctgacgttgctgtattggaagagcccgagcatctaaattggtaccaccatgggcgaagatggaaaaataagttccgtcgagttataggaattgtccatacaaattatctagcatatgtaaggagagaaaagaatggtcaagttattgcttgtttcctaaagtatgctaacacttgggtaactcgaatctattgccacaagattatcagattgtcaggtgccacccaaaatctgcccaggtctgttatatgcaatgtccatggtgttaatccaaaatttcttgaggtaggcaagctaaagttgaggcagctgcagaatggggagaaagccttcacaaagggggcatactacatcgggaagatggtatggagtaagggatacagggagcttcttgatctgctgtccaaatatcagagcaagttggttggtcttgaagtggatttatatggcagcggagaagattctgatgaggtctgtgaatctgccaaacgtttaagtttgtctgtcaatgttcatcctggtcgtgatcatgcagatcccttgttccacgagtataaagtattcatcaatcccagcaccacagatgtggtctgtacgaccaccgctgaagccctggcaatgggaaagatagttatatgtgccaatcacccgtcaaatgagttcttcaagcagttccccaactgccgtgtctatgacaatgaagacgagtttgtacaactaaccctgaatgctctatcagagcagcctgctccattgacagacacgcagaggtacgagttgtcatgggacgctgcgactgaaagattcatcgaggcctctgatataaatcctcatgtgccggagtccagggcccatcaaaactctagggctttgttgcctgcttttctaagaactcgtaaactgaaacagaacttagaggatgcgtcagtttacctgcaccaagccctgtcaggtctggaagtcactcgctgtgcgtttggtgctgttcctaagacgctgcagcctgacgaacacctctgtaaagaccttggtttggctcctccggcaaagaagagaaggctgaaaattaagaagacgtaacgttggtgctgttccaaagatgacgtaacgtttaagatgagcaatgcttcgcctcatgtacagcacaatgtggtagacatttttactatttttcttctcaaaagagacattatcatacagtccggactccggtgggatttctaatggaggtttaatgcttcttttgactatttattactgggacgtgtgaactggggattagcacattgtaaattggtgtgctagcagctagcttagagagctaaggattctttgaatagtgctgtaattgtgtgagccgattaatggatcgtaatgaactgtgatgtctggtgtact

SEQ ID NO: 91971 - DNA, 3408 bp, Zea Mays
atgtacgggcagggagggagcttcaatccacactatcgccatggcccgcctccgccccagcagcaagctggggtaactgggtccttcccccagcaacctgtgccaccgcctcggccaccttacccacagcaccctggagtgcggcctccggctgggccgtaccagcatggcgtgctgccacatcagaaccagccatacccctttgcgcagcatggtcggatgcaccagatgccaatgcttccgccacagcagagaggttatgggtcgatgccaatgccagggtcgctgcctccgcaacaagctatgcatcaggcccctccacagtatccgcccctccctccacctccacctcggccgcctggctttgttcatgataatgtgctgcctccatctctgcctcctcctcctcctccttctccaccaccaccaccaccaccaccaccaccagaagcagcagcagcagcatcatattctcctcctcacacacttgttgttgcacagtcatgcggcgcagaggcagaagcaaaagaaggtgcatctgaaggtggtcgttttgccaaaactctggaagcagctactcagctaattgtttctgatgactcagatatggacatggatggggatgaggactctccatcaaagcagccccttaccccagaaacttctttgcctgtgactgttgaatgtactggaaatgttaatgtgtcaaagttcagtgatgtttcaactgaggacaatgctaaaactgcggatgcaactgaggacaatgctaaaactgcgcatgcaactgaggacggtgggagcacattccaactgatacaaggttatggctccgatgacagtgcaaatgaggctgatgctggtcctggcagtgctaatacccttgtgacattgcctgaagataacctgcatggtcatttaagtgatagtaatactgagtttgattatcagaaacatgttaatgcaaaaggaaatgtgaatacccctcatggcactgagcaaaatggtaaggctgaaaattatcatctcaaggttgagagcaacccagtgaagcatggcacagatgtacttgggcatctggccaaagaagatacaagtggcagtgaaattgagggaggtcaaagtagtaaaaggcatgggaggatacaaaagaaacgaacccggagcatctcacctcagggtagaagtggtagtccagtgggggcaaacaagagcagtccatcccaaagttcttcacctggaaagcagagcaggccaccatttgctaagcgtctccattctgctgatgatggtaatgattcagaaggtagagttgttcagcaagagggcctgtcattgacatcaaaattggatagttcttctaatgatttaattggtaaagtgggagatgctgctgcggttggtgttgcccttgggcagcattgtcacagtgacaatttaatttctgagcattcacaactaatggctgctggtgctactcataagatgcaaatgccatgccccccatctgagtctctatcagacttaaatgtgtcttcatcagcaggtggcccaattcttacgaaccaacctgctgcaggtgtcccatatgtgtctgtagaaactaccaagagctccatgacatctaaacatctccagtctcatcctcagagtttgagtcctcctgaacacatgccatcctcaaatatgattcagctaccaggacagccatcatttgcaacatcagaattccctcaaatgcagttccaccataaagttgttgcaccagcaaatgaattcttgcagaaccagatgagaagctaccctccacaagatgtgtctcatcctagaccattcgatttccatcatcatactctcccaccagcagttccttctaaccagcagccttctaccattcctgttgagaatgctccagtacctcatcataacagatggccagagtattctggtggtgttggtctatcctattcatctcatcggcctccatatggtcagcatcaacctcctgggaatcttgattcaggaagtaacttggtttatccctctttccagagatatccatcaaatctaccagtcagtaacaatattggtcccttatctgatgccgatttgactaaatcgtctatcaaaccccactacaatccatttgcatctacctttgataaaacagatccaagtctagatattgggcctcctgtaagccctaatgcagttggttctgtttccacaacagcagaacacatgaatacactgtctccttttggtcgatccagagcacatgcccatggaaattctgcagaacctgtgcccaatagacaaaagttactccatcaggagtttgcttctggtgctccgtatgatccattagttgacagtattgaaccatcaagcagttcaatcaacaaggtagatcttcgtaaagagaagaactggagtgctgctgataggcgtgatgcatcgaaatttatgaacctagaagtggacagtgaaaatatgcatggactgggggttgttgctgagtcagaagttgagggacttggagaggtggcagcagatactgagacaggtgtggtggagaatgcaagtcctgagttcttgggtggtaaagattggaactcagatatccctgttgattttgacaatgaccaaacattggacaaaaataagaagggtaaagattccagatcaatgaagctttttaagagtgctattgcagattttgttaaggaagttcttaaaccatcatggaggcagggtaacatgagcaaagaggctttcaaaactattgtcaggaaaacagttgataaggtttccggttcagttcctagcagtcatattccaaaaacacctgccaagattaaacattatgtacaatcctcccaaaggaaggtgaccaaattagtaatggggtatgtcgacaagtatgtgaagccatagagtaatgtggcattgtgctgaatcagaactgtcatggttccagagtctgtgctgcattctactaaatgaggctgcaaatttggtaatctttctgatgaaacggttgttccacagtaaggtagtttgctctagttctgcaggaaatgctgtattttattggagtgacatgtctagatgtgcttccagtattgataatttgctgcctgatttcttgtaccctgtaagggtgcgatatttgtgcgaacatgctgctgaaagaactttgtttcttaatggtgattatgcatactgagagctgtaaggcttactgctgaatgaactttgtttctgaatggtgaatatgcatactgagagctgtaaggcttaacaaacttttgacttatcacattcttcaacgtggctcttttagactggttatagtttgatgcctgtacttttccgacagaataatatcctgctctgctatcgttg

SEQ ID NO: 91972 - DNA, 1541 bp, Zea Mays
atagggctagctgctaggtggttattgcatactggtctccactctttctcttgccacctcgggcatcctcagccgccctaaaaaggatacatgcttcatacctagatcatttggtgttcagttttgtttttaagccatggcgaattcccggactggacgttacaagatgtctaatctctcacacacctcaaaggaagatacttcacctgagggttcaggtactaccgagagaactggagcctggagtaacatgttgaacactcttatgcagcaagcctcaatctatggtgtggctgctgggtattgtttatcagcgtcgctgctctcgatcatcaacaaatgggcaatcatgaaatttccatatcctggagccctgacagctctgcagtatttcactagtgttgctggagttctcctatgcggacagctcaagctcattgagcatgacggccttaatttgaggacaatgtggaagttcttacctgctgctgtgatgttctatatctccatcttcacaaacagtgaactcctgcttcacgccaacgtggatactttcattgtgttccgctctgctgtgcctatatttgtcgcgataggagagacgttgtatctccatcagccatggccatcactcaagacatggctttcactctccacaatacttggtggaagtgtgatctatgttttcacagacaaccaattcactgtgactgcttacacctgggcagtggcctacctagcaagcatgtccattgatttcgtgtacatcaagcatgttgtaatgaccattgggctgaacacatggggccttgtgctatacaacaaccttgaggctttgatgctattcccactcgagcttctagtaatgggagaatttgatcagatgaaggtcgacagctccaaagtgtcaaactggctttcatttgatgtggtcctccctgttgctctctcatgcctgtttggactatcaatatccttcttcggattctcctgcagacgagctatttctgctactgggttcacagtgcttggcatagtgaacaagctcctaactgttgtgattaatttgcttatctgggacaagcatgcctcttttgtgggtaccattgggctcttgatatgcatgtcaggtggtgtgctctatcagcaatccaccacgaaaccgaaggcacccaaggttgagccgaaggaagagaacgacgaggagcagcagaaattgctgcagatgcagggagttcaagagagttcataaaccttacaaagaaagtacaactacaaagaagcatatggctagtactcggaaagaggacagcctcacctgagcgtttttgtattgactagtacttgggaagaagcatatggatgaatgtagtcatgaactaggagctacaaaatcccatgttttagatattagaagtcatggaggggacctaattatcactgtgcaattctttattactatactaccacttccatttgtaacgcaaaattgttatgataggatggcaaatatacctgcattgaatacttcctatacgaaa

SEQ ID NO: 91973 - DNA, 1987 bp, Zea Mays
gaagaacatgacaaatcggaaggttcacgcgtgaccgcgagcgtgccacgcaagggcgagggagcccgcgaggcggaatgcgcctcgagatctcctctgcgcggctcgcgggtcagaccatcagaagcagaaagtcgcattagtaaattcaatcatcgtccccgcctgcaaaagatctgccgtggcctcctcgtttacctattgctggttctcaaatcgcacgccctcactgctagtgctaggctccccttcgcgcgcgcgcgcagttattacccgtccacggccgcgtgttcgcaagtatccagatccggctccccacctccggcgaccaccgcgcagagaacaattccgtccaacgggaaaccccgcgataaatcgccgcgcccatcgtttggcgtcccccacagcaccgaattcaccagggctggaggaagtgtctgaaagactcagcaacgcttcatgtgactgattggttggctgcgccggctctctagcaccgagttcagggagcaccgacttgttcgttcgtcttgaggctctggagctctgtcacgttgtggtagttgagagggatctgtccaatttgcatagctgcgaaggaagattcctgagatgtctaatctctcacacacctcaaaggaagatacttcacctgagggttcaggtactaccgagagaactggagcctggagtaacatgttgaacactcttatgcagcaagcctcaatctatggtgtggctgctgggtattgtttatcagcgtcgctgctctcgatcatcaacaaatgggcaatcatgaaatttccatatcctggagccctgacagctctgcagtatttcactagtgttgctggagttctcctatgcggacagctcaagctcattgagcatgacggccttaatttgaggacaatgtggaagttcttacctgctgctgtgatgttctatatctccatcttcacaaacagtgaactcctgcttcacgccaacgtggatactttcattgtgttccgctctgctgtgcctatatttgtcgcgataggagagacgttgtatctccatcagccatggccatcactcaagacatggctttcactctccacaatacttggtggaagtgtgatctatgttttcacagacaaccaattcactgtgactgcttacacctgggcagtggcctacctagcaagcatgtccattgatttcgtgtacatcaagcatgttgtaatgaccattgggctgaacacatggggccttgtgctatacaacaaccttgaggctttgatgctattcccactcgagcttctagtaatgggagaatttgatcagatgaaggtcgacagctccaaagtgtcaaactggctttcatttgatgtggtcctccctgttgctctctcatgcctgtttggactatcaatatccttcttcggattctcctgcagacgagctatttctgctactgggttcacagtgcttggcatagtgaacaagctcctaactgttgtgattaatttgcttatctgggacaagcatgcctcttttgtgggtaccattgggctcttgatatgcatgtcaggtggtgtgctctatcagcaatccaccacgaaaccgaaggcacccaaggttgagccgaaggaagagaacgacgaggagcagcagaaattgctgcagatgcagggagttcaagagagttcataaaccttacaaagaaagtacaactacaaagaagcatatggctagtactcggaaagaggacagcctcacctgagcgtttttgtattgactagtacttgggaagaagcatatggatgaatgtagtcatgaactaggagctacaaaatcccatgttttagatattagaagtcatggaggggacctaattatcactgtgcaattctttattactatactaccacttccatttgtaacgcaaaattgttatgataggatggcaaatatacctgcattgaatacttcctatacgaaa

SEQ ID NO: 91974 - DNA, 1819 bp, Zea Mays
gaagaacatgacaaatcggaaggttcacgcgtgaccgcgagcgtgccacgcaagggcgagggagcccgcgaggcggaatgcgcctcgagatctcctctgcgcggctcgcgggtcagaccatcagaagcagaaagtcgcattagtaaattcaatcatcgtccccgcctgcaaaagatctgccgtggcctcctcgtttacctattgctggttctcaaatcgcacgccctcactgctagtgctaggctccccttcgcgcgcgcgcgcagttattacccgtccacggccgcgtgttcgcaagtatccagatccggctccccacctccggcgaccaccgcgcagagaacaattccgtccaacgggaaaccccgcgataaatcgccgcgcccatcgtttggcgtcccccacagcaccgaattcaccagggctggaggaagtgtctgaaagatgtctaatctctcacacacctcaaaggaagatacttcacctgagggttcaggtactaccgagagaactggagcctggagtaacatgttgaacactcttatgcagcaagcctcaatctatggtgtggctgctgggtattgtttatcagcgtcgctgctctcgatcatcaacaaatgggcaatcatgaaatttccatatcctggagccctgacagctctgcagtatttcactagtgttgctggagttctcctatgcggacagctcaagctcattgagcatgacggccttaatttgaggacaatgtggaagttcttacctgctgctgtgatgttctatatctccatcttcacaaacagtgaactcctgcttcacgccaacgtggatactttcattgtgttccgctctgctgtgcctatatttgtcgcgataggagagacgttgtatctccatcagccatggccatcactcaagacatggctttcactctccacaatacttggtggaagtgtgatctatgttttcacagacaaccaattcactgtgactgcttacacctgggcagtggcctacctagcaagcatgtccattgatttcgtgtacatcaagcatgttgtaatgaccattgggctgaacacatggggccttgtgctatacaacaaccttgaggctttgatgctattcccactcgagcttctagtaatgggagaatttgatcagatgaaggtcgacagctccaaagtgtcaaactggctttcatttgatgtggtcctccctgttgctctctcatgcctgtttggactatcaatatccttcttcggattctcctgcagacgagctatttctgctactgggttcacagtgcttggcatagtgaacaagctcctaactgttgtgattaatttgcttatctgggacaagcatgcctcttttgtgggtaccattgggctcttgatatgcatgtcaggtggtgtgctctatcagcaatccaccacgaaaccgaaggcacccaaggttgagccgaaggaagagaacgacgaggagcagcagaaattgctgcagatgcagggagttcaagagagttcataaaccttacaaagaaagtacaactacaaagaagcatatggctagtactcggaaagaggacagcctcacctgagcgtttttgtattgactagtacttgggaagaagcatatggatgaatgtagtcatgaactaggagctacaaaatcccatgttttagatattagaagtcatggaggggacctaattatcactgtgcaattctttattactatactaccacttccatttgtaacgcaaaattgttatgataggatggcaaatatacctgcattgaatacttcctatacgaaa

SEQ ID NO: 91975 - DNA, 1101 bp, Zea Mays
aaggttgaaaagtctccaaaagcgccgagtaaaaagatctcgccccaacaaagggtacgaatacgatcacgcaatataagcatctctctctgctgcttaaagcaacccaggactctgctgcttagagctagagaggacacggaggtagagagagacgaagctagagggacgcaaaacaagctagctaagctaggaggaagatgggtcgcggcaaggtggagctgaagcggatcgagaacaagatcagccgccaggtgacgttcgccaagcgccgcaacggactgctcaagaaggcgtacgagctgtcgctgttgtgcgacgcggaggtcgcgctcatcatcttctccggccgcggccgcctctttgagttctccagctcctcatgcatgtacaaaacactcgagagataccgcagctccaactactcacaagaagtaaaaactccactggacactgaaattaaataccaggattatctcaagttgaggacaagggttgaattcctccaaactacacaaagaaatattcttggggaggatctgggtccacttagcatgaaggagctcgagcagctggaggaccaaatagagatatctctgaagcatatcagctcaagaaagaatcaaatgctacttgatcagctctttgacctcaaaagcaaggaacaagaattgctggatctcaataaagacctaaggaagcagctgcaagaaacaaggccagagaacgcgctccgtgtctcctgggaggaaggtgggcacagtggcgcaagtgggaatgttcttgatccttatcaggggctccttcagcacctggacaacgatccttccctgcagttcgggtaccatcatcaagcctacatggatcagctgaacaacgaggacctggtggacccgaatgagcatggtcgatctggatggatatgaaatgctctgatgacccaaaataaagttgatgcacagcagggattcaccctgcaggacgcgagactatgtattgaagctaagacctcgtgtgtgttgtgttgtgtgcgaagcttggaactttataaatcgttgtcatgcccatggctttctatttctttctcggagctgcgcaaaa

SEQ ID NO: 91976 - DNA, 979 bp, Zea Mays
gttgaaaagtctccaaaagcgccgagtaaaaagatctcgccccaacaaagggtacgaatacgatcacgcaatataagcatctctctctgctgcttaaagcaacccaggactctgctgcttagagctagagaggacacggaggtagagagagacgaagctagagggacgcaaaacaagctagctaagctaggaggaagatgggtcgcggcaaggtggagctgaagcggatcgagaacaagatcagccgccaggtgacgttcgccaagcgccgcaacggactgctcaagaaggcgtacgagctgtcgctgttgtgcgacgcggaggtcgcgctcatcatcttctccggccgcggccgcctctttgagttctccagctcctcatggtacgacgcacgcgcgctccgcatgtacaaaacactcgagagataccgcagctccaactactcacaagaagtaaaaactccactggacactgaaattaaataccaggattatctcaagttgaggacaagggttgaattcctccaaactacacaaagaaatattcttggggaggatctgggtccacttagcatgaaggagctcgagcagctggaggaccaaatagagatatctctgaagcatatcagctcaagaaagaatcaaatgctacttgatcagctctttgacctcaaaagcaaggaacaagaattgctggatctcaataaagacctaaggaagcagctgcaagaaacaaggccagagaacgcgctccgtgtctcctgggaggaaggtgggcacagtggcgcaagtgggaatgttcttgatccttatcaggggctccttcagcacctggacaacgatccttccctgcagttcgggtaccatcatcaagcctacatggatcagctgaacaacgaggacctggtggacccgaatgagcatggtcgatctggatggatatgaaatgctctgatgacccaaaataaagttgatgcaca

SEQ ID NO: 91977 - DNA, 1211 bp, Zea Mays
gtagactatagtgacttttagttatctcttgttatcaaatcaatgtaggagagccagttttggaaactttacaaggaagatcctgcagcatgtgcgatcgtgatgaaaacttcagttggccttgtctacctgcttgcctgtctgctatcacctttcatgccctccttttctgatgaagtattacgtcaattaaatttatctccagaagaaaatttgtcattaagtgaagaaaagggagaaattgcaaaggcaaaatctccttgggattttgtaccagcagggcacagaatagggaagcctgcacctctgttcaaggaattgaaagatgaagacgtagctctccatagagaaaaatatgcagggagtcaagctgagagaagctcaaaagcagcagctgatgctgaagccaacaaagttgctaatcagctcaagggcacaaaattatccgatggaggaacaaaaaagggaccaaagaaacaatctggtggttcgaaatcgaagacagctgatgctgatattacggttgcaaaattggatattagagtgggccttatcaggaaagcagagaagcatccagatgctgattccctttacgtggaggagattgatgttggagaggacacaccaagaacagtggtcagtggcctcgtcaaattcatacctctcgaagaaatgcagaaccggaaagtttgcgtactctgcaatctgaaacctgtggcaatgcgtggtataaaatcacatgcaatggttttggctgcatcgaatgaggaccacacgaaggttgagttggtggagccacccgaatctgctgccgtgggcgagcgtgttacctttgctgggtactcgggggagcctgaggcttccctcagtggcaagagcaagacgtgggagaagctggccgccgagctgcacagtaacggtgagctcgtggcgtgctacaaagatgtgcccttcacaacctcggctggaatctgcaaggtcaagacaatagcaaacggagagattcgctaggcacatctccgaactgcagccagctgacccaatctgggaagtgctaaactttagcatcatgaacctaaacaagcctaaagccttttatgtttgaaaagtcgtgtacaagacaaactctccgtgaagagatgctttttttttacttactctactagagactcctaaaaaataccgatattaattggggttatacatgtcct

SEQ ID NO: 91978 - DNA, 2729 bp, Zea Mays
acccgtgttcagcgggagaccgggttaggcttcagaggagaccgagtgactgtctgactgacccactcgcagtctcgcacaactagccatcctgttagcttagccctaaactcttctttcccgatggcgtcgtccccgccgccgcctaagctgccgattcccggccggcgcaacatacttatcaccagcgcacttccctatgtcaataatgtcccccacctcgggaacatcatcggctgtgtgctcagcgccgacgtgttcgcgcgatactgccggctccggggttacaacgctatctacatatgcgggactgacgagtatggcaccgccaccgagacgaaggccatggaggagaagtgcacgcccaaggagatctgcgataagtaccatgctatccacaatgaagtttacaagtggtttaacataaaatttgacaagtttgggcggacatcttctccagagcagacagaaatctgccatgcaattttccataaattgatggaaaacaattggctcacagaaaatactatgcagcagctttactgcgatatgtgccaaaaatttctagccgataggcttgttgaaggaacatgcccaaacaaagtctgcaacgcatcagcacgaggagatcagtgtgaaacatgcagcaccttgttgaatccaacagaacttattgacccaaagtgcaaggtttgtaagaatactccacgtattcgtgacacggatcacttatttttggagcttcctctattgagagacaagctggtaaactacatcaatgaaacttcagttgctggtttgtggagtcaaaatgctattcaagcaacaaatgcatggttgaaggaagggctaaagccacgctgcatcaccagagatcttaaatggggtgttcctgttcctcatgagaagtataaagacaaggtcttctatgtttggtttgatgcacctatcggatatgtgtctattacggcatcctatacacctgaatgggagaagtggtggaagaatcctgataatgtagagttgtttcagtttatgggcaaagataatgtgccgtttcacacgatcatgttcccttcaacgctacttggaactggggaaaagtggacaatgatgaagacaataagtgttactgaatatttaaattatgaagcaggaaaattttccaagagtaaaggtattggagtctttggtaatgatgcaaaggatacaaatattcctcctgaagtatggcgatactacttgcttatgaaccgtcctgaggtatcagatacactttttacttgggctgatttgcaagccaaattgaacagcgagttgctgaacaacttggggaacttcattaatcgtgtgctaagttttattgcaaaagaagctggagctggatatgattctgttgtacctgatgctcctaatgcgggtgaacacacattgacaaagatacttgcagaaaaaacaagtaaatgggttgaacaatatctcgacgcaatggaaaaggttaaactgaaacaaggactgaagagtgcaatgggcatttctagtgatggaaatgcgtatctgcaggagagccagttttggaaactttacaaggaagatcctgcagcatgtgcgatcgtgatgaaaacttcagttggccttgtctacctgcttgcctgtctgctatcacctttcatgccctccttttctgatgaagtattacgtcaattaaatttatctccagaagaaaatttgtcattaagtgaagaaaagggagaaattgcaaaggcaaaatctccttgggattttgtaccagcagggcacagaatagggaagcctgcacctctgttcaaggaattgaaagatgaagacgtagctctccatagagaaaaatatgcagggagtcaagctgagagaagctcaaaagcagcagctgatgctgaagccaacaaagttgctaatcagctcaagggcacaaaattatccgatggaggaacaaaaaagggaccaaagaaacaatctggtggttcgaaatcgaagacagctgatgctgatattacggttgcaaaattggatattagagtgggccttatcaggaaagcagagaagcatccagatgctgattccctttacgtggaggagattgatgttggagaggacacaccaagaacagtggtcagtggcctcgtcaaattcatacctctcgaagaaatgcagcagaaccggaaagtttgcgtactctgcaatctgaaacctgtggcaatgcgtggtataaaatcacatgcaatggttttggctgcatcgaatgaggaccacacgaaggttgagttggtggagccacccgaatctgctgccgtgggcgagcgtgttacctttgctgggtactcgggggagcctgaggcttccctcagtggcaagagcaagacgtgggagaagctggccgccgagctgcacagtaacggtgagctcgtggcgtgctacaaagatgtgcccttcacaacctcggctggaatctgcaaggtcaagacaatagcaaacggagagattcgctaggcacatctccgaactgcagccagctgacccaatctgggaagtgctaaactttagcatcatgaacctaaacaagcctaaagccttttatgtttgaaaagtcgtgtacaagacaaactctccgtgaagagatgctttttttttacttactctactagagactcctaaaaaataccgatattaattggggttatacatgtcct

SEQ ID NO: 91979 - DNA, 2726 bp, Zea Mays
acccgtgttcagcgggagaccgggttaggcttcagaggagaccgagtgactgtctgactgacccactcgcagtctcgcacaactagccatcctgttagcttagccctaaactcttctttcccgatggcgtcgtccccgccgccgcctaagctgccgattcccggccggcgcaacatacttatcaccagcgcacttccctatgtcaataatgtcccccacctcgggaacatcatcggctgtgtgctcagcgccgacgtgttcgcgcgatactgccggctccggggttacaacgctatctacatatgcgggactgacgagtatggcaccgccaccgagacgaaggccatggaggagaagtgcacgcccaaggagatctgcgataagtaccatgctatccacaatgaagtttacaagtggtttaacataaaatttgacaagtttgggcggacatcttctccagagcagacagaaatctgccatgcaattttccataaattgatggaaaacaattggctcacagaaaatactatgcagcagctttactgcgatatgtgccaaaaatttctagccgataggcttgttgaaggaacatgcccaaacaaagtctgcaacgcatcagcacgaggagatcagtgtgaaacatgcagcaccttgttgaatccaacagaacttattgacccaaagtgcaaggtttgtaagaatactccacgtattcgtgacacggatcacttatttttggagcttcctctattgagagacaagctggtaaactacatcaatgaaacttcagttgctggtttgtggagtcaaaatgctattcaagcaacaaatgcatggttgaaggaagggctaaagccacgctgcatcaccagagatcttaaatggggtgttcctgttcctcatgagaagtataaagacaaggtcttctatgtttggtttgatgcacctatcggatatgtgtctattacggcatcctatacacctgaatgggagaagtggtggaagaatcctgataatgtagagttgtttcagtttatgggcaaagataatgtgccgtttcacacgatcatgttcccttcaacgctacttggaactggggaaaagtggacaatgatgaagacaataagtgttactgaatatttaaattatgaagcaggaaaattttccaagagtaaaggtattggagtctttggtaatgatgcaaaggatacaaatattcctcctgaagtatggcgatactacttgcttatgaaccgtcctgaggtatcagatacactttttacttgggctgatttgcaagccaaattgaacagcgagttgctgaacaacttggggaacttcattaatcgtgtgctaagttttattgcaaaagaagctggagctggatatgattctgttgtacctgatgctcctaatgcgggtgaacacacattgacaaagatacttgcagaaaaaacaagtaaatgggttgaacaatatctcgacgcaatggaaaaggttaaactgaaacaaggactgaagagtgcaatgggcatttctagtgatggaaatgcgtatctgcaggagagccagttttggaaactttacaaggaagatcctgcagcatgtgcgatcgtgatgaaaacttcagttggccttgtctacctgcttgcctgtctgctatcacctttcatgccctccttttctgatgaagtattacgtcaattaaatttatctccagaagaaaatttgtcattaagtgaagaaaagggagaaattgcaaaggcaaaatctccttgggattttgtaccagcagggcacagaatagggaagcctgcacctctgttcaaggaattgaaagatgaagacgtagctctccatagagaaaaatatgcagggagtcaagctgagagaagctcaaaagcagcagctgatgctgaagccaacaaagttgctaatcagctcaagggcacaaaattatccgatggaggaacaaaaaagggaccaaagaaacaatctggtggttcgaaatcgaagacagctgatgctgatattacggttgcaaaattggatattagagtgggccttatcaggaaagcagagaagcatccagatgctgattccctttacgtggaggagattgatgttggagaggacacaccaagaacagtggtcagtggcctcgtcaaattcatacctctcgaagaaatgcagaaccggaaagtttgcgtactctgcaatctgaaacctgtggcaatgcgtggtataaaatcacatgcaatggttttggctgcatcgaatgaggaccacacgaaggttgagttggtggagccacccgaatctgctgccgtgggcgagcgtgttacctttgctgggtactcgggggagcctgaggcttccctcagtggcaagagcaagacgtgggagaagctggccgccgagctgcacagtaacggtgagctcgtggcgtgctacaaagatgtgcccttcacaacctcggctggaatctgcaaggtcaagacaatagcaaacggagagattcgctaggcacatctccgaactgcagccagctgacccaatctgggaagtgctaaactttagcatcatgaacctaaacaagcctaaagccttttatgtttgaaaagtcgtgtacaagacaaactctccgtgaagagatgctttttttttacttactctactagagactcctaaaaaataccgatattaattggggttatacatgtcct

SEQ ID NO: 91980 - DNA, 100 bp, Zea Mays
gaacgaagcgaagggaacattatcttgctgtggacgcctgcatcaaaagcttgagttttctgtaccaaaccattttaattccaggttaaagttcatctga

SEQ ID NO: 91981 - DNA, 969 bp, Zea Mays
gattacacaagatcctgttagcatatcagagcttcacaatgttgttgatgcaatatcgaaagtatgtatatttctggacctgctctttattttcttttagtatttatccatagaccaggttcaacggtagggaacgtgggtttgcagcttgcatggggaccaggttcacctgaatcgttgcaacaattgattgggatcgcaaggaataatgtgagcacccctactggttttgttgttattgggaaggaagaaaaggtcaaacttctaaaggataaaaatgttctagctgcccaggtaaacaaagaggaaagcattgctaatgaaactacactaattgatccaaatcaggtggcagtcctgttttctgagtggtgtcagatatgtagtcatgtaaatgctagtgatgcaatatacagtcgttttgtcacacagttggagcaggatagtctgttgaatggagatgatatctctgaacgcttcttccatattctcacggaacttgctgttacacactctctagtctccgagcaaattgttgctcctggtggatcatctcagcaatcaccacagcaaccccatatttcatatttttccattgattcatatgcaaagctcgtggttatggttctcaagtactcttcagtggagataacaccaaataaaggcagtatactttccaagattatttctgttactgtgaggaccattcagaaagatgctgaggaaaagaaagcttcatttaatccccgaccatacttccgattgtttataaattggctctatgaccttactactactgatggccatcatgatggttctaattttcaggttttgactgcatttgccaatgcattccacttgctacaacccttgagagttcctgcctggaggtctgtccatcattttggtctacttatgaatttacctttctatgttggtgtgttcaattattgtgtcatctttacgtga

SEQ ID NO: 91982 - DNA, 2345 bp, Zea Mays
gacggacagagaggcgccgctgcgtcgtcactggtcagttgtcccgctcctgctctcctagcccaatccactccacagggggctcaggaacccatggcttcactgcctctatgccgctcgccgtcgtccctactaccctcatggcctcaccggccaatctccgcctccttcaacccaaagaatccctcctcccctgtcgctgctcacgtctccgtccaggagacgcctccccaacctcaagacccgtcgcctccctctgattccaacccaaatggcacaaggcccagcagcagcagcaacacgaggttcctgtgggtcaaccccaacagcccgcgcgccgccgacgtcgcacgcgcgcgtgccgggtctggccgccgcgcacgtctcgcttctgctgccgcggcgctcggcgcgtgcgagaccaccgagtccgctgtagaggccgcgcttcaggcggccttccccgagcctccttccgagcaggacgccgtcatcgtgctcaacacggctgccgccaccagggcggagaccgccgtgctcgctctccgctggttcctggggaacgccaaggtccggaagaaggtcatcctctacaacgtcgtgctcaagttgctgcgcaagaagcggctctggagtgagaccgaggcgctatgggccgagatgctgcgggacggcgtgcagcccgacaacgccaccttctcgaccgtcatcagctgcgcgcgcgcctgcggcctacacagcaaggccgtcgagtggttcgacaagatgccggagttcggctgctcgccggacatgctcacatactctgcggtgatcgacgcgtacggccacgctgggaactccgaggcggccctccgcttgtacgatcgcgctcgcgcggagaaatggcagctggaccctgtgatctgctctacagtgatcaaggtacactcgaccagtggcaacttcgacggtgcactcaacgtgttcgaggaaatgaaggcaatcggtgtgaggccaaacctggtcgtgtacaataccatgttggatgccatgggccgcgcattgcgaccttgggtggtgaagaccatccacagagagatggttgaccagcaggtgcagcccagcagggcgacctattgttgtctcctgcacgcatacaccagggcacgctatggcgaggatgccatggccgtgtaccgactgatgaaggatgaggcaatgggcatcgatgtgatgctgtacaacatgcttctgtccatgtgtgcagacattggctatgttgacgaggctgaggagatcttcagagacatgaaggcgtccatgggtgcccattccaagcctgatagctggagctactcatcaatggtgacgctgtactcatccactgccaacgtcctgagtgcagagggcatactgaatgaaatggtggaggccggcttcaagccaaacatctttgtcctgacctcactcatccgatgctatggcaaggtggggcgcactgacgatgtggtcagatcattcggcatgctccaggaccttggtatcatccccgatgacagattctgtggctgccttctcagcgtggcagcaaacacaccagcggaagaactgggcaaggtgatcagctgcattgagagaagcaacgtccagcttggtgccgtagtgaagctccttgtggacaggagctcctctgaatcttttagagaagcagcccgtgaactgctgaggagctcccgcggcgtggtgaagatgccttactgcaactgcctgatggacctatgcgtgaacctgaaccagatggagaaggcctgcgcgctcctggacgccgcacagcagctcggcatctacgccaacatccagacgaggacccagacacagtggtcgctgcacctcaggggcctctccgtcggcgcggcactgaccacattgcacgtctggatgaacgatctgtatacgtctctacagaccggcaacgaagggctgccaccattgcttggaatccacacggggcaggggaagaacacgtactcggacagagggctggctgctatgttcgaggcgcatctgaaggagctcgacgcgccgttccacgaggcacccgacaaggcaggctggttcttgacgacgaacgttgctgctaagcaatggctggagtcgaaggcggcatcagaactagtaactgtgtaaactggttactctggcgcgtacataggattatttttccgtgtaagctacatgtgttctccgatatatgcaggtgaagatgttgagttagcctatctccgaccttactcatccgtatacctatattcaaatttcactctatgatttataatgaaatttaaaatagatcttaaatacct

SEQ ID NO: 91983 - DNA, 1704 bp, Zea Mays
ccgccacacccacatcacatccctccctcctagtcctagctacaacgaccagcgatatagtaaggtgacacttacccggcctgctccacacagtgccccaagcaaaaacctatcgctcctatacatctggcagttgtgccactcctttgagcaacacatcacaccctccctgctgcgggccggatcggagctgcagctgcccttgcttatattccctggtctctcctctccattgcttccttcagctcctcgctctcctcagtccttaccatccatcgatcgcgaaggaagggtgctgaggaggctttcccatgcaccctcgttccctactagccacacaccagctatgagacaccccggctacttccttcttggtacgtactggtggcggtactgaaaactactccgcagagatacacgagaagacgtatagttctgtacctagccaagccaagctacctccctcgctcgctccacacctgcctgcatgggcggcggcggcgaaggcagagacagcggcggcggcggcggcgcggcgagctttcgggaggcggctcgtgacttcagcaacgtcgcgtccttctccgagcttccgttcctgcagcgctccgccgccccgccccgtggaagcccccacaactccggcatccgcatcttcggcatcgacgtcccgcactccccaccggagagaaactctaataaagatgccacggccgctactactactaccgccgccgcttccgccacgcagagcagcggcggcggcggggccaccaccgacagcagcagcagcagcagccgcaagttcgagtgccactactgctgcaggaacttcccgacgtcgcaggcgctcgggggccaccagaatgcgcacaaacgcgagcggcagcacgccaagcgcgtgcagatgcagtccgcgatggccgccgccgcagccgcggcggcggcggctggcggcgcgcaccaccaccacctactcggctacccgcagcaccgcttcggcgtcgcaggccccacggtggcgacattgtacccctcgtggccaacaatgaggcctccagctccagcaggcgccggtgccggtgccgtcgccatcggcggcccgcagttctacagcgggatcggctcgatcgcccagccgatcaacgggagccccctcctcacggctgccgggctctggaggggcccgccgccgcctgctgccgggcatgggaacgcgagcttgccgtcgtcaccaggcggagagcgccgccggccggtcgcgctctcgtcctcgtcccccgtgttccgcggagacgatccgagggcttccacttctcttttggcggcggcgtcgtcgccctcctcttcctcctctttgctgctatctccacaaggtcagtttgtctgtgagcagcctgctgccaccactgcggccgagggcgtgagcctagatttgcatctataattgtttccttttggtcgtctatgctgcttttagcggacgacggtggtgtgagcctagattttcactgaattcagattgtgcatgccttgtttcctgacacgggtgcacaagaatttcatctatcaaagtttcggaactttttgtctgtgtgcatacacatatacagaaagattcagacaatatgttagggtttggattttgtcgctgaattgaacacaagaaatcaatgcatcaggtgtagatttcatggaactttt

SEQ ID NO: 91984 - DNA, 723 bp, Zea Mays
agtaagaattttaagccttaaattctgaagtataagaacaacaaaacaatggtataattggtgatgaaaaatcatgtgatcatgaagttgttcctaaatttaacagactgactaaaacaacaagagcagcataaacaacttattgaagtgaaggattatagaaaaaagttagcaagcaacgtaaggaatatcaccaacttgttttcatctgatgccagaagttgatttagcggccaggcttgcccactcacgtttgattcctggtccaggcgaatggcaggtgccacaccggggaattcccgcagacgagttctgctaattctcaggcagtctcagcacatagtcaagtgtagttgctcatttaactgggggaggccctgtttgtttgggctttttccagcttctggccaccaaaagctactgcagatcgccaaacgccccagcttttcagcaagcttctataagaatcgcttttgtaaaaatcgtctaaaatcaacatgaacacaaaatcgtcgaattgtcacgatagtaggaatctgttgctttctagatcctaaaccctttggaccacttcgtcttccttcgcacgcaatccacacaatactcagattctccctaaagtcagattctctccacagctagattctcaaaaaagctgtccagaaaaaaaagctaaaccaaacagatgtacgcttgtgtggattgcataggatagtacgccaa

SEQ ID NO: 91985 - DNA, 84 bp, Zea Mays
tggtatacatattatctattcgtatttaaattctactcatctaagaggagagaaagtccgggtacttacggcgtgtttggttag

SEQ ID NO: 91986 - DNA, 1415 bp, Zea Mays
attgacatgaagcttcaaacatgcctttcgttcctacataaaccgatcaccaaggcaagccgcggcaaccaatcagcaccatagcaagttatcgacgcgcgcgcaacttggaacaaagacgtggtgatggcacctgcgggcaatggcgcggacgaccatgagctgccactcttccatccgtccccgtgcgctcactactacgtgcagagcccctccgcggcgtcgcacacgctgagccacccggcgtccgactccatggcgctcatcctctccccgttcccgaacctccaccacgacgcggacgcccgccactccagcgacggccgcgaccacgagcacgaccacgaggaggcctcgcgcctgaccctgtcccgctactcctcctcgcgcggatccaacagctccttcccggtcggtgacaagaagcccggccgccggcggcatgcgctgtcggggcggtcgtcaggccgccacgacgatggcgacgacgacgcggacggcgaggcccagaggagcggggcgtggaggtacgtgaagctggacccggaggccccctgctgctgcatcgcgttccaggtggcgtggagggtggcggccagcgcggcgttggcgctgctcgtcttcgtcctggccaccaggccgcggcacccccgggtgtccttcagggtgggcaaggtccagcggttcgcgctgggggaagggctggacggctccggcgtggagaccagcttcctcaactgcaactcctccgtggacatggcggtcgagaaccactccaaggtcttcacgctgcgcgtcggcccgccgcggctcgagatgtccttcggccggttcgtcttcgcgacctcacagggagacggctggtcacacgacgtcggaccgcgcggcacctcgacggtgaggctctttgtggcggcgcaggacaagcccatgtacgcggcggggcggggcatgcaggacctgctcgagtccagccacggcctgccactcaccgtcacggtcagggcgcggtcccggtaccgagtggtggggagcctggtccggctgacgtaccgccacgactccgagtgcgtcgtgctcctcagaaggacgcccgacaggagcaacggcatccgtgccgctgccggcagcagggccacgaccacctgctccgccttaagctagagtgcccgatagctgccgatgtcgcttctgcccttcgcgtttttttcacttgattctctaccctgaagggttgaagtttgttggcatgcagtgtagcgtgcattggccagttctcggtattggctcgttgaaaccgcgtgtgatctagaaacatggatgttgaggtattcatgttaggctcgttcggttgcataaaaatccatataaattagagaagatcgggtgtgtttcaattcatagcaagtcaagat

SEQ ID NO: 91987 - DNA, 1920 bp, Zea Mays
tccttctcattcgactctgatgatgacgagacggttatcgttccccttctggtcgaatcgttattatcagtgggctagaacatactaatgcgagtgctgtgctgctaaatctaatctgcgtgcgattggtcgatgggcaggttcggtggagatcgccgccgttggcgtttcgatcgccatatttaaccaagtctccaaggtctgcatctaccctctcgttagcgtcacaacgtcgttcgtcgcggaggaagacgcgatcatcagtaaggccgtccgaggaaacagcagccaggaggaggacgtggagaaagcctcccacgtgggctttgatccggagaccagcaatctgcatgcatctggccctgcaggtatggcagaatgcgtgaactcgtgtatccctacggagtgcgcagcagatccctctggcaggcaagggcggtgcgagaagaggtacgtgccgtcggtcacgtcggcgctaatagtcggttccattctcggcctgcttcaggccgtcttcctggtcctttcggccagattcgtgctcaacatcatgggtgttaagtccggatccccgatgcaagggcctgcggtgcgctacctaacgataaggtcccttggtgcccccgctgtgctgctgtctctggccatgcaaggggttttccgggggttcaaggacaccaagacaccgttatacgctactgtggttggcgacgcggcgaacatcatactggacccgattttgatgtttgtttgccatatgggcgtcactggtgcggctattgctcatgttgtttctcagtacatgataacgttgatactgctgtgccggctcgtccagcgagttcacgttatcccacccagcattaaatctctgaaatttgggaggtttcttggatgtggattcctgctgctcgcaagggttgtcgcggtgacgttctgcgtcacgctggcggcgtccctggccgctcgccatggacccaccgtcatggcaggcttccagatctgctgccagctctggctggccacgtctcttctcgccgatggattggccgtggcaggacaggcggtgcttgcaagcgcgttcgccaagaacgacagtaagaaggtcgctgccgcgacatcccgtgtgttgcagctgagcattgtcctgggcatgggtctcaccgtcgtgctgggacttgctatgaggttcggggctggcattttcacaagcgacgtgcccgtgatccaagtcattcacagaggcatcccgtttgtcgccgggacgcagaccatcaattccctggccttcgtgtttgatggcatcaactttggagcgtcagactacagatactctgcttactccatggttgctgttgcgtctgtgtcgataccatgcctgctgtacctttctgcgcataacggattcatcggtatatggatcgcattgacgatctacatgagtctgaggaccatagctagcacctggaggatgggggcagcgaggggaccatggacgtttctccggaactgatgatggattggcttggaactgatgatctgcggcacactgctgacagataaggctgcgccgcgctgcgcatgcgcctctcatgtagcatcagcgaagtatagtacgtgttctgctggtgtttaaagcttcggatatcggaggtagatgtagctatgggactatcccctcctgatcgtctgacttgtggccttgcgtggagagtttacgttgctccgttgatttatgttgtatcatgccaggatgtcagtttaataccatacatcggtaaagtgtctctctagtaactccattcttttctccttttccccccctttgtgcaagctatttttttagctgtttgatgagaccttgcaagaactgttttactgcgtggaagcagcaaaataacagcgataaaagagacgtgt

SEQ ID NO: 91988 - DNA, 1831 bp, Zea Mays
tccttctcattcgactctgatgatgacgagacggttatcgttccccttctggttcggtggagatcgccgccgttggcgtttcgatcgccatatttaaccaagtctccaaggtctgcatctaccctctcgttagcgtcacaacgtcgttcgtcgcggaggaagacgcgatcatcagtaaggccgtccgaggaaacagcagccaggaggaggacgtggagaaagcctcccacgtgggctttgatccggagaccagcaatctgcatgcatctggccctgcaggtatggcagaatgcgtgaactcgtgtatccctacggagtgcgcagcagatccctctggcaggcaagggcggtgcgagaagaggtacgtgccgtcggtcacgtcggcgctaatagtcggttccattctcggcctgcttcaggccgtcttcctggtcctttcggccagattcgtgctcaacatcatgggtgttaagtccggatccccgatgcaagggcctgcggtgcgctacctaacgataaggtcccttggtgcccccgctgtgctgctgtctctggccatgcaaggggttttccgggggttcaaggacaccaagacaccgttatacgctactgtggttggcgacgcggcgaacatcatactggacccgattttgatgtttgtttgccatatgggcgtcactggtgcggctattgctcatgttgtttctcagtacatgataacgttgatactgctgtgccggctcgtccagcgagttcacgttatcccacccagcattaaatctctgaaatttgggaggtttcttggatgtggattcctgctgctcgcaagggttgtcgcggtgacgttctgcgtcacgctggcggcgtccctggccgctcgccatggacccaccgtcatggcaggcttccagatctgctgccagctctggctggccacgtctcttctcgccgatggattggccgtggcaggacaggcggtgcttgcaagcgcgttcgccaagaacgacagtaagaaggtcgctgccgcgacatcccgtgtgttgcagctgagcattgtcctgggcatgggtctcaccgtcgtgctgggacttgctatgaggttcggggctggcattttcacaagcgacgtgcccgtgatccaagtcattcacagaggcatcccgtttgtcgccgggacgcagaccatcaattccctggccttcgtgtttgatggcatcaactttggagcgtcagactacagatactctgcttactccatggttgctgttgcgtctgtgtcgataccatgcctgctgtacctttctgcgcataacggattcatcggtatatggatcgcattgacgatctacatgagtctgaggaccatagctagcacctggaggatgggggcagcgaggggaccatggacgtttctccggaactgatgatggattggcttggaactgatgatctgcggcacactgctgacagataaggctgcgccgcgctgcgcatgcgcctctcatgtagcatcagcgaagtatagtacgtgttctgctggtgtttaaagcttcggatatcggaggtagatgtagctatgggactatcccctcctgatcgtctgacttgtggccttgcgtggagagtttacgttgctccgttgatttatgttgtatcatgccaggatgtcagtttaataccatacatcggtaaagtgtctctctagtaactccattcttttctccttttccccccctttgtgcaagctatttttttagctgtttgatgagaccttgcaagaactgttttactgcgtggaagcagcaaaataacagcgataaaagagacgtgt

SEQ ID NO: 91989 - DNA, 1822 bp, Zea Mays
gtcacaactgatgggttgcaccagacaggacctattcacagcgttcggtggagatcgccgccgttggcgtttcgatcgccatatttaaccaagtctccaaggtctgcatctaccctctcgttagcgtcacaacgtcgttcgtcgcggaggaagacgcgatcatcagtaaggccgtccgaggaaacagcagccaggaggaggacgtggagaaagcctcccacgtgggctttgatccggagaccagcaatctgcatgcatctggccctgcaggtatggcagaatgcgtgaactcgtgtatccctacggagtgcgcagcagatccctctggcaggcaagggcggtgcgagaagaggtacgtgccgtcggtcacgtcggcgctaatagtcggttccattctcggcctgcttcaggccgtcttcctggtcctttcggccagattcgtgctcaacatcatgggtgttaagtccggatccccgatgcaagggcctgcggtgcgctacctaacgataaggtcccttggtgcccccgctgtgctgctgtctctggccatgcaaggggttttccgggggttcaaggacaccaagacaccgttatacgctactgtggttggcgacgcggcgaacatcatactggacccgattttgatgtttgtttgccatatgggcgtcactggtgcggctattgctcatgttgtttctcagtacatgataacgttgatactgctgtgccggctcgtccagcgagttcacgttatcccacccagcattaaatctctgaaatttgggaggtttcttggatgtggattcctgctgctcgcaagggttgtcgcggtgacgttctgcgtcacgctggcggcgtccctggccgctcgccatggacccaccgtcatggcaggcttccagatctgctgccagctctggctggccacgtctcttctcgccgatggattggccgtggcaggacaggcggtgcttgcaagcgcgttcgccaagaacgacagtaagaaggtcgctgccgcgacatcccgtgtgttgcagctgagcattgtcctgggcatgggtctcaccgtcgtgctgggacttgctatgaggttcggggctggcattttcacaagcgacgtgcccgtgatccaagtcattcacagaggcatcccgtttgtcgccgggacgcagaccatcaattccctggccttcgtgtttgatggcatcaactttggagcgtcagactacagatactctgcttactccatggttgctgttgcgtctgtgtcgataccatgcctgctgtacctttctgcgcataacggattcatcggtatatggatcgcattgacgatctacatgagtctgaggaccatagctagcacctggaggatgggggcagcgaggggaccatggacgtttctccggaactgatgatggattggcttggaactgatgatctgcggcacactgctgacagataaggctgcgccgcgctgcgcatgcgcctctcatgtagcatcagcgaagtatagtacgtgttctgctggtgtttaaagcttcggatatcggaggtagatgtagctatgggactatcccctcctgatcgtctgacttgtggccttgcgtggagagtttacgttgctccgttgatttatgttgtatcatgccaggatgtcagtttaataccatacatcggtaaagtgtctctctagtaactccattcttttctccttttccccccctttgtgcaagctatttttttagctgtttgatgagaccttgcaagaactgttttactgcgtggaagcagcaaaataacagcgataaaagagacgtgt

SEQ ID NO: 91990 - DNA, 2245 bp, Zea Mays
cagataacaagcaagcgccgcaacgcacgcgacgggccggccggggaggcgtataagtacgggcgcgtcttcttccgccgctgccccgacatctccctctctcgctggtgcgagagcgcgcgcgcaagcaagcaaggagcgtcgtgtctagctagctgagcacctggttttggagcatggaggacaacggtgccgccgccgccgccgccgctcccgcgacgagcatgcctgccgagaagcgtgtggcggtcatccagggggacgcgccgccggagccggcggcggggctactgccctgcgggccgaggaagacggggctccacctcttcgtcatgaacatcaggagcgtcttcaagctggacgggcttgggtcggaggtgctgcgcatcgcggtgcccgcgtcgcttgcgttggcggcggatccgctcgcctctttggtggacacggcgttcatcggccgtttaggttcggtggagatcgccgccgttggcgtttcgatcgccatatttaaccaagtctccaaggtctgcatctaccctctcgttagcgtcacaacgtcgttcgtcgcggaggaagacgcgatcatcagtaaggccgtccgaggaaacagcagccaggaggaggacgtggagaaagcctcccacgtgggctttgatccggagaccagcaatctgcatgcatctggccctgcaggtatggcagaatgcgtgaactcgtgtatccctacggagtgcgcagcagatccctctggcaggcaagggcggtgcgagaagaggtacgtgccgtcggtcacgtcggcgctaatagtcggttccattctcggcctgcttcaggccgtcttcctggtcctttcggccagattcgtgctcaacatcatgggtgttaagtccggatccccgatgcaagggcctgcggtgcgctacctaacgataaggtcccttggtgcccccgctgtgctgctgtctctggccatgcaaggggttttccgggggttcaaggacaccaagacaccgttatacgctactgtggttggcgacgcggcgaacatcatactggacccgattttgatgtttgtttgccatatgggcgtcactggtgcggctattgctcatgttgtttctcagtacatgataacgttgatactgctgtgccggctcgtccagcgagttcacgttatcccacccagcattaaatctctgaaatttgggaggtttcttggatgtggattcctgctgctcgcaagggttgtcgcggtgacgttctgcgtcacgctggcggcgtccctggccgctcgccatggacccaccgtcatggcaggcttccagatctgctgccagctctggctggccacgtctcttctcgccgatggattggccgtggcaggacaggcggtgcttgcaagcgcgttcgccaagaacgacagtaagaaggtcgctgccgcgacatcccgtgtgttgcagctgagcattgtcctgggcatgggtctcaccgtcgtgctgggacttgctatgaggttcggggctggcattttcacaagcgacgtgcccgtgatccaagtcattcacagaggcatcccgtttgtcgccgggacgcagaccatcaattccctggccttcgtgtttgatggcatcaactttggagcgtcagactacagatactctgcttactccatggttgctgttgcgtctgtgtcgataccatgcctgctgtacctttctgcgcataacggattcatcggtatatggatcgcattgacgatctacatgagtctgaggaccatagctagcacctggaggatgggggcagcgaggggaccatggacgtttctccggaactgatgatggattggcttggaactgatgatctgcggcacactgctgacagataaggctgcgccgcgctgcgcatgcgcctctcatgtagcatcagcgaagtatagtacgtgttctgctggtgtttaaagcttcggatatcggaggtagatgtagctatgggactatcccctcctgatcgtctgacttgtggccttgcgtggagagtttacgttgctccgttgatttatgttgtatcatgccaggatgtcagtttaataccatacatcggtaaagtgtctctctagtaactccattcttttctccttttccccccctttgtgcaagctatttttttagctgtttgatgagaccttgcaagaactgttttactgcgtggaagcagcaaaataacagcgataaaagagacgtgt

SEQ ID NO: 91991 - DNA, 1617 bp, Zea Mays
atgccggccggagggttctcggtctcggcgccgtccggcgtcgagttcgaggctaagatcacgccgatcgtcatcatctcctgcatcatggctgccacaggcggtttgatgttcggctacgacgtcggcatctcaggtggtgtgacgtcgatggacgacttcctgggcaagttcttcccggcggtgctgcggaagaaactggaggacaaggagagtaactactgcaagtacgataaccagccgctgcagctgttcacgtcgtcgctgtacctcgcggggctgacggccaccttcttcgcctcgtacacgacgcggcgcctcggccggcgcctcaccatgctggtcgccggcgtcttcttcatcgtgggggtgatcttcaacggcgccgcccagaacctcgccatgctcatcgtcggcaggatcttgctcggctgcggcgtcggcttcgccaaccagtccaagccaacgtatacgacatgcaccgcgcaattatgtcagagcaggcgagactgggacagtgttcatgtggccgttcccctgttcctgtctgagatcgcgccgacgaggatccgcggcgggctcaacatcctgttccagctcaacgtcaccatcggcatcctgttcgccaacctcgtcaactacggcacgtccaagatccacccgtgggggtggaggctgtcgctgtcgctggcaggcatcccggcggcgctgctcaccctgggcgcgctcttcgtgacggacacgcccaacagcctcatcgagcgcggccgcctggacgagggcaaggccgtgctcaagaggatccggggcaccgacaacgtggagccggagttcaacgagatcgtggaggcgagccgcgtggcgcaggaggtcaagcacccgttccgcaacctcctgcagcgccgcaaccgcccgcagctcgtcatcgccgtcctcctccagatcttccagcagttcacggggatcaacgccatcatgttctacgcgccggtgctgttcaacacgctggggttcaagagcgacgcgtcgctctactcggccgtcatcacgggcgccgtcaacgtcctctccacgctcgtctccgtctactccgtcgaccgcgtcggccgccggatgctgctgctggaggccggcgtgcagatgttcctgtcgcaggtggccatcgccatcgtgctgggcatcaaggtcaccgaccactccgacaacctgggccacggctgggccatcatggtcgtcgtcatggtctgcaccttcgtctcctccttcgcctggtcctgggggcccctgggctggctcatccccagcgagaccttcccgctggagaccaggtcggcggggcagagcgtcaccgtctgcgtcaacctgctcttcaccttcgtcatcgcgcaggccttcctctccatgctctgccacctcaagtacgccatcttcgtcttcttctccgcctgggtcctcgtcatgtcgctcttcgtcctcttcttcctgccggagaccaagaacgtgcccatcgaggagatgaccgagagggtgtggaagcagcactggttctggaagcgctacatggacgacgacaaccaccacatcgtcaacggcaagctcaccggcgcctccgtttaa

SEQ ID NO: 91992 - DNA, 1746 bp, Zea Mays
ccgaagcagagcacgacggacaaaaatatggcagggaaagccggcggactcaaaggggttgccctcatcggcggcagcgccaacagcacggtcgctggggtcattcacttcttcgaggacccctccaccaggtacaccgaggtgaggggcaaggtcacgggcttgactccgggaaggcatggattccacatccacgtcttcggcgacactaccaatggctgcaactcaaccggtccccattttaaccctcataataaaccccatggagctccatttgacgacgaacgacatttgggcgacctgggaaatatagtagccaatgaagatggagatgcagaagtgttcataagagacttacagatttcattgagtgggcctcattccattctgggaagggcagttgttgtacatgctgatcctgatgacctagggaggggtggccatgaactgagtaagtcaacaggaaacgcaggagctagaattggatgtggtatcattggaattcagtcatcagtttgacaaataacggcttagtagcaccagaaaaagagggggacatgattccacagtccgtgcagtgtcgtggtttagggatatggaaatggtgttcgttgttctggaccgtttgaagactaaatatctccagtcatgtatacaataatcttacagtcggtgaggaaattgcttgtaaaatcttgcattgacttatatcactggttaccagcagcaataagtctatatgtaaaacttctcgatttgtatatgctatgcttcctgtggagcagggaagcgaacacaagtcagccttttgtgagtgcattctgtccagtttttacttggtcatctcgtattctcgtgtgtgtcatgaccaagtggcaagctcaatcctggtattgttgtcttgtctcaaattaaatcgggttccacaagttaaccagggaatcatttttcttccctaggatggcaaatttggcggtggatttacttgcagtgtccactgatacgtgtccgtcttattcgcttgcacctattataccaacttcaaactagcttgcggtagatgccggtgctaactggttttaaaatgtccattcactgacccacccccttttatttttgtcagccttcttgttgcacaggaatcaaacggcaggcaggaggcagcttatgacgtccaagcaccagctagcctagccggccactcatccttgcgaggcaggaaaggattacagtcccaagacactgaacaatacagcttcgcaagggatcgagaagcagacaagaagaagagaacgggcaacgtcgatacggctaaaaggacggtaactggtaccaaggtcagccctcgcaagaaatgcctcgacgggaaccggacacccgggaagacgtcaggcgcgagccgtgcccgcccgtcccgacccaggcgtgcccaaacaacgatgcacgccgtctcggcgcgacgcgcgcacccgtcggcatcaaactgtgcgctggacgggaccggtcggctgagcccgggaggatcggtggacggccttggagccttctcccttggccccgggcggacgccgtgcgggcgcaacgggatgccgcggggccgcgacgccggctacggacaccgcccgcgccccgggccgatgccgccacggagaagcggctcgtggactttccgcgttcgagatgaaccaagtcacgagccgacgcgcccagctcgcgcgcgctactcggaacggacggagcggaggc

SEQ ID NO: 91993 - DNA, 790 bp, Zea Mays
gaagcagagcacgacggacaaaaatatggcagggaaagccggcggactcaaaggggttgccctcatcggcggcagcgccaacagcacggtcgctggggtcattcacttcttcgaggacccctccaccaggtacaccgaggtgaggggcaaggtcacgggcttgactccgggaaggcatggattccacatccacgtcttcggcgacactaccaatggctgcaactcaaccggtccccattttaaccctcataataaaccccatggagctccatttgacgacgaacgacatttgggcgacctgggaaatatagtagccaatgaagatggagatgcagaagtgttcataagagacttacagatttcattgagtgggcctcattccattctgggaagggcagttgttgtacatgctgatcctgatgacctagggaggggtggccatgaactgagtaagtcaacaggaaacgcaggagctagaattggatgtggtatcattggaattcagtcatcagtttgacaaataacggcttagtagcaccagaaaaagagggggacatgattccacagtccgtgcagtgtcgtggtttagggatatggaaatggtgttcgttgttctggaccgtttgaagactaaatatctccagtcatgtatacaataatcttacagtcggtgaggaaattgcttgtaaaatcttgcattgacttatatcactggttaccagcagcaataagtctatatgtaaaacttctcgatttgtatatgctatgcttcctgtggagcagggaagcg

SEQ ID NO: 91994 - DNA, 2267 bp, Zea Mays
gttctgcaccgcaccctctcactcatcgacccccgccgtagtagatggctagatgccaaaatcccaaatcccttgtgaacctcctaaacctaagcgatggcggtggcggcatcgccgtatttcctcttgctcttcctcttccattcattagctgcactcgcctccctcgcgccaccgccttctcagccaccaccgccgcgggtgcctcagaaagtgcaggtgtggcccaagccggtgtccatctcgtggccgttgccggcatacgcgccgatctccccgtcgttcaacatccgcgcctcgccgtcgcacccgtcgctccgtcacgccatcgcgtactacacccgcctcatccgcaccgagcggtacacgccgattatgccccccgtcaactacaccgtctcgggcgtccccatccgcctgctcgcgctctccgtctccgatcccgacgtcccgctcggccccggcgtcgacgagtcctacacgctctccgtgccacccaattccagctccgctgacatctctgccgccactccctggggcatcatccgcggtctcgagaccttctcccagctcgcctggagcagcggcgccgccgacgcgagcggccagccgatcgtccccagcgagatagaaatctccgaccaccccctattcacccaccgcgggatcctcctcgacaccgcacggaactactaccccgtccgtgacatcctccgcaccatccgcgccatggcctccaacaagctcaatgtattccactggcacatcaccgactcccagtccttccccatcgtcctcccctcggtccccaatctcgccaacttcggctcctactcccccgtcatgcgctacaccgaccaggacgtccgccgcatcgtccgatacgccggggcctttggcatccgcgtcatccctgaaatcgacatgcccgggcacacggggtcgtgggcgggcgcgtacccggagatcgtgacgtgcgcgaacaagttctgggcgccgacggcgaagccggcgctggcagcggagccctgcacggggcagctgaacccgctgaaccccaagacgtaccgcgtggcggaggacgtgctgcgcgacctggcggccttgttcccggacccgtacctccacgcgggcgccgacgaggtgaacacggcgtgctgggaggacgaccccgtggtgcggggcttcctggcggacggcggctcccacgaccgcctgctggagctgttcgtgaacgcgacgcggccgttcctagtccacgagctgaaccgcacgtcggtgtactgggaggacgtcctcctggggcccaaggtgtcggtcgggcagacggtgctgccccacgacaccaccgtgctgcagacgtggaacaacggcgccgagaacaccaagcgcatcgtggcggccgggtaccgcgccatcgtgtcctccgcgtcctactactacctggactgcgggcacggcggctgggtgggcaacgacagccggtacgacgtgcaggagaaggagcacgatggcatgccgctgttcaacgaccccggcggcacgggcgggtcgtggtgcgcgcccttcaagacgtggcagcgcatctacgactacgacatcttgcacgggctgacggaggacgaggcgaggcgggtgctgggcggcgaggtggcgctgtggtcggagcagtcggacgccgcggtgctggacggcaggctctggcccagggcctccgccgccgcggagacgctctggtccgggaacaaggggtccaacggcaggaagcggtacgccaacgcgacggtccggctgaacgagtggaggtaccgcatggtggcccgcggcatccgtgccgaaccgatccagccgctgtggtgcccgatgcacccgcgtatgtgcaacctctcgcagtagcagcctgaagcgcgacgcctttcgactttcttttagagatagctttgctgcttcctgcaagctgccatggacagaaactggatatgcagggagtcatacagggaggcggaactttgcaagaacagtcggtatcgatctacggatcaaggtccggatgaatcaagagaccagaataaaaccaaggcatcgccaatgtaccatggccatcattgatttcatcttggtttgctcagtcgtgtcatgaattaacaggtgcattattagctctgcactaaaaacttcccaactcccaagttaaacgaaattgagagagaaaaaatcatctttagattttctgttggcttgtccaataatacatccgtcagcatcac

SEQ ID NO: 91995 - DNA, 2410 bp, Zea Mays
atggcactttctttttctgtgccaattctcttgatcaagctgatgttcctgcctgtctcttattcttgcaacattcaaacagttttcatgcttttgaaaagtaagtcagaacaggaacgtcgtttgctcacagctcttgttaacaaacttggtgatcctgaaaggagagcagcatcaagtgctgcatatctgttaacatgtctcttggctgctcaccctaatatgaagatggtggtgatagatgaggtggattcttttctcttcagaccacatgttggacttagggccaagtaccaggctgtcaatttcttgagccagattcttcttacaaacaagggagatgggcctaaaattgcaaaacggttggtggatgtctacattgcacttttcaaggtactaatgagctctggtgataccaaaggagatacatatagcaaggacagcaagaaaaaggtaggaaaaatagagggaggaaataacaagatggactccagatccaagggaaacaatgaagtgggttcaacagcaggatcagatttggagctggactccagaatcctttctgcgcttttaactggtgtaaatagggcattaccatatgttgcaagctcagaagttgacgatattgtggaagtgcagacacctattcttttcagattggttcacgctgaaaatttcaatgttggtgttcaggcattgatgcttttgttccaaatatctataaagaataatatagcaagtgatcgtttgtaccgtgcattatactcaaaactcttgagtccttctgctgttacttcctcaaagccagagttatttcttgggctgttggtgaaagcgatgaagaatgatgtaatgttgaagagagttgctgctttctcaaagcggctgctgcaggtggctcttcaacggcctcctcaatatgcttgcggatgccttttcattctgtcagaagtccttaaggcaaagccaccattatgggggattgtgctccagaatgaatctgttgatgatggtgatgaacactttgaagacattttagagattcccgaggactcttctgttgcctcagcagtgctacataaacataatgaaaaagtagctgcacatgagaaacacaaccttgatgctgctgatggaattgatagtgtaaaacaagtaaatttggtagatgagaacaatgcatcaactgactcgtccagacaacatgcattctatgatccacgacacagagagccttcttactgcaatgcagatcgtgtcagttggtgggagttaacagtattggcttcacatgtgcacccttcagtttctactatggctagaacattgctatctggcaacaatattgtttacagtggtgatccgctgacagacctatcacttcctgctttccttgacaaattcatggaaaagaaaccaaaagggaaccgcatagctgaaggaagatggcatggtggatcacaaattgctccggctaaaaagcttaatctgaatcatcatctcatcggagaggagcttctagaattggcagaaaatgaagtgcctcctgaagatattgttttccaccgtttctatttgaacaagaccggcactgttaagcgtaagacaaagcagaaggactcagttcttgatgaagatgcgggggaactcttagctgataatgacgctgatgaggctagtgacgagagtggagatgagatactggatctgggagatgggttggcagatgatggagaatatgactatgacgaccttgactcaaatgcatttgaagaggaaaaagatttacttagagatgacagtgatgtggaatttgatgacgtttcagatgatactgcatctggggatgaagggtcagaaaatgacgatgacattcctattctcgcgggcgattcagatggcaacttaagtgatgacgagatggttgatgctggtaagggcggtgtctcttacacaaagaaaaggagggcagggaagaagagtgggttgtctccatttgcaagcctggatgattatgagcacctaatggttggggatgctgatgcaacaacagcaaagcggaagcacatggcaacagggagagctggtggtgagaagaaaccaaagttgagaccacgaaagaaaaggtcgcggagttcagaatgagaaacatgccttttacccttaactcttttaaaatgttcaccacaatggtgttcattacatttttgtacttctggaaggcacaggattgggtaacgctattgttgagccgagaatgtattgagattagattatacaggtgctctcatatagtagtccttatcccacacaacgcatttatacgggctaagtttaagaccaactcaaagagttgtttttcttattgagtcaaattttagattttctgagtaagaaattattctccaac

SEQ ID NO: 91996 - DNA, 1281 bp, Zea Mays
atggcggagccgacccccaagtcgaagcgcaccaagaaagcgaagaagccctcggcccgggaaggtgatggagaggacatggatacgctcaagtctgacgtcgccacattcgcctcctccctcggcctcctccctggcgctggcgactccaacggcggcttcgatgactccgacttccgcaagtccggccccatgtataaatcctcaaaatttccttccaaacaaccccatcaaaaacctgataacacggcaaacccccatctaaaccctagacctaccaagaagccacaccctctcgagctacgtgactcctatgctgccaccaaacctggtgctgtcaacactaattaccccctgatgaaggcggcagcactctcagggcagtggtacactgatgctgatgagctggaggcgagggtcctaggcggtcgtaagcaggtgcctccagctgtggggcttcaggagatgcagggaatagtggagagaaaacgagagctggcagagaagctcatgttgcagtatgcgagggaatacgatgccgtgaggcgagggcatggtgacctgaagctcctggacatatcagcaaagtctggtacatcagctgacaaggtgtcagcatttacatgtcttgtcgaggacaatccaattgcaaacatgaaggcactcgattccctccttggtatgataacatcaaaagttggtaagaggtatgcgttcacaggattcgatgcaattaaggagttatttctcatgaggttattgcctgaccgtaagctgaaaagtcttatccaacgcccgctagacattttacctgaaacaaaagatgggtactcacttctgctcttctggcattgggaggactgcttaaaacagagatacgaaaggtttgttatggcattggaggatgcggtaaaagatatgctgccaaatcttaaggacaaagcaatgaagattagacgtgtcgttgtagatgggcttttggagctaggctgctgcatctgtgggcttctagggttggccaacaggcacaagacaaaagcttggagcattggacgccgagcacccactcgtgctcctgcagtcctttgccaagagcgtagccgctaccggtactcaaggccgtacaaccgccaacatcgcacaaggccgcggccaccgcagcagcacaaggacgccgccgcccgcctccgccgaagacggagtgccacccctagcccgaagacagagccatcactgtattacttaaattctttgttatttcagcagcaaacacacagataa

SEQ ID NO: 91997 - DNA, 2146 bp, Zea Mays
ggcggtagccgggctctcatttaaactacccatctgcccccgattcttttaattacgggcgaccctcgcggctccgcccctattttaagaccccaccacggcaccacctcctccgcaaacaacacacgaacaccgcaccgcaacgtagccggctaggggaagagctctttccttcagctgtgccgtgcacaacgcacggcacgctggtttggtttgcatcgcccccgccaagacgctgccgtgagcaggcagagcgggtgggaagactggtgggcgagccggccgcgccgagggatagcagcagcagcagcaggcgggcgacatgccgagcggcggcgtgttctccgggtcggtgaacctcaagcacgtcaagctggggtaccagtacctggtgaaccacttcctgacgctgctgctggtgccggtgatggccgccacggcgctggagctggcgcgcctcggccccggcgagctgctctcgctgtggcgctcgctggagctggacctggtccacatcctctgctcggcgttcctggtcgtcttcgtcggcaccgtgtacgtgatgtcgcggcccaggccggtgtacctggtggactacgcctgctacaagccccccgccagctgccgcgtgcccttcgccaccttcatggagcacacgcgcctcatcagcgacgacgacaagagcgtgcgcttccagaccaggatcctggagcgctcggggctcggcgaggacacgtgcctcccgcccgccaaccactacatcccgcccaaccccagcatggaggcctcgcgcgccgaggcgcagctcgtcatcttctccgccatcgacgacctcgtccgccgcacggggctcaagcccaaggacatcgacatcctcgtcgtcaactgcagcctcttctcaccgacgccctcgctctccgccatgatcatcaacaagtacaagctccggagcaacatccggagcttcaacctgtcggggatgggatgcagcgccgggctcatctccatcgacctcgcgcgggacatgctccaggttcacccgaactcgaacgcgctggtggtttcgaccgagatcatcacccccaacttctaccaggggagccggcgcgacatgcttcttcccaactgcctgttccggatgggcgcggcggcgatcctgctgtcgaaccggcggcgcgaggcccggcgcgccaagtaccggctggtgcacgtggtgaggacgcacaagggcgcggacgaccgcgcgtaccggtgcgtgtacgaggaggaggacgagcagggcttctcgggcatctcgctgtccaaggagctgatggccatcgccggcgacgcgctcaagtccaacatcacgacgatcgggccgctggtgctgcccatgtcggagcagctgctcttcttcttccgcctggtggggcgcaagctcgtgaacaaggggtggaggccctacatcccggacttcaagctggcgttcgagcacttctgcatccacgcgggcgggcgcgccgtcatcgacgagctgcagaagaacctgcagctgtcgccgcgccacgtggaggcgtcccgcatgacgctgcaccgcttcggcaacacgtccagcagctccctctggtacgagctcgcctacatcgaggccaagggccgcatgcgccgcggcgaccgcgtctggcagatcggcttcggcagcgggttcaagtgcaacagcgccgtctggaagtgcctccgcagcatcaagacccccaccaacgggccctgggacgactgcatccaccgctaccccgtcgacgtcccggaggtcgtcaagctttgacctacgggctatggctacgacgacaacgagcgagctcggccggcaccgccgccgccgccgccgccgtcctactgtgtacctgtacgtcctctctgttctcttctcttcccatttccttcgctattaatataaaaaaggtaaaaaaagaaagaaagatccatatacactctgactgttggaagtattgtcatccctcaggcaagggattgggtgattgtaatttgcttgaatgagaatgaatcgtgcacttgtaaattgtaatccacgttgtaactgtgtgaaagggatacatgcattctcctgatacttggttgatgaagccaaccgtctcgatctgcc

SEQ ID NO: 91998 - DNA, 2214 bp, Zea Mays
ggcggtagccgggctctcatttaaactacccatctgcccccgattcttttaattacgggcgaccctcgcggctccgcccctattttaagaccccaccacggcaccacctcctccgcaaacaacacacgaacaccgcaccgcaacgtagccggctaggggaagagctctttccttcagctgtgccgtgcacaacgcacggcacgctggtttggtttgcatcgcccccgccaagacgctgccgtgagcaggcagagcgggtgggaagactggtgggcgagccggccgcgccgagggatagcagcagcagcagcaggcgggcgacatgccgagcggcggcgtgttctccgggtcggtgaacctcaagcacgtcaagctggggtaccagtacctggtgaaccacttcctgacgctgctgctggtgccggtgatggccgccacggcgctggagctggcgcgcctcggccccggcgagctgctctcgctgtggcgctcgctggagctggacctggtccacatcctctgctcggcgttcctggtcgtcttcgtcggcaccgtgtacgtgatgtcgcggcccaggccggtgtacctggtggactacgcctgctacaagccccccgccagctgccgcgtgcccttcgccaccttcatggagcacacgcgcctcatcagcgacgacgacaagagcgtgcgcttccagaccaggatcctggagcgctcggggctcggcgaggacacgtgcctcccgcccgccaaccactacatcccgcccaaccccagcatggaggcctcgcgcgccgaggcgcagctcgtcatcttctccgccatcgacgacctcgtccgccgcacggggctcaagcccaaggacatcgacatcctcgtcgtcaactgcagcctcttctcaccgacgccctcgctctccgccatgatcatcaacaagtacaagctccggagcaacatccggagcttcaacctgtcggggatgggatgcagcgccgggctcatctccatcgacctcgcgcgggacatgctccaggtaatttaattaattagctgggcagggcagtcctctaaatcatcatcgtttacgtaacataacaaacatgcttctctcttataataataggttcacccgaactcgaacgcgctggtggtttcgaccgagatcatcacccccaacttctaccaggggagccggcgcgacatgcttcttcccaactgcctgttccggatgggcgcggcggcgatcctgctgtcgaaccggcggcgcgaggcccggcgcgccaagtaccggctggtgcacgtggtgaggacgcacaagggcgcggacgaccgcgcgtaccggtgcgtgtacgaggaggaggacgagcagggcttctcgggcatctcgctgtccaaggagctgatggccatcgccggcgacgcgctcaagtccaacatcacgacgatcgggccgctggtgctgcccatgtcggagcagctgctcttcttcttccgcctggtggggcgcaagctcgtgaacaaggggtggaggccctacatcccggacttcaagctggcgttcgagcacttctgcatccacgcgggcgggcgcgccgtcatcgacgagctgcagaagaacctgcagctgtcgccgcgccacgtggaggcgtcccgcatgacgctgcaccgcttcggcaacacgtccagcagctccctctggtacgagctcgcctacatcgaggccaagggccgcatgcgccgcggcgaccgcgtctggcagatcggcttcggcagcgggttcaagtgcaacagcgccgtctggaagtgcctccgcagcatcaagacccccaccaacgggccctgggacgactgcatccaccgctaccccgtcgacgtcccggaggtcgtcaagctttgacctacgggctatggctacgacgacaacgagcgagctcggccggcaccgccgccgccgccgccgccgtcctactgtgtacctgtacgtcctctctgttctcttctcttcccatttccttcgctattaatataaaaaaggtaaaaaaagaaagaaagatccatatacactctgactgttggaagtattgtcatccctcaggcaagggattgggtgattgtaatttgcttgaatgagaatgaatcgtgcacttgtaaattgtaatccacgttgtaactgtgtgaaagggatacatgcattctcctgatacttggttgatg

SEQ ID NO: 91999 - DNA, 1804 bp, Zea Mays
tgcggacgagtgacgagacgtcgccgaacgcccggtgcgcgccggagcctccctccgtggagttggacgacggcgccagggaggtgccgttcatcaacgacgtcccgttcttcccagcataaacacaagatccgtgacctgaagaaagaagcacccgagacagccagtcatgcttccaacaatacaagcgcagatggcgagtgtgagatgatggtaagcgtgagtgatcttactcgggtcggtcgtcgtgaccaccgcgacgccgctgaagtagcacgtcccggagcccattcccatgccgtggtagtaggcgttgaaggcgtacgtggcgtgcgcgtccacggtgtccgggtcgtagcacggctggccctgcatcagcacggagcagtccaccttcccggggccgcacgcccagtccagcgccgcctgcagcatcttggggtccgcgccctcccgcgccacgcagtaggtctggttcgtcgtgtcgttggccagcaggacgccggagcccgtcaggtgcagggtgtaggcagggacgccgttcatgtcgaacaggccccagtacttctccgacgtggagcccgggcgggtgtcctcgtcgtacagctcgtagacgtaggtcggcacggccaccccggggtgcttcggcgtgccggtgctgttcatcacgtggcggatgaggttgctgttgtacgtgtcggcgttgtcagaggtggcgtcgggctcggaggaggagtcgcccttgtgcggccacccggtctccgtcaccatcaccggcacgttggtgacgttcaggtacgccatggcgaagtaggcggcgtccaccaccgcgtcgaacacgttggtgtagtgcagcagggtgttggcgtccacggcctccttgttgggcggcagcggccggaacagcgcgtagtccagcgggatgacgccgttggagcgcatgtagtcgtagtaagggtacacgttgagcatgagcggcgaccccgtggactgcaggaacctgagcatcggcaccagcacgccgtccagcgaccggttgaagaaggcctgggacggcgggaacgagtcgaggatgatggacgacgagtgcggcgtcgagaccttgatgtaccggtccagcgccgcggccaccagcgcgttctggaggtagcgcatggcgggcatgagcagcggcgccgcgctcggctgcgccgagagcacctcggaccccacggcgatggccgtgatgttcacggcggggaagtgcgcggccacgttgcgcgccacccagttggccgccgtcgcgttcgagttgccgatggccagcagctgctcgttgggcacggacacgatgacgcggatgccggtgttggacagcgccgccagcatcgccgggtccgcgtcgtagagacgcacgtggcggatgttctgcgaccggagcagcgtggtgatctgcgtcggcgctggcaccgacgacatggccgtgccaatgttcacgccaatgaaccttaccgtcttcaccgtgaactgctgcagcggacagcgagaggacgaaggagatgaacaacagcttcctcatgttcccgcaagagaagcccgccccggccgtggggaacttgcagcgcctcggttgggggttctccccccctgtccctctctcgacgggaaatacgagaagcgacttactacctttgctgcagcctctgatccagcattcggccgagcaggatgctaaaaccaacaggagcagggacaagaagtggaaggaagtgggaagaagagacgggaaggaaggaaggaagagcaatgcactgcggtggaaggc

SEQ ID NO: 92000 - DNA, 4490 bp, Zea Mays
tcgccttccgttccctctccagcaccgcaccacagctagcccgcgtgtcccccaatcatacgtaccaccgcgggggcgtgtccgcttgcatcctcctccctcccccgtcccgtctccaccctccacctcctctcgcgtccgccccgccgctcgcggatgcgccggcgcgctcccacccccaaaccctagcctcgatcccgatgggcacgccccgcgcggggtccccggcgtccccggtcaccggcgaccactacctcgacctgctcgtccgcttcgtggcgcgcaacgcgggcgcgctgctcgacggcaccgtcaccctccgcctccaccccgtcggactccactacgtcgcctcccgcctcgaggcgctccgggagctcgaggccgtgggcgccggcgccccagtcgactacctccgcgcctacgtcgcggaccttggcgaccaccgagcgctcgagcagctacggcggatcctgcgcctcctcacctcgctcaaggtcgtcgccccggggccccgccgcgaccccgcgccgctctcgatcctgcctttcgcgcgcctgcgcgtgctcgagctgcggggctgcgacctctctacctcggccgccaggggccttctcgagctccgacacaccctcgagaagctcgtctgtttcaattctacggatgctcttaggcatgtctttgcgagtagaatcatggatatcaaggactcccctgtatggagcaaactttcatatgtctcatgtgcatctaatggtgtagtactcatggacgagtcgttgcaattgttacctgcaactgaaaccttggaccttagtcgcaacaagtttgcaaaggtggacaatctgcagaaatgtacaaagttgcgaaatctggatctcggatttaatcatttgcgttcgatttcatccttgagtgaggtttccagtcgaatcgtaaaacttgttgtgagaaataatgctttaactacagtaaacgggattgaaaatctcaagtcactcatggggcttgatctctcttacaatatcatctcaattttctcagaattggaaatcctcggcactctacctctgttgcaaaacctctggttggaaggcaacccaatctgctgtgcccggtggtatcgagcacatgtgttcagtttttttcgtaatccagagaatttgaagctagatgataaaggtatgaacacacaagaatactgggaaaagcaagtattgtttgcatgcaggcaaaatcaacctgctggttatggattttattttcctgcaattgatgatcatgaagatgaagacatattgaatttgaagatgagaaaattttcccgacttgtgagcatagtggaggaagagagaaatctctgtgatggtgtagagcagcagtccacccactgtgatagtgacagttccaagaaggatgaaactgcagctgttgatcatgacctaataattgcttcgttgataaacaccgccgaaatgctgaagaaagaaaagtcaagtaattggctttgtgaatttaaggagtggatggatgacaatacagagaaaacagaaggcgacaacctatctgttggcttaactaatggcaatgggaagtatatcaaacaaaagaaaaggcagaaagcacacaaggagacttcaaataacatgtcggatttggtacaagtttcagaaggtggtagtagctcaaaccttttggaatcagattcatctttcacagataatgcattttctggttcaaatggagtcatcaaacaatcctcaaatgaacttaattttgaccaagatcatctaaaaatgcacttgaattcttttcaacgacctcctcctctagagttagtagccacttcacaaactgaccccttttctgagttggaaaatggctctagaaatatgctggcaaatgggacaccatccaatacaatgagcaagttaatagaatcaagtccaccccatacatattcaagtccacagtcacctccacaatacaaggaggacattctacatcgaagactttttatggaggaagaatttttgcagatttcaggacatcttcattctattggttcacttggtagtggtagcagctgcagcgatggttcttcgagtgattttggttcatgcaattctgaagatgattatgaagaaattcagacaaagatggagttgtctcttaatggccagatggttttatttccttctgtaaatggtgatgatcatgaggcgaataataacttagagcatttttcaggggagaatactttgtctgaccatccagaagaaggtgagccgagttgttcagatcacagagagtttgatattgaggagttccataacagtaaccagagaaatggccatctagggcattatttaggccatttaattgggcaaaaaggcaaggagaagtttaagtggagggtatttcctttcaagaatcataatggtaccaaactagaaaatccaaaaatgaatgacgatcaggtggctgagcatgttttagttgaaggaaatggccagttgacatgcaacccaagcaaaagtactcacaaggaaggctctaaaagtcattcttctaatatccttcataagaacaattcatctgtttgcacaattaacacaggcgaacacaacactcttgaggatttcttcaacttggaaatagcggacaaggatgggtttgaaacatgtgaacaagtagcttgttgcgcacacatgtttcaggattcaagtggtttagttcaaagagaggtagccttgctgcgaagttctcaaaacaaattgtatctgctactacttgatatggtttttgatggacaagaaatcatgccaagaattttgggcagctatagtctgcaaagtctagaaaaagtttcaattgggctgggactacaggcgctgagagtacacatgtcagatgatacaactcatctattcatcacaaggacttccaaggaagcgcaagatgtactttggctcttgagcgtaactaacttccccaaattaaaccacaagatacattttcaaagttgggagaacatccaagtcaaattgttcgagaaatgtattatacgcagaactgcaaatacgggaatatttctctactctatgttgatgttctggaggaatgacgttgaagaagactccctttttattagatccatctttgtcattgaaggctccatattggtgtgcattgaggacctagatcagtttggtggtatcccttatgattcaaatcccccatacttttcccttgatgcatcttgttctattagcaatatccgagaagtggtcatggatcagcgcaacaacaaatgtttgacattgattttggataatggtaggccaggagagtttcacaatagcatccaaaatcctcaaaacaagcagtctgaggaaatcggcacagtacatacatggaaacttaagtggttctctgaagaagcgtctctgaagttcatttctgtaattaaggctctctcctcgacagcagcaatttcgtctttacatgtaaagtgtatatcctgatgatgtcggttattgtagttctacggtgatttcattcattcttttgtggtttgtccatgtagctgttaatctgtacagtttgatagttgggttctaggtttgtgtttgctgtattctttgtagttattagatgattttcccaccctgaagttgtacagaacagagctagaagtgagtgtaagtgaatggggttgcagttttggcaacgggcggtttcgtaaagttggttcaaaacctcaggaggcgcgatggtttgatcaggaaaggaactcacgcgacagattgcgaagaatcacagtttagcagctacggcaaacaggcatatgaacaatgggactcgcatgctgaaactacaattacctatcggacctgcgtagtaccttcaaacttctgtgtctattttgctaccgctatttgaacagggttcaacctctgcttccccaccgacggcacatttattcatcatcgccagcatgtgaagccgtgacgggatcggcggcaggccgacatcagcgacaccttccagctgctgcacgacgagccccatggtcggccggtcgccttcttcatcctggatgcaccagcacgcgaccttgcagaccctctcgagctccacgttggcatccccggcgatcttgtcgtctagcagcccgaccacgtcccccgcgtgcagcctgacggcggcgtgcaccgggaagtacacagcggagttggaccctgtctccgaggagccgttgttccggcgtcccgagatgagctcgaacaggagcaggccgaagctgtacacgtcggccttggcggtgatcggcgcgcccgcgagccactctggcgccagatagcccatcgttccccgcatggtggtcagaacgcggctgaagtcgtggccgacaagcttggccatgccgaagtccgcaaccttggcgcccatctcctcatcaaggaggatgttctctggcttgatgt

SEQ ID NO: 92001 - DNA, 1247 bp, Zea Mays
atggccagagattgtcctagcggtggaggcagtggcggagggaggttcggcgacaacggtggggtggcggcgaccgctcctgctacaactgcggcgagaccggccacatcgcccgcgactgccccaggtaaggtgtgtccgcgtccgtctaaccagatcagatcggatcgctccaccacctgctggtctgatggcgccgcccccttctagatctcgcttaaaaaacaacccctctcgctgtgtgtcggagtaccgctttagtttagccgatccaggcacgagtgcccgctgcctctttcctcttatgcgtaagaggatctcgtccgccgttttcagatttcattcggttcgtagaagaactcaagttaagttaagttatcatggtgtgtgcttggtcgtcgttcgtcgttaaggtcccgtcctgtgttgtcgaggggaaatcgaatatgcttttcttttattttcttttttgtggtttgttccatcagactgaggaaggagatgagatgattattctcccagattataatcctgcctgcttgtgcttgatttggttaccacaaatgcttcaccactacctcgcgatttgattatgcgcaacgcatgggcagttcttgtgatactgcggtgggtggttagatcacacgacccattgtttggtacagaatggaattgctggcacctaccagtagtacacaactacacgtctgcctattgtttagaacatgcaacttcatcagaacatgcagcttcagacattttcacagaactgttcaagtattgaaggtcgctctgttaatgagtttgttgatgcctgcaagaaggcaactggggtcaacatcaaaattaatttcgtcttgacttggtgtgcttccctgagtcttcagagcccagacagacatcatctcatgcctaaagcaaacaagcttctaaaaaataagctgtattttcctgaaggtgatgtaagcgattctaccattgagttgaagaatgcgatcaaggatagtttctacatgaagaaccaatttctggtgtccaacagtgagcatgcctctttgagccagtcggaggttctagaggaaccaaagttcagttgtttaatctggatgagtgagctaactgaagcgacgtccttagtctgtggtcacattttctgccagaagtgcatcatgactgccattcgggcccagaagaagtgccctacctacaagaggaggcttactccaacccaacaacactgggtgtag

SEQ ID NO: 92002 - DNA, 493 bp, Zea Mays
cgtcattatcactttgctctgatatatgcatgtctttcaggtcgctctgttaatgagtttgttgatgcctgcaagaaggcaactggggtcaacatcaaaattaagtacctcaacagaaggccagtagattatgcataagtatacaacgacccaacaaagatcaataaggagctcaactagacagctcgatatactgatctcaaagagagcctatcagtcacatggaggtggcaaaagtcacatccgcggggctacaggccaaactaaatatagcctgctgatctataattcacttaatcgtcaatacatattaattctttagttagagatataagatcttgctgcgatactcctcaaaatcagtccttcatattctcctttccctcgtcctttttatttcaaaggtttgtttttttggctagcagaaacatgaatggtgatttggataaaaaggacctgtgatgacaatttcattgtttctgatatgggttag

SEQ ID NO: 92003 - DNA, 2507 bp, Zea Mays
ctcaatcgctccctgagttagagctgtcgcaacgaagagaaataactcacacaaaaaacacaagggagcctcccgatcatctcggtggcgatctcgaataagatccggtgctgctccatgatttgaatctctcggactgatcatgacaggaatgccccctgcagtctgcagctgattgcaggggacgtctgctgcctacagctctcggtctcggatgccatagaagagttggtccccatggactgcggacaccacggcgttgttccacggcctgaacaccaggcgccgcccaattgctgcgccaccgaggtcccgcagagcccgacgctctcttccgaagaattcctccagttcaagaggaaggccaccacgatcgtggaggagtacttctccacggacgacgtcgccgcgacggcgaacgagctgcgggagctccgcgtgccgtgctaccacttctacttcgtcaagaagctggtctccgtggcaatggaccgccacgacagggagaaggagaaggcggcggtcctgctgtcctcgctctacggcgacgtcgtcgaccgcccgcagctctgcaaggccttctgcaagctcaccgagtcctgcgacgacctgtccgtcgacacgcccgacgccgtcgacatcctcgccgtgttcgtcgcccgcgccgtcgtcgacgacatgctgccgccggcgttcctggccacgcagagcgcgcgcctgccccacgggtgcaagggcgccaaggtcctccgcagggcggagaagagctacctgtccgtgccgcaccacggcgagatcgtcctgcagaggtggggcggcagcaagcggatcacggtggaggaggccaaggccaagatatccgacatcctggaggagtacctcgccggcggcgataggagcgaggccctgcggtgcgtcagggacctcaagatccccttcttccaccacgacgtcgtcaagcgcgcgctcgtcctcgccgtggagcgcggccgtgcggccgagggcctcatcctggacctcctcaagtcggcgtcggaggaaggcgttatcaacgagagccagatcactaaagggtttgaccgtctgatcgactctctagacgatctggcgctcgacgtgccgaacgcgaggtgccttctgaaatcggtgatccataaggcttcgtcggagggctggctgtccgagtcgtgcctcaaaccgttgccaccggagccgaagaagggtagcgaggtcgacgacgccacggtgcggcagttcaaggagaaggccgttttgatcataaaggagtacttcttgaccggcgacatcatcgaggtcatgagctggttggaagcagagaactactcgtgttgtccctccttcaatgccatcttcgtgcagaagctggtgaacgccgcgatggaccggaagagccgcgagaaggaaatggcgtcggtgctgctctcctcgctctgcatgccgccagaggacgtcgtggcagggttccacctcctcatcgacgccgccgaggacgccgcgctggacaacccggccatagtcgaggacctgaccatgttctttgctaggtccgtggttgacgaggtgatcgcaccgtcggacctggaggcattggaggaggacgccggccgcgtcaaggcggatggctccgccggcatgctggcgcttcggaacgcccatgcgctgctcggcgcgaagctctccgcggagcggatcttgcggtgctggggcggcggcggcagcggcaaggcaggctgggagctggacgaggtgaaggacaagatcggcaagctgctgcaggagtacgactgcggcggcgacatccgggaggcgtgccgatgcatcaaggatcttgccatgcccttcttccaccacgaggtggtgaagaaggcgctggtggctatcatcgagaagcgaggcagggacgagcggctctggggcctcctcagcgagtgctacggtcgcggtctgatcacgccgaaccagatgaccaagggcttcgacaggatggccgactgcgtcgacgacctcgcactcgacgtgcctgacgccgcgaagcagctcggctgctgcatcgagcgcgccaagaaggatggatggcttgacccgtccttctcgatgacgacgccagggctgcctgttgcaaatggcgtttgttcgtgagcaatcggtcacattcagggtgcagcaccgcaattccatttcctggggagttcgtctgcaacttttagtacttttacacatcacactatatatacttgtactatgaatcaacaggggcaagagagagggaatatacaaatataatcgccacaacccacgacaattttggtatagaattggaagcagatcttccatcttagtttgtatggcatttagcggagaggacttgtgaattggagagtttatgtttcccaacccttttctgttacgctgttgttatgatttgctttgacaaatttacttgttcggaaaaaaatgccatgtttctccttgttaacatgtcgcat

SEQ ID NO: 92004 - DNA, 713 bp, Zea Mays
ttttaaaagttgaagaatcctaagctgaagaaaagtgtatcgatttcttatcaatttgagaatcctgatattataagggagagggaagaggagcagaagctgatgaaagaaaagcagaagaaggagaaggccgaaagaaaaaaaaaaagggaaagagtaagaggaagcatcgatcgccgagtgattcagatagcaacagtagtggtgcttcggtgttcgactccgaatctgaatcatgggtgacaggctctgaatactcttctggaagcagttcaagttatagttcatcagactccgagggcaagaagcgacaacacagaaggaagcagaagaagagaaggcacaggagggacaacacatcatcatcatcatcttctgaatctgagtctgcgtctgacagtgattctgatgataagggcagacggaggaagagtaaaagacgggctggtaggtgctgaatttaatgatctagacaaagcagtgtggaagttgaatatcattatatacttccgttctattcatgaatgacctttcatcatcatctgaacatgtgtcgggcttctcggatccaagaaatagatttagcatttgctttcctgaacggtagcactgataattttcactgtatgttcctatgatctttgtgtgaaccattgaatcctgtaacaatattcacctatggatttttcttaagtttggtgtggttcatcgtc

SEQ ID NO: 92005 - DNA, 803 bp, Zea Mays
tgccaaaacagacccattcgttccagttgatttgaactttactttatgcaaacgcataacgactcacttgtttcggctgaataaaaaagagcaccgacacttgtccaacagcctaagcagaaacgagccatatgcgactacatccgcgcaccaacagagagctcggagctccaccagaagatccagcttgcggccccaacacgcaatgtctccagtctccactctccacaaggttcctcgcagccaaatgtaattcaaatttctagcccgaaaccacaactattcaccatgcacatccagatccgaagctgagcgttcaccaacgaaccccagcgcaaagcagacgcagatcgagcatagaaccggcacggcgaccatggacgaatggaaccgagatctcgcaatgcgggggaaggagctcacctccaaactcatcgcccggatccgagccctccttgccgccaccctgtcccgcgaagggcgggagccagaagagcgccgacagcagcacggccaccccgagcacgagcgccgcaacgaattgcagccgaatcaccctcgccgctcctcctcttccgcaccagcagtagaagcggacgcccctgcttcctcctgcgccgccgcctgccacagtatcatcatgtgaatttacaaagaatgagtaatcgaggatctaagaatttgcaaaaaattataaccaccccccccccccccccccccccccacaaaattctgctagtcaatattgaatatatgtatgtataaaaggaatctatcacattcacatatttcgaaataaaggg

SEQ ID NO: 92006 - DNA, 1996 bp, Zea Mays
tcacgcacgtggccaaggcgcttccagacagcgaaaaccgcttcattcactagtcaccactctttcttgcaccccttatcttttgcccagtactccagtaggtacagacatagacagaacgcaccctccagtaaagtccccatggctgctttctggttgctgctgctgttcgtcgctagcgcagtccttgttcttcgtacatggagagctcaaagcttcgtcaacaaggcgcggcaggcagggccgaggtacccgccggggctggagccgtacccgctgatcgggcacctgccacagttcttggctaaccggcaccgcgtgctcgactggatgaccgaggcgctcgcgcgccagacgaccacgtgcacgttcgtgctgcgccggccgggaggcgtgcggggtgcgatcaccgcgaacccggcgaacgtggagcacttcctgcgcaccagcttcgaccactaccccaaggggccccggttcgcgtcgctgctgcacgacttcctcggccggggcatcttcaacgccgacggcgaggcctggcgcgcgcagcggaaggtcgccagccacgagttcaacacgcgctcgctccgagctttcgtggcgcgctgcgtgcacgccgagctacacggccgcctgctcccgctgctgcgccgcgccgcggcgtccggctcccccctcgacctccaggacgtgctcgagcggttcgcgttcgacaatatctgccgcgtcgccttcgaccacgaccctcgccagctcccggacgatggcgacgacacggcggacagcagcttcgccgatgcgttccgcgacgctgcgaatctcagcgcgggccggttccggtacgcggtcccggggttctggaagatcaagaaagcgctgaacttgggttctgagaagcggctgcgggagtccatcgccatggtgcacgacttcgccgatcgcataatccagtcgcgccgggaggagatgttgagcgccggttttgagaagcacgatcttctgtcgcggttcatggctagccaggacgagacctactccgagtccaaggtgcccctccgcgacgtggtgatcagtttcctactcgcggggcgcgagaccacgtcctcggcgctcacctggttcttctggctgctgtcctcgcggccggacgtgcagcgccgcatccgcgaagaggtcgctgctgtgcgcgcccgacgggcacaggacgacgtcgatagcgtcgtcgggttcgatctggacgagatccgcgagatgcactacgtgcacgcggccatcacggagtcgatgcggctgtacccgccggtgccggtgaactcgctgctggcggagacggacgacgtcctgcccgacggcacagccgtgcgtgcagggtggttcgtggcgtacaattcatatgggatggggcggatggagtcggtgtggggcgacgacgcgcgggaataccggccggagcggtggctgaaccccagagacggaacgttccggccggacagcccctttcggttcgtggcatttcacgcggggccgaggctttgtctgggcaaggaaatggcgtacatccagatgaagtccatcgtggcgtgcgtgctggaggagctcgacgtggcggttgacggcgcgtaccggccccggcaggttgcgtcgctaacgctgcggatggcggacgggctacctgtgaccgtgaagcagagacgggactgacgagctgctgtcacaaacctgcaactccatcagccacccatgaagcctctgcagcagcacaaggcaggcaaagctgttgttcaccgacgagcctgaacaaaactgtggtttgctcaatgcgcttgtctctgaaccaatgttttcaaatcgtctcattaatcgtggatagtcgcgattaatcgtccaagtcagtttggaccaatcatgattatcgcccacgcccaaatcatccgatatcacgactaatcgccctagtcggtcgaacgaccaacaaatcgtccgacttgaaaacatt

SEQ ID NO: 92007 - DNA, 1789 bp, Zea Mays
agacatagacagaacgcaccctccagtaaagtccccatggctgctttctggttgctgctgctgttcgtcgctagcgcagtccttgttcttcgtacatggagagctcaaagcttcgtcaacaaggcgcggcaggcagggccgaggtacccgccggggctggagccgtacccgctgatcgggcacctgccacagttcttggctaaccggcaccgcgtgctcgactggatgaccgaggcgctcgcgcgccagacgaccacgtgcacgttcgtgctgcgccggccgggaggcgtgcggggtgcgatcaccgcgaacccggcgaacgtggagcacttcctgcgcaccagcttcgaccactaccccaaggggccccggttcgcgtcgctgctgcacgacttcctcggccggggcatcttcaacgccgacggcgaggcctggcgcgcgcagcggaaggtcgccagccacgagttcaacacgcgctcgctccgagctttcgtggcgcgctgcgtgcacgccgagctacacggccgcctgctcccgctgctgcgccgcgccgcggcgtccggctcccccctcgacctccaggacgtgctcgagcggttcgcgttcgacaatatctgccgcgtcgccttcgaccacgaccctcgccagctcccggacgatggcgacgacacggcggacagcagcttcgccgatgcgttccgcgacgctgcgaatctcagcgcgggccggttccggtacgcggtcccggggttctggaagatcaagaaagcgctgaacttgggttctgagaagcggctgcgggagtccatcgccatggtgcacgacttcgccgatcgcataatccagtcgcgccgggaggagatgttgagcgccggttttgagaagcacgatcttctgtcgcggttcatggctagccaggacgagacctactccgagtccaaggtgcccctccgcgacgtggtgatcagtttcctactcgcggggcgcgagaccacgtcctcggcgctcacctggttcttctggctgctgtcctcgcggccggacgtgcagcgccgcatccgcgaagaggtcgctgctgtgcgcgcccgacgggcacaggacgacgtcgatagcgtcgtcgggttcgatctggacgagatccgcgagatgcactacgtgcacgcggccatcacggagtcgatgcggctgtacccgccggtgccggtgaactcgctgctggcggagacggacgacgtcctgcccgacggcacagccgtgcgtgcagggtggttcgtggcgtacaattcatatgggatggggcggatggagtcggtgtggggcgacgacgcgcgggaataccggccggagcggtggctgaaccccagagacggaacgttccggccggacagcccctttcggttcgtggcatttcacgcggggccgaggctttgtctgggcaaggaaatggcgtacatccagatgaagtccatcgtggcgtgcgtgctggaggagctcgacgtggcggttgacggcgcgtaccggccccggcaggttgcgtcgctaacgctgcggatggcggacgggctacctgtgaccgtgaagcagagacgggactgacgagctgctgtcacaaacctgcaactccatcagccacccatgaagcctctgcagcagcacaaggcaggcaaagctgttgttcaccgacgagcctgaacaaaactgtggtttgctcaatgcgcttgtctctgaaccaatgttttcaaatcgtctcattaatcgtggatagtcgcgattaatcgtccaagtcagt

SEQ ID NO: 92008 - DNA, 1514 bp, Zea Mays
accatccattgcgatacttgagacgcttcgctctctctctctctctctctctctcgtgttcttctcgtcttctgcccgagtgatggccagcctcaccgacctcgtcaacctcgacctgagtgactgcaccgacaggatcatcgccgagtacatctggattggaggaaccggcatagacctcaggagcaaagcgaggacggtgaaaggccccatcaccgacccgagccagctgccgaaatggaactacgacggctccagcaccgggcaagctcccggagaggacagcgaagtcatcctctaccctcaagccattttcaaggacccgttcaggaagggtaaccacatccttgtgatgtgtgactgctacacgccacaaggcgagccaatccccaccaacaagaggtacagcgccgccaaggttttcagccaccccgacgtcgcagctgaggtgccgtggtacggtattgagcaggagtacaccctccttcagaaggacgtgagctggcccctcggctggcctgttggtggataccctggtccccagggaccatactactgcgccgccggtgccgacaaggcctttgggcgcgacgtggttgacgcccactacaaggcctgcctctacgccggcatcaacatcagcggcatcaacggcgaagtcatgcctggacagtgggagttccaagtggggccgtccgttgggatctctgccggcgacgagatatgggtcgcccgctacattctcgagaggatcaccgagatggccggaatcgtcctctccctcgacccgaagccgatcaagggcgactggaacggcgccggcgcccacaccaactacagcaccaagtcgatgagggaggccgggggatacgaggtgatcaaggcggcgatcgacaagctggggaagaggcacaaggagcacatcgccgcgtacggcgagggcaacgagcgccgcctcacgggccgccacgagaccgccgacatcaacaccttcaaatggggcgtggcgaaccgcggcgcatccatccgcgtcggccgcgacaccgagagggagggcaagggctacttcgaggaccgcaggccggcgtccaacatggacccctacgtcgtcaccggcatgatcgccgagaccaccatcctgtggaatggaaactgatcaagcatgtgcattctcgagggagcccactgtttttcttctgcacaacgcatccgccgtggtgtcgctttggttttgaaatttagattccgttgtcctaaaatttatcactacggtctccggtgtattgctcgggaacaatgaataacgactgcgatgtttttttgtttttgcttgcgtcatagatgtacgtttggctgtgcttccagtttattgggtaaatgaaaaaaatgtaatggtctatcggtctcaaaatagtgctccctccgtttctttttagttatcgctagataattcaattttgcactatccagcgataactaaaacgaaatggaggaagcagtcattttagctctaa

SEQ ID NO: 92009 - DNA, 1403 bp, Zea Mays
tgcgatacttgagacgcttcgctctctctctctctctctctctctcgtgttcttctcgtcttctgcccgagtgatggccagcctcaccgacctcgtcaacctcgacctgagtgactgcaccgacaggatcatcgccgagtacatctggattggaggaaccggcatagacctcaggagcaaagcgaggacggtgaaaggccccatcaccgacccgagccagctgccgaaatggaactacgacggctccagcaccgggcaagctcccggagaggacagcgaagtcatcctctaccctcaagccattttcaaggacccgttcaggaagggtaaccacatccttgtaagcctctgcgtcgtgatgtgtgactgctacacgccacaaggcgagccaatccccaccaacaagaggtacagcgccgccaaggttttcagccaccccgacgtcgcagctgaggtgccgtggtacggtattgagcaggagtacaccctccttcagaaggacgtgagctggcccctcggctggcctgttggtggataccctggtccccagggaccatactactgcgccgccggtgccgacaaggcctttgggcgcgacgtggttgacgcccactacaaggcctgcctctacgccggcatcaacatcagcggcatcaacggcgaagtcatgcctggacagtgggagttccaagtggggccgtccgttgggatctctgccggcgacgagatatgggtcgcccgctacattctcgagaggatcaccgagatggccggaatcgtcctctccctcgacccgaagccgatcaagggcgactggaacggcgccggcgcccacaccaactacagcaccaagtcgatgagggaggccgggggatacgaggtgatcaaggcggcgatcgacaagctggggaagaggcacaaggagcacatcgccgcgtacggcgagggcaacgagcgccgcctcacgggccgccacgagaccgccgacatcaacaccttcaaatggggcgtggcgaaccgcggcgcatccatccgcgtcggccgcgacaccgagagggagggcaagggctacttcgaggaccgcaggccggcgtccaacatggacccctacgtcgtcaccggcatgatcgccgagaccaccatcctgtggaatggaaactgatcaagcatgtgcattctcgagggagcccactgtttttcttctgcacaacgcatccgccgtggtgtcgctttggttttgaaatttagattccgttgtcctaaaatttatcactacggtctccggtgtattgctcgggaacaatgaataacgactgcgatgtttttttgtttttgcttgcgtcatagatgtacgtttggctgtgcttccagtttattgggtaaatgaaaaaaatgtaatggtc

SEQ ID NO: 92010 - DNA, 122 bp, Zea Mays
gttgttttcgaaacgcgttctcaattgctagctaggtcaaggaaaatcttttgggttctcgcggaactagcagtaaaagcacggttccttttccgggtgcgcttttcgtttgagtggtttat

SEQ ID NO: 92011 - DNA, 2760 bp, Zea Mays
ggagaagaaaaaaatagcggtagcgctcggatcccttcttcctccagatcacaccaccgtcgcctccgcctgcaaatccattcctagactcgagctgttgctgcgagcgagctcgggttggggctcaggtctctagggtttcgcctccctgctcctggtgctcatcgccttggaccttggtctgtcgggttagggttgtcgcggctgcgggagccgtgggtcggcgggtgcggccgatgcggcgatcgccggagatagggaggctgtagcggcggcggggcaggggatctcctgggtggattctccggcgatggccgcagacgcactatccatcatcccgggcgccgtgcttcggaacctttctgacaagctctacgagaagaggaaaaacgccgcgctcgagattgaggggattgtgaagcagcttgcaatggctggggagcatgagaggatatcagcagttatctcgctgctcaccaacgatttcacatactcgccacaaacgaaccatcggaagggtgggttgattggtcttgcagcagttactgttggactcaccagtgaggcagctcagcatcttgagcaaatcgtgcctcctgtgcttaattctttcctggaccaagatagcagagtgcgttactatgcttgtgaagcgctatacaacatagcaaaggttgtaagaggggatttcatcatctacttcaacaaaatttttgatgctttatgcaagctttctgcagattccgatgctaatgttcaaagtgcagctcaccttcttgacaggcttgtcaaggatatcgtaaccgagagtgaccagttcagcatagaagaattcataccgcttttgagagagcgcatgaatgtgctgaatccttatgtaagacaatttttggtggggtggataacagtgttagacagtgttcctgatattgacatgcttggtttccttcctgattttctcgatggtttattcaatatgctgagtgattccagccatgagataaggcagcaagctgatgcagcactttctgagtttctgcaggagataaagaactcaccaatcaacgagtttgtgaagcttggtggggaacaacttgttccttactatgcagatatactgggtgctatcttaccatgcatatctgacgaggaggagaaaatccgagtggttgcacgtgaaacaaatgaggaactacgtgctataaaagctgatccaactgagggatttgatattggagcaatcctttcaatcgcaaaaagagaattaaacagtgagcatgaggccacacgaactgaagcattgcattggttcttcactttgctggatcaatatcgtgctgagttcttggcgtacctgaacgatatttttgatccactccttaatgcactttctgatccttcagacgtggttgtcctattagtattggaagttcatgcacgtatagctgaagagtctcaccacttccatcatcttgtatcctacctaatctgcaccttccacaacaaccattttctactggagaagcgtggtgctttgatagtccgtcgcctctgcgttcttctgggtgctgaaaaagtatatcgtgagttctccactattcttgagagtgaagttgaccttgattttgcatccgtcatggttcaggctttgaatttgattttgctcacatcaactgaacttggtgagctccgctctcttcttaagaagtcgttagtggattcctgtggcaaggacttgtttcagtcattatatgcttcgtggcgccactctccgatggctacaataagtttgtgtttacttgctcaggcatacagtcatgcgagctgtgttattcagtcgctgggagaagaagacataaatgtgaaatttttggttcagttagataaattgatccgtctcttagagactccagtatttgcttacttgcgtttgcagcttcttgagcctggaaagcacacctggcttctgaaaactctttatggtctcctgatgctgttgcctcagcaaagtgcggccttcaagatcttgaggactcgactgaaaactgtgccattcagtgaaaatattaagcgcacatcttcagcaaatccatactcccagattctgcaagtgacagaagatggcaatagaaaccaagatacacagaactatagtgcaatcaatttcccgtcccttctccagcaatttgagcacatgcagctgcagcaccgtaaccatttgaaggatcaactgcaatcccgcaaatctgcttcagctctaacgttatctcaggagatacaaagatacgaagcagcacattcctcttcgctatcagagattaacaggcccccttcaagaacatccaaaggcattttatgatgcatttgattattgcgatgtatgatatgtttcccagaagcatcatcacaaatatgttggggctttggttagtctccttgatttttccaaaggaggttgcatagggtacatagagtgtaatattttttgtttcgttcctagattttgtcaagagatggcaattatttattggagaaagctcgtttctgccctctagtcattcttttcttagccgtttcactgctcatctggtttctgtaatttttcaattgaaggccaaatgagcaaagtagtaattggagatatgttactactgttctgcttatccatctctaataaattagcgttgcaatgtaaattcctgttgttggctcttattatatatttattatattctatatatgccttacctttaccccatt

SEQ ID NO: 92012 - DNA, 2794 bp, Zea Mays
agagaaacctgaaaggccgaaaccagcctcggtgcgtgcccattgcccactctccagtcgactccgcaaccgaaacttcttgccgccactacgccccaaggcccccatcaagctcgccaccgggcaccagccattcccatgtctataggccgcctcggccgcgcgcccgcgtcgctattcctgctccagtcctttgccacgaccaccgcctcatcttcccctgccgcgaccaccacctcatccccgggcttcctcgcgcaccacctgctcgacgaattctcccgcccgcgcgccacccgtgacgcggcccgcctccgccgcctcgcggcgtatctcacgccgcccgccgcggagtccgtcatcctccgcctgccgtcctggcgccacgcgctcgacttcttccgctgggccgcggagcagccgggcttccgccactcctgctattccctcaacgccatggcatcactcctgccaccgcaccagcgcgcgcacctcgaccgcctcgccaccgatgcactcgtctcccgctgctccatgacgcctggcgcgctggggttccttctccgccgcctcggcgcggctggcctcccggacaccgctgcccgcgtctttgatgcagcgaagacgacgctcagctgcgccccaaactcgtacacgtacaactgcctccttgacgcgctcgcgaaggccggccgcgcggaagacgccgaggcgcggttgcaggagatggtggtgacgtgcggtgacgagagcgtcgacaggtacacgctcacctcgctcctacaatgctattgcaacgcgggccgtcctgaagacgcgagcgctgtgttacagagaatgagcaagagggcctgggtggatgagcacgtgttgacgatgcttattgtggcgtacagcaagtggggaaaggtggaggatgcagttgagctgcttgggaggatggaggcacttgacatgcgaccaaacgagaagacattgagcgttctggtacatgggcttgccaggcaggggagggttgatgtggccatgaatatgtttggtaagatggccagttatggattcagtgtggatttggcgatgtacagtgtgttaattgaggggctgtgtcatggaaacgagatggggaaagctgtgaaattgttcgaggatatgaagcgggacaggattacacctgatgtccgcttgctcaagaagataatcgaagcattctgtaggcaaggagatttctctactgttggtccattcattaatgaaaatgcagtgcatctgaaacccggcagtgctgttctattatataatgtgattcttgacggtcttattaaccatggagaggtagaagcagcatatcagttgctcagctccatggtgcgtggtgatcagagggttagtgacgatgatactgttggtgtgcatatttttgttatcactgaagatgttaaaccaaactctgattcgtttaacattgttgtgtgcggcctttgtaaggttaagaagctggatctggctttggctctcacaaaggacatggttggccttggttgcaagggaaagcttttgatgtttaatgatttgatacttgaattgtgcaattcgggtaaactagatgaagcatatgagatattcaaccaaatgaaggatcttggtttgaaaccctccgagttcacatacaattcattgctttatggtatttgtagaagaaaagatactagtgctgccgctgatctgctgagggagatgcgcgcaaatgcgcacaaaccatggattaagaactgcacagacatggtgcaacagctttgtttgagtggcaggataacagaagccttgcaatttcttgatggaatgctagaattaggttttcttcctgatattgtcacgtactctgctgccatgaatgggatgtgtaaagttggagacatagaaaatgcattggggcttttccttgacatttcttccaaatgttatcttccagatgtggtggcacataatatcttgataaatggattccggaaagcaggtaagttcgacgaggcacaggaaatcatggaagaaatgttgagtaagggtatgcttccttctgtagttacctacaatcttatgattgatatttggtgcaagtctggcagtattgacaaagcaatcacttgcgtatacaaaatgattgatgaagagaagccaccaacagttgttacatatacaagcttgttagatggactctgtaatgctggaaggcccgatgaagccattgttttgtggtgcaaaatgagggaaaaaggttgttcgccaaatgggatagcatatactgctttggttaatggactgtgcaagtgtggtcgaatggagactgcagtgaactactatgaagagatgaagacgaaaggttttgacttggatatcttttccctattaaatttaacaaatctgttgatagcacagggacaggccagtaaaggatgtgagcttttgaaagttgttctccaaaaagatgtggtgcacaataaccatttgaaaatggtagacttagtaaataaagcagctaaggagctgtctaaagatggaagtatctcttcagatatcatgataattatagatgcatggttagtttcaaggggtcaaggtatgcacaatgaagatggaaacaaatcagatttctcttagatgtgttctcaagtctgacagtgaccaaagacagcttgttcgctgcggcttgctgcggctgcaatccggctgcggctgcggcttctacagtatttttctctctatggattgcagctgcagcagtccaaacagctgcaac

SEQ ID NO: 92013 - DNA, 1483 bp, Zea Mays
ggaggaaatggggagcagcgcggtgcaggtgcagcggcgtaggcggcagttgacgctggttctggtgaccacggcggcgctgctggagcgcgcggacgaggcgctgctgcccgcggtgtacaaggaggtaggcgagtcgctgggcgtgtcgcccaccgcgctgggctccctcacgctgtgccgcgcgctggtgcagaccctgtgctacccgctcgcgacgtgcgccgcggcgcgctacgatcgcgcgcgcgtcgtcgctgtcggggcattcctctgggccgtggccacgctgctcgtcggcgcctcgggcacatatctccagatggcgttggcaaggggcttcaacggcgtcgggctggcggtcgttgtgcctgcggtctactccctggtggccgactacagcgacgacggcacgcgtggcgcggcgttcgggtgggtgacgatggcgcaaagcatgggccacgtcgcggggaactccctcggcgtgctgctagcggctacaagcttcctcggcgtcccaggctggcggctggcattctacgccctcgcgctcgtcagcgcctcgatcgccgccctaacgtggctcctcggcgccgacccgcgccccgtcagcgtgaaggccacggctgcggccacgctggcccaactcgtccgagaggccaaggacgtggtgaaggtgccgacgttccagatcatagtggcgcagggcgtggctgggtcggtgccgtggtcggcgctcagcttcgccgccatgtggctggaactcgtcgggttcacgcactggcagaccaccgtcatcactagcctgaacagtctcgctaacgcgcttggctcgctgttcgcggggttcgtcggggacccagtggcgctgcggttccccaacacgggcaggatcgcgcttgcgcaggtgtgcaccgcgtcgagcatcccgctcgccgccgtcatgctgctggcgctccccgacaacccctctgcgggggccgcgtacgccgccatgttcttcgtcttcggcttcgtctcgccctggtgccccgcctccacaaacaacccaatttttgcggagatcgtgccggagaaggcgaggacgacggtgtacgctatggacaggtgcttcgagtcagtgtttgcctctttcgcgccgccgctcgtgggcatcctggcggagcgcgtcttcgggtaccaaccggcctcgtccggcacgagcgtggaggctgacagggagaacgccgctgctctcggcaaggcggtattcgcagagatcgccgtgccagttgccgtctgttgcctcacctacaccgcgctgtactggacttaccccgcggacagacggcacgcgcagatggccgctctgcaggcggcggcgggcgatcaggactgcgactgtgaagcaacttcagttgcccatgctgcaggagccgagggcttgaaccaggcgctacttgccgggacaagaacggagtagcaaattctcaagaatgcatac

SEQ ID NO: 92014 - DNA, 3895 bp, Zea Mays
cgcacacacgccggtaaatttcctccccagttgattccagcggcactgcacttgtgctgcctgcgttcttctcccctgagagctgcggaaagatccaagcgcaaggccacctaaccagaaccaaacaaggccgcctccggatcgccgagcaaattccatattattttcctcccgtttcttgtttttctcctctcgcttatccgtctcccagaaggagagggagagggagagccgaaccggggtgatcgttgccgtccctgtcacccccacaccccgctgtcgtggtgtcctatgcgactcgtttgttgccgtcggtcgcctggttgattaatccaaggccaaggatctcccctccacgaggacctccggagaggccagggtgagctgctataaagctatttctcctgtccacccccacttcttcctcatgctgtcatgcaacatgagcagctcttaagagcataggaggaggggttgattgcggctcggagattcttctcgcgtttctcctgcactttccgtctgatatttatcagcttcttacttcagtccagcagagttcctttgcttcattgctcgctttgaaggggatttttactgctagtctctgagccgtcaaatttttcaccactcagctgtactcccccacgtccaccaggcaagaacagcaacgtcagtttgcagcagaagaaaaggctctccctccctttgtattgaaagcacaaaaaatcctctttatctctctgactccttcccctcactcacaggtggctgcttgttgagtccagtgtgtcagtgtgtgccacttctctcacaaacactgcgagcttgtccctatcctgcaagaaacagcggaccaaagcatccgctccatttctccgctagttcgtgcgtcgatccaaacgccaatcttggatttctgccgcaaggactgtgcttcttgtagcaaaagcccccaaagatttgatccaagccagctcggaatcggatccctgcgaggaccaggcggcctgccatggcgtcccgctcctactccaacctcctcgacctggcaaccggagcagcggaccaggcgccggcggtcgcggcgcttggcgcgctccggcggcggctgccgcgcgtggtcaccacccccgggctcatcgacgactcgccggcgtcgccgtccacgccgccgcggccgcgcaccatcatcgtggccaaccagctcccgatccggtcccaccgcccggagtcgccggaggagccctggaccttcgagtgggacgaggactccctcctccgccacctccaccactcgtcgtcccccctgatggagttcatctacatcggctgcctgcgcgacgacatcccgcaggccgagcaggacgccgtcgcgcaggcgctcctcgagacccacaactgcgtgccggccttcctgcccacggacatcgccgagcgctactaccacggcttctgcaagcagcacctgtggcccctcttccactacatgctgccgctgtcccccgacctcggcggccgcttcgaccgcgcgctgtggcaggcctacgtctcggccaacaagatcttcgcggacaaggtgctggaggtgatcaacccggacgacgacttcgtgtgggtgcacgactaccacctcatggtgctcccaaccttcctgcgcaagcgcttcaaccgcatcaagctcggcttcttcctgcactcgccgttcccctcgtccgagatctacaagacgctccccgtgcgcgaggagcttctgcgcgccctgctcaactccgacctcatcggcttccacaccttcgactacgcgcgccacttcctctcctgctgcggccggatgctcgggctctcgtacgagtccaagcgggggcacatttgcctcgagtactacggccgtacggtgagcatcaagatcctgcctgtgggggtgcacatggagcagctcaagacggtgctcgggttgccggagaccgaggccaaggtgtccgagctgatggagatgtactctggaaaggggagagtggtcatgctaggcgtcgacgacatggacatcttcaaggggatcagcctcaagctccttgccatggaggagcttctgcggcagcaccccgagtggcgggggaagctggtgctggtgcaggtggccaacccggcgcgagggagggggaaggacgtcgccgaggtgcagaccgagacgtacgccatggtgcggcgcatcaacgaggtgtacggtgagccggggtacgagccggtggtcctgatcgatgagcctctgcagttctacgagcgcgtggcctactacgtcatagccgaggtgtgcctggtgaccgcggtcagggacggcatgaacctgattccctatgagtacatcgtctcccggcaggggaacgagaagctggacaggatgctgcggcaggggaagccagaggagaagaagagcatgctggtggtgtccgagttcatcgggtgctcgccgtctctgagcggcgccatcagggtgaacccgtggaacatcgaggccgtggctgacgccatggagaccgcccttgtgctgcctgagaacgagaagaggctgcgccacgataagcacttccgctacgtgagcacccacgacgtcgggtactgggctaacagcttcctcctggaccttgagaggacctgcaagtatcattctcagaagaggtgctggggcattggcttcggcctgcggttcagagtggtctcgctcgacctgaccttcaggaagctttccttggagaacatccttatggcataccggagagccaagacacgggcaattctgctggactacgatggcacgctgatgccacaggcgattaacaagagcccgtcaactgaatctgtgcggatcctcaacagcctgtgccgagacaaggacaatgtggtgtacctatgcagcgggtatgaccggcgcacccttcatgagtggttcccttgtgagaaccttggcatagccgcggagcatggctacttcctgaggtgtaagagggacgcggaatggaagacctgtgtcgctgccacagactgcagctggaagcagatcgcggagccggtgatgtgcctgtacagggagacgacggacggctcaaccatcgaggacagggagacggtgctcgtgtggaactacgaggacgcggaccccgacttcgggtcgtgccaggccaaggagctcgtcgaccaccttgagagcgtgctcgcgaacgagcctgtgtcggtgaagaccacgcctcactcagttgaagtgaaaccgcaggtgaagcatcgatcctcgatctccgcatcttctttgcattgggcaaatagaccaggcgcatgaactcactgcctggcgacgagattgttcgcttttgcagggcgtgagcaagggcttggtggcccggcgcatgcttgtgtcgatgaaggagcggggccagtgcccggacttcgtcctgtgcatcggcgacgacaagtccgacgaggacatgttccagctgatcgccaccgctgcctgcggggactcgctggcgtccaaggcggaggtgttcgcgtgcaccgtcggccgcaagcccagcaaggccaagtactacctcgacgacgcggcggaggtggtgaggctgatgcaggggctctcctacgtctccgaggagctggcgctggcgaaccagcgggatgaagacgaggactcctctctggacgacgtgtgggagtaggaaggagcgttcccttcccgtgctgctcctgcggtaatgtctgtttgtgttggctcggctggagctttcgccgagtagtttaggtgtgtaaatgaggtatgctttccagcgtaatgtattgccagtggtctagtctcgagagctggcttgaatctagtgatgctctagtactttggtttgtggtgcta

SEQ ID NO: 92015 - DNA, 1084 bp, Zea Mays
agtaaagtgaaaagaccacctaggtatatgaactttgcagctaagcttttcaaccatgtgtgagaggatttccatctgtttggtctttaggactatcagcagatgcagtttgcataaatatgataaaaagtcacacaacctgacccagatacatgcactcactgtgcaccatgtacgaccacaatcattggattacacattgctagaaccatgaaataagaaagggcctgttcaagtgcattgtgcattgctataacaatcagaatgtagaaatgtattctgtggatgatttcctcaagataagatgcaaaccatgcaatcgagtgttacataggaaaaatgatagtaggatataggatcgacttgcattgttctgaatggaaataagaaccggacagagagtagcagaaatggtaagaatattgtaagataaattttaaatgctagaatgatcactcagagttttggagtctcacctttaatgttgtaaagaaaaattccccaggcgagagctgcaaaaaccgaacaccctgagcagtcactggtgcctcaagaaaaataaccaaatcttttgaaaaagcaaaacagcctaatatcgcagccccaacagccaaaactgagatgaaaatcctgtcacgaagctcctctagatgatcaaatatactcatctccttatcatctggaagtaagtctttgcttggataaagaaaagtatatagagcactctgttcttcctgtgaggggcctccaaaggaaccattctccactgcaaaaggtaaatttgagaggtcctggaggcgggtcctcgagtgcggcaccgatgccgctggacggagactccttctgtggcagtggcccagactcccggagggcgccgtccccgtcgacggcagcgcagcggaggcactgccggcggcggcgctcgggctcgagcgccggggcagctagcgatattagaggcaggttgcgctggcgcaggagaggccggctctggcggaagaggatgccacggccgtgcagctgctgcggcgtgtgccagagcagcgccccagcgcttcccatccccgttcccgtctgctcctcg

SEQ ID NO: 92016 - DNA, 1435 bp, Zea Mays
atgcccgatgagaagccacggccacgggcaggcgagtgtggatatgcaaccgactcaccctccggtgccgccaccgaactccacactcacccgccgctcggtcacgggtcaccccgtccctatatagaagctccttcccgtgtcattgcttgcctccctcccttcttctcccggcaactcctcaccccagaggccacaactgccaacaagccaatggctctcgtccgccagcgccgccagctgccgcaccttaccctcccgctggaccacttcgccctgcgcgtgccaccgcagcctcagcccaccgccgcgccgtccacctccacgtccgacgcccgcctctccgactacgagaggctctccgttctcggccacggcaacggcggcaccgtgtacaaggcgcggcaccgccggtccgcgcagccggtcgcactcaagctattcgcggacggggacacctcggcggcgcgcgaggccgagatactgatgctcgccgcggacgcgccccacgtcgtgcgcctacacgcggtgatcccgtcggccgccggggaggctcccgcggcgctggcgctggagctcatgcccgggggctccctgtcgggcctgctgcgccggctggaccggccgatgggggagcgccccatcgccgccgtggcgcggcaggcgctcctcgggctcgccgcggtccacgcgctccgcgtcgtgcaccgcgacctgaagccgtcgaacctgctcgtcggcgccgacggcgaggtgaagatcgccgacttcggcgcgggcaaggtgctgcgccggcggctggatccctgcgcgtcctacgtcggcacggcggcgtacatgtcccccgagcggttcgacccggaggcgtactcgggagactacgacccctacgccgccgacgtgtggagcctcggggtggccatcctggagctgtaccggggccacttccctctcctgcccgcgggccagcgcccggactgggccgcgctgatgtgcgccatatgcttcggcgaggcgccggagccgccggccgcggcgtcggaagagttccgggatttcgtggcgcggtgcttagagaagaaggccgggcggcgcgcgtcggtggccgagctgctggagcacccgttcgtcgccgagcgggaagcggccggcgcacaggaggcgctcgccgcgctcgtgaaagaggcggagcagctggacctatagacagacttacagtaattcacgtttaggacaagctgagatgtaaattacgccatattttttgtttatccgtttattgagtttaataatcaaatctcagaagtcaacaaaattagtgaaattcaagattccctcgaccacgctgctcgctgcctagattgctgttaaagtagttcatttgaagtgatgcttctacactatacagacatgaacaaacctaaactgcttcagc

SEQ ID NO: 92017 - DNA, 100 bp, Zea Mays
gctgtgtctgtcagttcaacatcttagatctgtttcatgtacttgtaatactaggcagctctgtatactgtaccctcaggttttgctgttccctgttcgg

SEQ ID NO: 92018 - DNA, 1510 bp, Zea Mays
ccaaatcgcgatcaaatgccaccgcgcgcatcgctcctcctccgccgccgcctctccgcccgcccgcctcaccgcgatcaccccgaagtcgccgcgctgctaggggtcctcaactcggcgccgccgtcctccacgtcgctctcacacgcgctctcccgcgccttcccgtcaccctccgacgccttccctctctgcaggctgcctcacctcctcccgctgctcccctcccctcttctctccctccgctttctactatggcgcctgaccccatcctccccgctaccctcccagcacgctctctcctcactcgccacctcgctccccgacctctcatactccgtgccgctcctcctctcgtcctccccacggccgctccagctcccgcactatgccctcctcctcaacatatccgctcacgccagtctcttccctgcctccctcgccgtcctgcgccacatgcggtccttcgacctcgtgcccagcgccgcctgcttccaccacgccctccgcgcggcgggctccgccagcgatgtctcggcagtgcttgagataatgtctgcgtccggcgcttgtccaaccgtgcccgtgatcgtggccgctgtgcataaattggcgtcggcgggggaattcgaagtcgcctaccggctgatcgataaaatgccggagttcgggtgtgtgcccaatgctgtggtttacacggcagtgctcgatgggatgtgcagtttcgggaacgtggatgcggcgttgaggctgatgaaggcgatggagggtagtgagtttggtgcaaactgtgcacccaccgtggtgacctatacgtgtttggtgaaatgcctctgcgggaaggggagggcggtcgaggctctcgctgtgctggataggatgacagagagacgggtgatgccaaaccgtgtttttatgcggacgctggttgaagggttttgcactgagcagagggttgtcgacgcgtatgatgtggtggagcgtgtaattggtgatgggagtgtttcgagtacacagtgctacaatgttctactcgtttccttgtggaaggttggcatgggagaagaagctgaaggactggcacggatgatgatgacgaaaggggtgcagctgaccccactcgctggcagttgtatggtgagggaactgtgcataaggaagagatcgttggatgcttgctactggctgggagtgatagaggagaacggggtgctgtgtgactctgatgtgtatggtaccttgttgcttgggctgtgtgaggaaggccacattcatgaggcatcaacattgggaaggaaggttgtcgacagggggatcctcatagaattatcttgtgctgaccgtttagtggagttgctgaagcaatatggtgatgaggagcttgcgtcaaatatattgggattgagaaggcgccctgaagggttgtcgttttaaggattttgcgattctgttccatccttgtgaatgaagaatatcttgattagtcatgggatgcgccaagaataatgtt

SEQ ID NO: 92019 - DNA, 486 bp, Zea Mays
aaagggacgaaactaagaaatgggaccctccaatgacgacacgccgggtggttcactcgctgcccggaccggaggtagctttggtgacgctggtgaagacgacactgctgccgagcaggtccttgccgatgtcggcggtgaaggtgtcgtaacggaggaagagctcgacgaggaagagcctgccaacgagcaccacaaagttcttgccggggcactgcttgttgtcgacggtggggttctcggtctcgcggccgttggaccagtagacgtactgcagcagcttgctgccctcctcgccgaggaaccggccgggcacgaactccttggccgtggcgccgaacacgcgggggtccttggtggcgcacggctggtagccgaacagcatctcgcccttcttcacctggaacacggcgtcgtggctctggacctgcaggtctttcttggcgtggccgtactggaacttgacgggcgggtccaggcgcagcg

SEQ ID NO: 92020 - DNA, 552 bp, Zea Mays
ttttttctatagctgttagaaatttactttgctcatagttcatactataattaatatgagactcttgttttgtggtccaagtgttcagggctcagggtgccttggaagtacgctagcttgttgtcatgaagaagtcattcaagttccttccagggagctattagttcatatgtatatttctgtttatatcttatcttgtttatgtttagatttatatgagccagtaacttaatgattgcaccagctgaagttggtgcataaggctgcaacaccatctagtggagggtgttctggacaaagaaagcttgtaccttaaaacaggaggatacaagaagctggagtggttgtctgaaggcttttgaactgcttgaagcattagtgtagctttggtgcttttgtgactgatcagctctggagcagctagagtgatatagttgtgggcttttgaacaatagttggagtgatatgaaacattagtgatctagttgtgaatgatattataattgtgatgcttttgtgaatatataattgtggtgcttttgtgtttatgtg

SEQ ID NO: 92021 - DNA, 2163 bp, Zea Mays
atgttccagtcctcggtactccagtccagacatgaggatctgtatggtgcagcaccatcaggattcaggacagtagtgcggctagtgcctgtggcgaccttgcatttgccactgcgagtaccggtccaagttcttgaaaagcgattgaatgatcaattcgtcatgcgccgtgctcttgagaaagctctaggttacaagccttgtgctatccatgcatcaagtgagaactgcattccaaagccgactgaggagctaataaaggagattgcagttctcgagctagaggtcatatgcttggagcaacatctcctaacactatacagaaaggcatttgagcaacaattttcccctgcaagttctgcttgtgacatggagagcaacaagcagccagcaaggtccttttcaggcatactctctgaagctccagagctgagcttctcgaccccaaggaagcatcatcagctaaaccagtccagtcgaatggtcctggcacgcaagtccacgcctacagcttctacaagcgagactagcaatgagaagatcaatatcggacgcagccattcctcgctcctgcaccgctccgttagggtatctccgtcggcaaacaatctcgctagagctctgaaaccatgccatacttcgcctctatcttttgttgaggaagggaaatgcatggatcctggcgtggtgagtttggcagacatcttggggaccagggtcgcggaccatgttccccaaacgccgaacaagatatccgaggacatgatcaaatgcattacggccgtatacatgaggctgagagacgtccccgccgtgcagcacgccttcttcccctcaccgtgctcatccttttcttcggcgagcgggctgtcttccaaatacaccgcggacatatggagccccaggtgcaggaaagagagcttcgttgaggagtggcaggacaacgggttaggcaacggtgaatctagggagctggccctgccatatgattctgtggtagaggtgtctgctctttgcaaaggtgatcagaggtccgctgacgtgaaggatatgctgcgcaaatacatgtcacttgtgcagcttctcgaaagcgttgatctcagcgggatgaaacatgaagagaagctcgctttctggatcaacgtgcataatgcgatgatgatgcatgcccatatagagtacgggatcccacagagtaacagcaaaaggatactgcttaccaaggtgtcgtacatcattagtggccaaagagtgaacgcggagctgatagagtaccagatcctgtgctgccgagcgcactcttctggacagtggcttcggctgctgctatacccgaaatggaagtccagggacaaggacgagctgcaaggcttcgccgtggaccgccccgagccgctggtgcacttcgcactgtcctccggtagctactcggatccagtggtgcggctgtacagccccaagagcgtgttccagcagctggaggcggcgaaggaggagtacgtccgcgccaacgtgggcgtccgcgggcgggggcagcacaagatcatcctccccaaggccctggagctgtacgcgagggacgccgggctgggcgcgcaggaggtggtggccgcggtcgagtgccacctgcccgagggcctccgggacgccgtgcgccggagccagcagcaggccggccgggcgcgcgccgtggagtggaagccccacaacctggcgttccggtacctgctggccaaggagctggtcggcgggtcccccgcgtgcagccggccgctggagccggtcagtgcgccgctgcgggctggtccgtgatccgtcatcagatcgccgtgggcccgtggccgtgccgagccgagcacgagttgagatgtgcggcggcggcacactgcgttcgggccttgggggcgttgtatgtacagagagtcagagagatggacggcgaaacagacatctgattttactcgtaccagtatgcgccctgctgtcaaactgtgaatagtgaattccgcctagccgcccacgttattgactgacgctcgagcgctgcagctgcagctggcctgctgcgcttgccctgcgcctgcacaacccgccctcgttttttttttggataaaggggagtttatttcattaagctaatgaaaaacagtgctcggtctctac

SEQ ID NO: 92022 - DNA, 3189 bp, Zea Mays
aaaacctatcagttattcggtaccattgccatcactctctagtacgccgcaaaagacatcagccagacttcccaatttccggccacaaccatacctgctacgcttgcgccgccgcctccccccttgtcttcgcttcccgtgcaagcttcaccgccgccgtctccgactcccttcgcgatgcgaccgctttcgcgccacgattcctctatccccgccttccccgcccgcgccggttcttgcacttgaccgacccaatccgcctatctgttcccctcttccgtgcgagaggtactatcgccggccgtttcgtttcgaggctgatcggatcggcggcagatgggccgcgacgctgaggatacttcgtctccggtgtcctcgtcggaattggagcaggaagacgacgacgattgctacctgagcgatcagggggacgatgccctagaagagtctgttctccatgttctcgaggacgagcacctcgaggactgccattggtctgcctcatctgtgatcaccaaggaatcccttttggtggcgcagagagaggatcttaggaaggtgatggagctgctagggttgagggagcaccatgcccggacgctcctcatccactaccgctgggacgtggagaggattttcgagcttcttgatcagaaggacagggataggctcttctcggaggctggtattcctcttcagtacaccaggaatgccggcccaacctcctcggcggaggtgacctgcaatgtttgttatgatgatgtgccaccctcggctgcctccgagatggattgtggccatagctactgcaatgattgttggactgaatatttcattgtgaaaataaatgagggtcagagccggcgtgtcaggtgcatggctccaaagtgcaatgctgtttgtgatgaagcaataattcgaaaactagtcactgcaagacacctatatatcgcagaacgctttgaaagatttttactggaatcatatattgaagataatgatacagtcaagtggtgcccaagcacaccacattgtggaaatgctatacgcgtcaagggcgatatttattgtgaggtggagtgcacatgtggatgccagttttgttttaattgctctttacgagcacactcaccgtgttcctgcatgatgtgggagctctggatcaagaaatgccgtgatgaatcagaaacagtgaattggataacagtaaatactaagccctgtcccaagtgtcacaaacctgtggagaagaatggtggctgcaacctggttgcatgtatatgtggacaagcattctgctggttatgtgggggtgctacaggtagagatcacacatggtcaactattagtggccacagttgtggcaggttcactgatgatcagactaagaagacagaacaagcaaggcgagacctctatagatatatgcactaccacaatagatacaaggctcacaccgactctcttaagcaggaagcaaagctaaagaatgagatccaggggaagatatccatttcagaaaataaggaatcaaagataaaagattattcttgggtcataaatgggttaaacaggttgttcagatcaaggcgtgttctttcatattcgtatccgtttgcattctacatgtttggtgatgagattttcaaggatgagatgactcctgaggaaagagaactgaagcagaatttatttgaggaccagcaacaacagttagaatttaatgtcgaaagactgtctggtttccttgagaaagattttcaactttttaccgatgatgaggtcatggatacaatgaagcatgttataaatctttccaatgtggttgataggctctgcaaacaaatgtatcaatgcattgagaatgatttgttatatcctctacgcacacctcacaacattgctccatacaaatctaagggcattgacagggcctcggagctcaatattagttgggatcctggtgaacaaagttcacagtcaacaaaacatagccaggatgaacacaggaacaaacaagcatcaaatatttcgggtaaacgaactcatgaattgcatggttcgagttcttctaacaagcgagagagggtagatgttaacggtggtggtggtgcactttttgatctcaacgtgccagctgaagtggtggacaagatctgaaacttcattatctgatgggtgatggcacattcctttgaactgtacagctgacttaagcttcgtcaccaacataaaggaaaaaatactgttcttttttgctgccttaccaccatagagtacctgcatgtcaaatttttaccctggtgcttgtatcccaaggtatagagtagcttttaagttatatgttgtatttcatggcatgatctgaagccaatgttcatagttctgatgaagttgtacccctcaagcaagatgaggatattttggaatagaaccatgcctgtgttgcaaattccagatataatgtatgcagcatggtgaaaagggaattgtttgttgagaagaatgtgagtgattatttcctggcaaatgggtggttctattgacaatgaagacaatgactgattcgtcgtattaaatgtgcactttgttgcaactggcaaccatcttgtttctaggacagctttgtattcaacctgtgaaaatcccggttttctgggcacacattccagattattatggataactgcattctactgtagctgcgggaggagctgcaagatatcaatcaggtgcggtgcgtgttgacagtgtgttccttcgtttcttcacattcaagtgttatccgccctcctgtattttaccaagataacactttctcgagaaaagggtcttagagttgtgttttgatgtgggactgaagaagagttttttttttatttcaacctaaattttgttttcaaggaagtcagaatttaagatctgaggagtgttaactagactgcttaattgattaaactgaaggctcttttgccaaattggatcaaaattgaaagttctgtttttgtacatagaaaagaaagaactctgcttacgatttggaatggagtgggtacatatttgtcaggtcaatatatgtttgtcaagtcaagctttggaccgtgcgttgaaacgtagcatcaagctatgccgtagctttctagaacccatgtagagacacgcatatggtgatccatggaaattgggagc

SEQ ID NO: 92023 - DNA, 1165 bp, Zea Mays
cacttgtgtcatgtaacacgaaaccattcttctagatcaaactacaatagagcaatagagctcgtgtcagaggcaaacacaaatggcgttccacagaacaatggcacgctgtctatgggtaggcaagaacgcagccgctagaggcgccggcgcggccattcccaaacctccggctccccatcccccggcaccgcgatctctgccggccgtggacgactgcccgacgctcgcattcctgcggccgaagccgaccgcggtcgggtacggcaccgcgaccgtcccgctcccggcgcactgctttcccgccctccccgtcggcgaccacctcttccaccgcctccagctcgacgggcttatacctcccgtgagcacggcgacgcggccgccggagcttgtgggcgtgacggtggagcaggcgaggaaggtggcgagggcggccgagatggaggtggcgagggcgaggctgaggtccaacgcccagagcgtcgtgtccgggtcggaattcgccgcgctctgcgtcgacattgccggcggcgtcgagggaggccgccggctggcccgtgcgctcgacgagtccggcgtcgtcatcgtcctcggcgaggccgtcttcctccgccccgacatggtagcgaaggccatcgggagcatcctccccgtgaaaaagcagctgcaggcgccgcgagccggagacgggagcgaggcgcgcaagcgcgagctggaggctatggaagctcagaaggcggcgatcgacgcggacgcggccgcgcaggtgcggcgcgagctgtggtgcgggctgggcctgctggcgacgcagacgctggggttcatgcggctcaccttctgggagctgtcgtgggacgtgatggagccggtgtgcttctacgccacgtcgctctacttcatgtccggctacgccttcttcatgcgcacggccacggagccgtccttcgagggcttctaccggagccgcttcgcgtccaagcagcgccgcctcatgcgggcgcgcgggttcgacgtcgaccgctacaacgccctgcggaagggccaggggcaggggctcgttccctcgccgaccccgacgcgtgtaggcacgtcagccatgtacaatagcgcgtcgctccgcccggacgaggccgcttggcttgtgccaggggggcacacatga

SEQ ID NO: 92024 - DNA, 1474 bp, Zea Mays
ttcgccggataagatggtattctattagcaattataccacattaacacataacacatccaaggaccaaaacaatatctgagaaataaaacatataaggatgagcaaactaccacaaagcaacataagctagagaagttagaaaaaattagtgctatttagacaaccgaacacaaagcacaaccaatataacataggatctttccaagtgcataaccagagaaaacacagaagatagaacaatattatgcttcagttgcaaataaatttccgtcgttcagcacaacatagggttccccatgaggttgttcagcacaaccgacttgccagcttcgatgttaccgagcgcggcggcattgagaaagagaaaggtggaggggcggcgtgaggtgttttcgatggaggggtcatcgtccgcaaggagcgaggcggcctaccacatggactcggagagctggacgagctcgtcgattgcctccatggctgccgaagatgacatgtccgcagggatctcgaggctggtcggaagatctcggggtggcgctggagattggtgaggtgcgcggttcgagtgcggagcaccgagaaattggggacagactcatggaattcacggggacgccctgctgcacctcaactcgaacagcttcgcggggacgctcccggagtccctccccaagatgcggctcctccacaagctggacgtcagcaacaaccgcctctcgggtggcttcccgcagcacatcctgtgcctgcccagcgtcaggtatgtggacctgcggttcaacgacctgcgcgggccggtgccgccggcgctcttcgacaagccgttggatgccatcttcctcaacgacaaccgcttcgacttcgagctgccggacagcctgggcaactcaccggcgtccgtgctcgtgctggccaacctgcgcctgcgcggctgcatcccgtgcagcgtgggccgcatggcgggcacgctgggcgagctggtggcgctcaactcgggcctccgctcctgcctccggcaggagctgggctggctacgcgagctcacgctgctggacctcagctccaaccagctgcaggggatgctgccggagtccatggccggcttgcacaacctgcagcagctccacgtggcgcgcaacgagctgtggggccacgtccccgagggcgtctgcacgctgcccgcactccgcaacttcacctactcgtacaagtacttctgctccgagccaagccgctgcctcaacgtccgtgaggtcgacgaccgccagaactgcatcgccgctaggttcacgaggcgagtcggcggcgctctagcatcagcctcaacagtcgtgccgcctacaccaggtccatctcgccggaagcggagaatacggatctgtggcgccggcatgtggtctcagctcctccactgagccgggtggcgagactggggagggagagggggttgttgaagctactgatgtggac

SEQ ID NO: 92025 - DNA, 246 bp, Zea Mays
atgagggttcaggacggggacgtggacggcggcggcgaggtgaccgcgccgcagcagcacctggtgttcgcctactacttcaccggccacggcttcgggcacgccacccgcgccctcgaggtggtgaggcacctggtcaccgcggggcacgacgtgcacgtggtcaccgccgcgcccgagttcgtcttcaccacagagatctcggtaatgcactcgatcgatgctttctcccatggaagatgctga

SEQ ID NO: 92026 - DNA, 341 bp, Zea Mays
cggcgtgattaaaagaccccagccaaccgcctccggaacagagtagtatgccacggtgcgtaatcatggcctccagctaaaagggctatgaatagtatgggacataaaattaaaaaaaaatgggaatagattcagaaccaagacaaaaaatggtggcagaagttagcggtaatagacctaaacaatcaactcaatttgaatgcagtacgtggcgtttttttttgttgtttttgttgcataaaccagaactttacattgtaatgagaattccttccttcatctaaaactagccagttgtccgtcctttttactatgacttttagatatcatataaatagata

SEQ ID NO: 92027 - DNA, 441 bp, Zea Mays
atggaaatgctgccgggcggtgcagcgagcccagcgttcctgggacaggttttcggcatccacaacgcgcgtgcgtgcatgtgtctacgctacgactggagctactacacgtcagccgtcctaatccggatcggcgacaggaacggcggtggggggctcacgcgacgtcgcgatccagagccagaggggtactaccgtactgggagagaagagggcgcgcaccggcaccggacccggaccgcatccgcgtccgcatcgcatgcacgggggaaggcagcgtgctcgcccgcgtggcccgtggtgtctgaccggtcaatgtggtccagagggcgggtgtcccagcgccatgccaatgtccccgatgcgatgccaacgccatccatccacatccacggcgggaccaagccggaggcagtagggatcgaggagggcatttcttga

SEQ ID NO: 92028 - DNA, 132 bp, Zea Mays
atgggtggacacaccagaattcctctcaaataccaaaagttaactagctcatcccaagagaagtcgtgctaccactgcaacttgaaaaggcacctcagtagcaacccaacttgtcaagactttcagagttga

SEQ ID NO: 92029 - DNA, 318 bp, Zea Mays
atgtatgtcaccccagaccatataccacgaacaagaaggatgcttgcaaacaccatgcttccaaatgtgcagaccacctcgagaagacccttcaggatccataagaacgtcaggacaagcacgccattgaccgaaaacttcaccagctcggcggggacggaaggcggcagcacggacctggcagcgcggcgcgcgcggcgtgaggccttcctgaatacggagtgcaggaaccgggccagtaggtccaggctgcggtcctcgtcttcgtcctcatcttcatctgcgtcgtcttcgtcctcctcacttccgtcccggtag

SEQ ID NO: 92030 - DNA, 1504 bp, Zea Mays
cgttaacctctcgccgtgtggaagctggactgtgcggcccgcttttactcgtttccgtaaccgatcgtttcttcttaattcggccgtggccgccgccgcgtccaggacgatcgatgcctctccccgccgcgatgagatcatccatgctcagaggtcggtgtaacctcttcctccctttcgctgctcgctgttcgcaggccggaggaggaggcggcggcggatgctcccttctgctcccgcgccggtggcagtcgtcgctgccgcagctggaccacgtcgccgacaggtccaacgaggagagcggcggcgagatcgactgggacaacctcggcttcggcctcaccccgaccgactacatgtacgtcacgcggtgctcgccggaggaccgcggcgacttcccccgcggcgagctctgccgctacggcaacatcgagctcagcccctcctccggcgttctaaactacgcccagggcctgttcgagggaatgaaggcgtaccggcggccggaccgggccgggtacacgctgttccggccggaggagaacgcgcggcggatgcagcgcggcgccgagcgcatgtgcatgccggcgccgtcggtggagcagttcgtccacgccgtcaggcagacagtcctcgccaacaggcgctgggtgccgccgcaggggaagggagccctgtacctccggcctctgctcgtggggagcggcccgatccttgggctggctccggcccccgagtacaccttcctcatctacgccgcacccgttgggaactacttcaaggagggcctggcgcccatcaacctggtggtgcatgacgagttccaccgcgcgatgcccggcggcaccggcggggtcaagaccatcgccaactacgcgccggtgctgagggcgcagatggacgccaagagcaaggggttcacggacgtgctgtacctggactcggtccacaagcggtacctggaggaggtgtcgtcgtgcaacgtgttcgtcgtcaagggcggcgtggtcgccacgccggacacccggggcaccatcctgccgggcatcacgcgcaagagcgtcatcgagctcgccagggaccgcggatacaaggttgaggaacgcctggtttccatcgacgatctggtggccgcagacgaggtgttctgcaccgggaccgcggtggtggttgctcccgtgtcgacagtcacgtaccagggcgagaggtatgagttcagaacggggccggacacggtgtcgcaggagctgtacacgacgctgacatccattcagatgggcatggccgccgaggacagcaagggatggacagtagcagtagagtagattaataaggttggggaatgccatcgccacgacattggatcctacatcagtattgtcatccggtagaatgcatactcggttgatcagcatatgtagtgttgcagcaaattgaagaataaaccgtgtgtgttcgatggcgatcagtgacgaggccattgagcagccattgatttgatctc

SEQ ID NO: 92031 - DNA, 1703 bp, Zea Mays
gacacatgggcgggtgcgtggtgcactggtgcttccatcgaactgtgctcgtttgattaatttgccctcctcttccttccctccagctaacccatcagccattggtaggtagcccgtgaacgaaggttgcaaccataactcttctcttcccacgagagagagagagagagagagagagagagagagagagagagagagagcttgaccgaaatccacataccgtgtatagctagtggtagcagtgcagccggccggggtctaaagaagggggaccgtacgtactgcatggccgcgttgacatctgcgaagggcgctctccttccgtcgtgggctcgcagcagcagcagcggccatggcggcgacttgtggagggtcctggggaaggcgttggctacggccggaggaggaggcggcggcggatgctcccttctgctcccgcgccggtggcagtcgtcgctgccgcagctggaccacgtcgccgacaggtccaacgaggagagcggcggcgagatcgactgggacaacctcggcttcggcctcaccccgaccgactacatgtacgtcacgcggtgctcgccggaggaccgcggcgacttcccccgcggcgagctctgccgctacggcaacatcgagctcagcccctcctccggcgttctaaactacgcccagggcctgttcgagggaatgaaggcgtaccggcggccggaccgggccgggtacacgctgttccggccggaggagaacgcgcggcggatgcagcgcggcgccgagcgcatgtgcatgccggcgccgtcggtggagcagttcgtccacgccgtcaggcagacagtcctcgccaacaggcgctgggtgccgccgcaggggaagggagccctgtacctccggcctctgctcgtggggagcggcccgatccttgggctggctccggcccccgagtacaccttcctcatctacgccgcacccgttgggaactacttcaaggagggcctggcgcccatcaacctggtggtgcatgacgagttccaccgcgcgatgcccggcggcaccggcggggtcaagaccatcgccaactacgcgccggtgctgagggcgcagatggacgccaagagcaaggggttcacggacgtgctgtacctggactcggtccacaagcggtacctggaggaggtgtcgtcgtgcaacgtgttcgtcgtcaagggcggcgtggtcgccacgccggacacccggggcaccatcctgccgggcatcacgcgcaagagcgtcatcgagctcgccagggaccgcggatacaaggttgaggaacgcctggtttccatcgacgatctggtggccgcagacgaggtgttctgcaccgggaccgcggtggtggttgctcccgtgtcgacagtcacgtaccagggcgagaggtatgagttcagaacggggccggacacggtgtcgcaggagctgtacacgacgctgacatccattcagatgggcatggccgccgaggacagcaagggatggacagtagcagtagagtagattaataaggttggggaatgccatcgccacgacattggatcctacatcagtattgtcatccggtagaatgcatactcggttgatcagcatatgtagtgttgcagcaaattgaagaataaaccgtgtgtgttcgatggcgatcagtgacgaggccattgagcagccattgatttgatctc

SEQ ID NO: 92032 - DNA, 2020 bp, Zea Mays
gacacatgggcgggtgcgtggtgcactggtgcttccatcgaactgtgctcgtttgattaatttgccctcctcttccttccctccagctaacccatcagccattggtaggtagcccgtgaacgaaggttgcaaccataactcttctcttcccacgagagagagagagagagagagagagagagagagagagagagagagagcttgaccgaaatccacataccgtgtatagctagtggtagcagtgcagccggccggggtctaaagaagggggaccgtacgtactgcatggccgcgttgacatctgcgaagggcgctctccttccgtcgtgggctcgcagcagcagcagcggccatggcggcgacttgtggagggtcctggggaaggcgttggctacggccggaggaggaggcggcggcggatgctcccttctgctcccgcgccggtggcagtcgtcgctgccgcagctggaccacgtcgccgacaggtgagcctcagtgacagacagtacgcccggccgcagatcccgatcgggcattctccgaccgactcccccattgtttcgccatcttttaagtctgccggccgcaacgtgcatcatgcagcatgcgtgtgaacgtactacgcaggtccaacgaggagagcggcggcgagatcgactgggacaacctcggcttcggcctcaccccgaccgactacatgtacgtcacgcggtgctcgccggaggaccgcggcgacttcccccgcggcgagctctgccgctacggcaacatcgagctcagcccctcctccggcgttctaaactacgcccagggcctgttcgagggaatgaaggcgtaccggcggccggaccgggccgggtacacgctgttccggccggaggagaacgcgcggcggatgcagcgcggcgccgagcgcatgtgcatgccggcgccgtcggtggagcagttcgtccacgccgtcaggcagacagtcctcgccaacaggcgctgggtacgtgcgtacgttccgctgtttgcccgccccgccccagccacgcgccggcgccgaccagcgatcacttgcgtgccatgcgttccgtttgcaggtgccgccgcaggggaagggagccctgtacctccggcctctgctcgtggggagcggcccgatccttgggctggctccggcccccgagtacaccttcctcatctacgccgcacccgttgggaactacttcaaggagggcctggcgcccatcaacctggtggtgcatgacgagttccaccgcgcgatgcccggcggcaccggcggggtcaagaccatcgccaactacgcgccggtgctgagggcgcagatggacgccaagagcaaggggttcacggacgtgctgtacctggactcggtccacaagcggtacctggaggaggtgtcgtcgtgcaacgtgttcgtcgtcaagggcggcgtggtcgccacgccggacacccggggcaccatcctgccgggcatcacgcgcaagagcgtcatcgagctcgccagggaccgcggatacaaggttgaggaacgcctggtttccatcgacgatctggtggccgcagacgaggtgttctgcaccgggaccgcggtggtggttgctcccgtgtcgacagtcacgtaccagggcgagaggtgacaactctctcctcgttcgttcttcgtgtgcccggggcatatacgacgcctatcgacagagagtgacagagctttctttcaggtatgagttcagaacggggccggacacggtgtcgcaggagctgtacacgacgctgacatccattcagatgggcatggccgccgaggacagcaagggatggacagtagcagtagagtagattaataaggttggggaatgccatcgccacgacattggatcctacatcagtattgtcatccggtagaatgcatactcggttgatcagcatatgtagtgttgcagcaaattgaagaataaaccgtgtgtgttcgatggcgatcagtgacgaggccattgagcagccattgatttga

SEQ ID NO: 92033 - DNA, 2062 bp, Zea Mays
agcaagtgtcaaagcgtgggctcgcgtacgtacgtgcacgtgatgtgcgcgtgcatccgcgcgcttgtccgttgccggctccgctcctcctcaaatattctcgcctgccctcctcatttcctcctcaaccatttcattccttccttccttcccctcgctcgccttcctggcttcttcctccccagcacgcacacgcacacgcacacacccagccttttggctgccctgccggccgtcagagagagaaaccgagctctaactaactgaagtggcggccacatagctagctactcttctgatcctgagcgcgcacgcgccatggctcaggaggacgtgcacctggacgacgcaggcctcgcgctgggcctgtccctcggcagcggcagcggcggcgcctctggtgcggcgcgccacggtggtatcagccgccggctgagcagggaggtgcggctgccgtcgccgcacccgctggagccgtcgctgacgctgagcttgccggacgaagcgaccgcgaccgggtccggcgggggcggggccgcgcacagcgtgtcgtcgctgtcagtggcgggcgtgaagagggagcgcgtggatgacgccgagggagagcgggcgtcgtctacggccgcgttgccgcgggcctgcgccggcgccgaggacgacgacgacgacgggagcacgcggaagaagctgaggctgaccaaggagcagtccgcgctcctggaggaccgcttcaaggagcacagcaccctgaacccgaagcagaaagtcgcgttggcgaagcaactgaagctgaggccacggcaggtggaggtgtggttccaaaacaggcgagcaaggacgaagctgaagcagacggaggtggactgcgagctgctgaagcgctgctgcgagtcgctgacggaggagaaccggcggctgcagcgggagctgcaggagctccgcgcgctcaagttcgccccacacccacaggcgccgccgtcgtccgcgacgcaggccggcgcggcggcgggcgtcgttccggcgccgccgccgccgttgtacatgcagatgcagatgccggccgccgccacgctgagcctgtgcccgtcctgcgaccgcctggccgggcccggcgccgccgccaaggccgagcccaggcccaaggcagccgccacccaccacttcttcaaccccttcacccactccgccgcctgctgatgatgagggcagggcagcacgcagccacgcaacgcagcggcagtaaacagagcaccgccccgtgcagataataccacgtctgtacgtgtcacaagtaattaacaaacgtatggtcctcctctctatctattttcttgatccggagggctaagttagttgttttcgtgtcgatcccaaatgcatcagctaatccatcaatcataggcttgatagagtagtcgaaaaaaatagccgtagctttcctagcactccctccgccccccccccccccccccatccatgtatatttctgttgtaattctgtccctctctcgcggtctacttgctcccttttcgattggagtacgtagctcctttgcctttttgtttttggttttttgtttctgtttctgtttgagacaggttaatataatcgccgtcgtccgagggtgtagtgtcagggattgatatccctgtacaccgattattggattgagatgcttctagctagtcttcgtactgataagcgtgcgtgcgtacgtcagagcaccacagtgctggaatggatgatgacatgagagacaggtagagaagcccagctgcgtggctcttggacctttctgcaggtgtacgtggtgtgtacacacgcacacccttttttatagtacatatatacggctcaatgattgtgcgtgccggggctctcgactctccaaattgctgtcgcttttgctcgttttaattattgggagcgcgagcgcggcagcccgctcttgtcttgagcatgcccacccctcgctggcgcacaagccatcagttctctgcaccgtatatgcatggctgcccggccacggacgaactttcagtttcagcagtctaatgatcc

SEQ ID NO: 92034 - DNA, 1884 bp, Zea Mays
tcctcatttcctcctcaaccatttcattccttccttccttcccctcgctcgccttcctggcttcttcctccccagcacgcacacgcacacgcacacacccagccttttggctgccctgccggccgtcagagagagaaaccgagctctaactaactgaagtggcggccacatagctagctactcttctgatcctgagcgcgcacgcgccatggctcaggaggacgtgcacctggacgacgcaggcctcgcgctgggcctgtccctcggcagcggcagcggcggcgcctctggtgcggcgcgccacggtggtatcagccgccggctgagcagggaggtgcggctgccgtcgccgcacccgctggagccgtcgctgacgctgagcttgccggacgaagcgaccgcgaccgggtccggcgggggcggggccgcgcacagcgtgtcgtcgctgtcagtggcgggcgtgaagagggagcgcgtggatgacgccgagggagagcgggcgtcgtctacggccgcgttgccgcgggcctgcgccggcgccgaggacgacgacgacgacgggagcacgcggaagaagctgaggctgaccaaggagcagtccgcgctcctggaggaccgcttcaaggagcacagcaccctgaacccgcaccacaaaacggctgcggctccggctgcacttgccttgcctagtactacacctcgatgaattactagtcgacactggctgcgtacatggctgattattactacagccacacacatatatattgtacagtatatgaagcagaaagtcgcgttggcgaagcaactgaagctgaggccacggcaggtggaggtgtggttccaaaacaggcgagcaaggacgaagctgaagcagacggaggtggactgcgagctgctgaagcgctgctgcgagtcgctgacggaggagaaccggcggctgcagcgggagctgcaggagctccgcgcgctcaagttcgccccacacccacaggcgccgccgtcgtccgcgacgcaggccggcgcggcggcgggcgtcgttccggcgccgccgccgccgttgtacatgcagatgcagatgccggccgccgccacgctgagcctgtgcccgtcctgcgaccgcctggccgggcccggcgccgccgccaaggccgagcccaggcccaaggcagccgccacccaccacttcttcaaccccttcacccactccgccgcctgctgatgatgagggcagggcagcacgcagccacgcaacgcagcggcagtaaacagagcaccgccccgtgcagataataccacgtctgtacgtgtcacaagtaattaacaaacgtatggtcctcctctctatctattttcttgatccggagggctaagttagttgttttcgtgtcgatcccaaatgcatcagctaatccatcaatcataggcttgatagagtagtcgaaaaaaatagccgtagctttcctagcactccctccgccccccccccccccccccatccatgtatatttctgttgtaattctgtccctctctcgcggtctacttgctcccttttcgattggagtacgtagctcctttgcctttttgtttttggttttttgtttctgtttctgtttgagacaggttaatataatcgccgtcgtccgagggtgtagtgtcagggattgatatccctgtacaccgattattggattgagatgcttctagctagtcttcgtactgataagcgtgcgtgcgtacgtcagagcaccacagtgctggaatggatgatgacatgagagacaggtagagaagcccagctgcgtggctcttggacctttctgcaggtgtacgtggtgtgtacacacgcacacccttttttatagtacatatatacggctcaa

SEQ ID NO: 92035 - DNA, 1104 bp, Zea Mays
tcctcatttcctcctcaaccatttcattccttccttccttcccctcgctcgccttcctggcttcttcctccccagcacgcacacgcacacgcacacacccagccttttggctgccctgccggccgtcagagagagaaaccgagctctaactaactgaagtggcggccacatagctagctactcttctgatcctgagcgcgcacgcgccatggctcaggaggacgtgcacctggacgacgcaggcctcgcgctgggcctgtccctcggcagcggcagcggcggcgcctctggtgcggcgcgccacggtggtatcagccgccggctgagcagggaggtgcggctgccgtcgccgcacccgctggagccgtcgctgacgctgagcttgccggacgaagcgaccgcgaccgggtccggcgggggcggggccgcgcacagcgtgtcgtcgctgtcagtggcgggcgtgaagagggagcgcgtggatgacgccgagggagagcgggcgtcgtctacggccgcgttgccgcgggcctgcgccggcgccgaggacgacgacgacgacgggagcacgcggaagaagctgaggctgaccaaggagcagtccgcgctcctggaggaccgcttcaaggagcacagcaccctgaacccgaagcagaaagtcgcgttggcgaagcaactgaagctgaggccacggcaggtggaggtgtggttccaaaacaggcgagcaagccgcgcgcgcaggacgaagctgaagcagacggaggtggactgcgagctgctgaagcgctgctgcgagtcgctgacggaggagaaccggcggctgcagcgggagctgcaggagctccgcgcgctcaagttcgccccacacccacaggcgccgccgtcgtccgcgacgcaggccggcgcggcggcgggcgtcgttccggcgccgccgccgccgttgtacatgcagatgcagatgccggccgccgccacgctgagcctgtgcccgtcctgcgaccgcctggccgggcccggcgccgccgccaaggccgagcccaggcccaaggcagccgccacccaccacttcttcaaccccttcacccactccgccgcctgctgatgatg

SEQ ID NO: 92036 - DNA, 1092 bp, Zea Mays
tcctcatttcctcctcaaccatttcattccttccttccttcccctcgctcgccttcctggcttcttcctccccagcacgcacacgcacacgcacacacccagccttttggctgccctgccggccgtcagagagagaaaccgagctctaactaactgaagtggcggccacatagctagctactcttctgatcctgagcgcgcacgcgccatggctcaggaggacgtgcacctggacgacgcaggcctcgcgctgggcctgtccctcggcagcggcagcggcggcgcctctggtgcggcgcgccacggtggtatcagccgccggctgagcagggaggtgcggctgccgtcgccgcacccgctggagccgtcgctgacgctgagcttgccggacgaagcgaccgcgaccgggtccggcgggggcggggccgcgcacagcgtgtcgtcgctgtcagtggcgggcgtgaagagggagcgcgtggatgacgccgagggagagcgggcgtcgtctacggccgcgttgccgcgggcctgcgccggcgccgaggacgacgacgacgacgggagcacgcggaagaagctgaggctgaccaaggagcagtccgcgctcctggaggaccgcttcaaggagcacagcaccctgaacccgaagcagaaagtcgcgttggcgaagcaactgaagctgaggccacggcaggtggaggtgtggttccaaaacaggcgagcaaggacgaagctgaagcagacggaggtggactgcgagctgctgaagcgctgctgcgagtcgctgacggaggagaaccggcggctgcagcgggagctgcaggagctccgcgcgctcaagttcgccccacacccacaggcgccgccgtcgtccgcgacgcaggccggcgcggcggcgggcgtcgttccggcgccgccgccgccgttgtacatgcagatgcagatgccggccgccgccacgctgagcctgtgcccgtcctgcgaccgcctggccgggcccggcgccgccgccaaggccgagcccaggcccaaggcagccgccacccaccacttcttcaaccccttcacccactccgccgcctgctgatgatg

SEQ ID NO: 92037 - DNA, 1965 bp, Zea Mays
cggttgcgaggctaaactggacatttctagacttctctaccaagtcatatctcatatcccccgaaacagtcaggggctgagggaggcgccgcctgggtggagtggagagctggaggcagatcgaaataaagagcaccttccgaaccgacgtcctcgccaacgtcgtctcaaacgtgcccctcacgagaccgtcctccaaaatcctgaaacctatataattcccgctccatcaccggccggacgcctgatccgagcccctgagtcctgatagtacacgacaggcaccgcagcagaccggccggactcggcgccaagcgcgatggatttgtcatccgacgacgtgaaggcggcgaacatgcggcctgcggttgctgctgccgacggcacgtcgacgcttctgcggggttggcgggagttcatgcggagcggcgcgccggcgaggttcctctgttatgaggacggcaagtggatcggtatcaccggagaggcggtgccgcagctgcgccaggcgttccaggagaggagggcgatggccgatgcttcgtacgggggcaaggcgtacctgttcgacttcctccgcatgatcaggatcgacgaggtcaccggcgaggagaccgggctggcgtggatcgacgaccgcggggactgcttcttcccggcgcccgactgcggagggaggaagcgcaagagggacgacgagccggcggaggacgaggccgagtcatcctcgggcgtggacgtgcgctcaggggagagacacggcgtggacgccaagaagatgaaggcatgggagaacgcggcggtgaggctcgaggagaacgacatgtactaccaggtcgtcagcaagctattcctcagctatgggatggcgcaacgcggcgcggcgatcacggaggtgcgcaagatcgcgcccggcgcgaggaccgtggcgttccgggaacaggggcagcgcctcgcctacgcgcgctgcacagccaccggcaccgccaagttcgcatggtacggcgcctcggaggacgacgtggccgccgtcgtcgagcgaggattcgtgaggaacaacgcgccaaggctgggcgcgcgcaagcacggcgacggcgttcatctttcgccggcgcagtgcccttacacgagtgccatgctggccaaggcagacgggagcgacgaggcgcacatcgtgctgtgccgcgtgctgatgggccggccggaggctgtcccggcaggatcttcgcagttctgccccagcagccgcagctacgacagcgccgtggataagctggagaatccacagtggtacgttgtgtggaacatggatatgaacacgaggatcctcccggaatacgtggtcagcttcaagtgctccaagctgcaacagatgcgagaatcatcagaagcgacttcaaagctgaagaagccggcaccagtggctcgcgacatgttcccgacgcttcttgcagagatccagcagatcgtgccagacaagtgtgatctattgcaggagtcatacaaaaacttcaagatgggtcagattaagaaagaccagttcatccagttcctccgcaattacgtcggagacgaagtgctgaaaaccgtggccaagaaacttcgacgatgctaaatttctagtgcgcggtgcgacatcattatctccttgatttctactcgagctgtctgtagtagtgctcagtagagatgaggaggttcacttctgtttctgttgattcaagtttctgtcaagggcttatagggggtttggcgcgctgttcttacattaaccaacagtccaacacaaaggatagatgcagtttctgatactgagacgtttcgattcttcttttagtgtcctgcagcctgtgataatctgtacagactgaaatgatatatgcataaatggaaccattgttgagctggccagtcgctccaaagttttgccgttggccaatcgctccaaagttttgccgttgcaga

SEQ ID NO: 92038 - DNA, 108 bp, Zea Mays
gcccaacagaaacacgccagataatctgggtaaacaaacagaactactcagattatataatccaaattatataatccagattatataatcctccaaaaataatccaga

SEQ ID NO: 92039 - DNA, 904 bp, Zea Mays
gtccagcacacacacacacacagggagactgggagagacacagtgttccacctccgacggtccgagagttcgacccgtgccccggacgggcgccaagcacaagagctagcagaagggcccccgcccgcgctgcacgaacagcgcgcccgcttccgggccgcgctgccactgccagccccgcgccgcgcccgtggtttcgtttcgtggccggcgactgggagaatgacagcaaacatcgggcggcgtgtgcgcacgtatagtaccacggtccagctagcgctttctcgccctgtctcagctcaggcgcccgactgcgctcggcgcgtgtggcgatggtgggtggtggagactggcgagtgtgcgtgcatgcatgcacggagacatgtgtacttgtgtcccgaaaagcggtcgactacagtactacactaacagcgttatgcatcgcgtgctcaagcgcaagaccggccggcccgccccgcgcccgccgatggacaaggacgacgggcactgctgggattgagcgcaatctgacgtgcgatcgatatgcctctgctgccccgcaatggccagccagccagcagcacgaacgccggtcagagacgacgaggacgagagagcggaggttgcactgcatgacatgctagctagtggaatatatggactattcgcgtgcgcccgggtgcagacaaaagccattcatcgagcgcctgtcggacgacgactatgtccatgtgatattgtagctacacatgatgtttacttgctcttttagagactacggatttttgttttattagagaaaaaagagaacgaagaatctcaaagccagatttcgatatcagagatccattgtaattaagcctctgaacaaacttattacagaatttgcaaggatataccaaaa

SEQ ID NO: 92040 - DNA, 1776 bp, Zea Mays
gaaatcaatcctcttctcgtctagatctgagcctccgcgtggcttccagatcagatgcttggtccgatcaacgacgaccttcagagctgcgacgttccggcttccgggggatctggatcttggctgactggacaattgcgaggcgttgacgggcttctaaagcgtggctggattgctggatctcctttctgccccgcgactcgatgatatctctttgtattggtaattattggatgaaatttcgataattattagatcggagagatgttggtcgcggcggtccgtgcctaactgaaggcaaggtaaggtccgagacaaaagaggggaaaaggatacatgaaaaagaagtgagatgtgacatcttgaaggcctttgccatgttgggtgcgctcgcatggcaggcatcgtaataaagatgttggttttgtgtgctgggtgggagatcgcacagggaattgtttttttcatccctgggttctcccgcccattgtgtccctgtgccctgcttcgtgttgtttggcttctcgtcctacgcttcatcaccggtgctgctgcaaattgaacggcgtttctcgtctcacggcgtgctgcaaattgaacggggctacatcgcaacgcaacacacaaggtacaaaccggatctaaacattttcaatttacagcgaagttagcaagttactgaaatcaccatcaatcgttcaaaactcagcgcgccacaaacttctacgcctatactacgccatgcatatgcagttcattcacccaacgcttatcccgtaaggctataaagcacatgcgaaaggcgttcattcactctgtaaggcgttcttgttcttcacccaacgcttctcgcacgggggtcttctattgaccattgaagaaaaacatttgactggagatagcatctggaatatatgaatctagtataacgaactaggtctgaaaatctgggcaattccagattcgattctcatgtgagatgataaaaacgtcataattatcctgcgtactaaaaaatattcgctagttgagtcgttccggcatatacaaaattattagctacagttgttcctgcatgcgtgtaatgtccttcggtgaacttgtctgtcattatcatttaaaaacgtatctagatgcattacggaagatttttagtttcctttgttatatttgagaagttatatattgtatatacagagagatgcagctgtgtattatttgctgtagcttcgattgcgagacgcatggttgcagtcattttattgtagttagtttatatgatacgtcgttgtcaccgcatgaagattaactgctgtgccatatgaagacctcctgcctcatcacggtgtttgtatataagatcaactgcagtgcctacacggtggacggagtatttgtatgatgtgaaggtcactattcagcatcgtcagtatgaaatggctatggccttcaaagctttctttcttggtcaccggacagggaagaaatattctgctcaagctcacaattagatacaagacataactcagataagagcttgttcaacttgcactatagttcatttgagtatttacctattattgatctcttgagttgaagctaggtttcaagtatctcctaaggattcgtatatgtgaaaaccagggattctcttttttttttgcactacaatctgtgacgttttaatatttgatgactagttgttcatgcattgctattgtatttgcatatcccctaggtttaagagcatttctaacaaggtgactcaatgatgtc

SEQ ID NO: 92041 - DNA, 1998 bp, Zea Mays
gtacacgccaaccagcaccttttgcctaccccggcaccaccccgcctttgccttggtgttgaaaagtcgccgcgttcctcttgcctgatgaaatcaatcctcttctcgtctagatctgagcctccgcgtggcttccagatcagatgcttggtccgatcaacgacggtgagtcttgctctgttagttgattgttcgaaatgcatggttttgtttttgtgatgatgtgcaggttccgatcagtttcgtttgattgatgagttgacgcatcggttcgaagcgagacgaggctgcatggtttttgtgcctggaggtttctgatcagcgtgtttaaggaaactggatgctacaatttgttatctgcagaccttcagagctgcgacgttccggcttccgggggatctggatcttggctgactggacaattgcgaggcgttgacgggcttctaaagcgtggctggattgctggatctcctttctgccccgcgactcgatgatatctctttgtattggtaattattggatgaaatttcgataattattagatcggagagatgttggtcgcggcggtccgtgcctaactgaaggcaaggtaaggtccgagacaaaagaggggaaaaggatacatgaaaaagaagtgagatgtgacatcttgaaggcctttgccatgttgggtgcgctcgcatggcaggcatcgtaataaagatgttggttttgtgtgctgggtgggagatcgcacagggaattgtttttttcatccctgggttctcccgcccattgtgtccctgtgccctgcttcgtgttgtttggcttctcgtcctacgcttcatcaccggtgctgctgcaaattgaacggcgtttctcgtctcacggcgtgctgcaaattgaacggggctacatcgcaacgcaacacacaaggtacaaaccggatctaaacattttcaatttacagcgaagttagcaagttactgaaatcaccatcaatcgttcaaaactcagcgcgccacaaacttctacgcctatactacgccatgcatatgcagttcattcacccaacgcttatcccgtaaggctataaagcacatgcgaaaggcgttcattcactctgtaaggcgttcttgttcttcacccaacgcttctcgcacgggggtcttctattgaccattgaagaaaaacatttgactggagatagcatctggaatatatgaatctagtataacgaactaggtctgaaaatctgggcaattccagattcgattctcatgtgagatgataaaaacgtcataattatcctgcgtactaaaaaatattcgctagttgagtcgttccggcatatacaaaattattagctacagttgttcctgcatgcgtgtaatgtccttcggtgaacttgtctgtcattatcatttaaaaacgtatctagatgcattacggaagatttttagtttcctttgttatatttgagaagttatatattgtatatacagagagatgcagctgtgtattatttgctgtagcttcgattgcgagacgcatggttgcagtcattttattgtagttagtttatatgatacgtcgttgtcaccgcatgaagattaactgctgtgccatatgaagacctcctgcctcatcacggtgtttgtatataagatcaactgcagtgcctacacggtggacggagtatttgtatgatgtgaaggtcactattcagcatcgtcagtatgaaatggctatggccttcaaagctttctttcttggtcaccggacagggaagaaatattctgctcaagctcacaattagatacaagacataactcagataagagcttgttcaacttgcactatagttcatttgagtatttacctattattgatctcttgagttgaagctaggtttcaagtatctcctaaggattcgtatatgtgaaaaccagggattctcttttttttttgcactacaatctgtgacgttttaatatttgatgactagttgttcatgca

SEQ ID NO: 92042 - DNA, 1059 bp, Zea Mays
gtacacgccaaccagcaccttttgcctaccccggcaccaccccgcctttgccttggtgttgaaaagtcgccgcgttcctcttgcctgatgaaatcaatcctcttctcgtctagatctgagcctccgcgtggcttccagatcagatgcttggtccgatcaacgacggtgagtcttgctctgttagttgattgttcgaaatgcatggttttgtttttgtgatgatgtgcaggttccgatcagtttcgtttgattgatgagttgacgcatcggttcgaagcgagacgaggctgcatggtttttgtgcctggaggtttctgatcagcgtgtttaaggaaactggatgctacaatttgttatctgcagaccttcagagctgcgacgttccggcttccgggggatctggatcttggctgactggacaattgcgaggcgttgacgggcttctaaagcgtggctggattgctggatctcctttctgccccgcgactcgatgatatctctttgtattggtaattattggatgaaatttcgataattattagatcggagagatgttggtcgcggcggtccgtgcctaactgaaggcaaggtaaggtccgagacaaaagaggggaaaaggatacatgaaaaagaagtgagatgtgacatcttgaaggcctttgccatgttgggtgcgctcgcatggcaggcatcgtaataaagatgttggttttgtgtgctgggtgggagatcgcacagggaattgtttttttcatccctgggttctcccgcccattgtgtccctgtgccctgcttcgtgttgtttggcttctcgtcctacgcttcatcaccggtgctgctgcaaattgaacggcgtttctcgtctcacggcgtgctgcaaattgaacggggctacatcgcaacgcaacacacaagattaactgctgtgccatatgaagacctcctgcctcatcacggtgtttgtatataagatcaactgcagtgcctacacggtggacggagtatttgtatgatgtgaaggtcactattcagcatcgtcagtatgaaatggctatggcc

SEQ ID NO: 92043 - DNA, 2245 bp, Zea Mays
gacgaagtggggcgcctagcttcttactagttttttttttccttgcgcaaagcttgcacttgctgagagagagggagagagaaatccagagataaaggcgcttcattcattccctctcctgctttctctctccaacccatccgtcctctctctccacacataaaaaccaacgaagcgggcgagtgatcaggcagaggcagcaggcaggaaataaatttgaagaaagctagacctctgatcagcaggagctcatgggcgccatgatggcctccataaccagcgagctcctcttcttccttcccttcatcctgctggccctcctcgccttgtacaccaccaccgtcgccaaatgccacggcacccacccgtggcgccgtcagaagaagaagcggcccaacctgcccccgggcgcccgcggatggcccttggtcggcgaaactttcggctacctccgcgcccacccggccacctccgtgggccgcttcatggagcggcatgtcgcacggtacgggaagatataccggtcgagcctgttcggggagcggacggtggtgtcggcggacgcggggctgaaccgctacatcctgcagaacgaggggcggctgttcgagtgcagctacccgcgcagcatcggcggcatcctgggcaagtggtccatgctggtgctcgtgggcgacgcgcaccgcgagatgcgcgctatctcgctcaacttcctcagctccgtccgcctccgcgccgtgctgctccccgaggtggagcgccacaccctgctggtcctccgctcgtggccgccctccgacggcaccttctccgcccagcacgaagccaagaagttcacgtttaacctgatggcgaagaacataatgagcatggaccccggcgaggaggagacggagcggctgcggctggagtacatcaccttcatgaagggcgtcgtgtcagcgccgctcaacttcccgggcacggcctactggaaggcgctcaagtcgcgcgcgtccatacttggagtgatagagaggaagatggaggacaggcttgagaagatgagcagggagaagtcaagcgtggaggaggacgaccttcttggatgggccctgaagcaatccaacctgtccaaggaacagatcctggacctcttgctgagcctgctcttcgcggggcacgagacttcgtccatggcgctcgccctcgccatcttcttcctcgaagggtgccctaaggccgtgcaagaactccgggaggagcatctcctgattgctaggagacaaaggctaaggggggcgtccaaattgagctgggaagactacaaggaaatggttttcacgcagtgtgttataaacgagacattgcggctcggcaacgtggtcaggttcctgcaccggaaggtcatccgagatgtacactacaatgggtacgacataccgcgggggtggaaaatcctgccggttctagcggcggtgcacctggactcgtcgctgtacgaggaccccagccggttcaacccttggagatggaagagcaacaacgcgccaagcagcttcatgccgtacggcggcgggccgcggctgtgcgccgggtcggagctggccaagctggagatggccatcttcctgcaccacctggtgctcaacttccggtgggagctggcggagccggaccaggccttcgtctaccctttcgtcgacttccccaagggcctcccgatcagggtccagcgggtcgccgacgaccaaggccatcgtagcgttttgaccgagagcacaagaggctgagagggaggaggcagttcaatttttcgttgcattttgagggctgtggtctcgtgttttatgtagattgtgattattattattatacatactaaaacaagatagaagcacgtatagacagagcaaagaggaggatggtccaaaagtgtttggggtagataaaatgtgtactcactagggttgtaataaggccggtccatggcccatgtcaagtaatactagagatatatagaatatagtggatatccaacatgtcttttttccttgtcttaaaaccatgtccagcagttcatctatatgttcatttaaaatactttttacactataaaatacactcttcatagaatagagttttaatatagatatgaagatagtggagataacaattgcgtccatgtaacatgagtaatgttattagacgttaactaaaaatatcactagaagcacattccaatgaaagagccgaaaaaagaaaa

SEQ ID NO: 92044 - DNA, 2066 bp, Zea Mays
gacgaagtggggcgcctagcttcttactagttttttttttccttgcgcaaagcttgcacttgctgagagagagggagagagaaatccagagataaaggcgcttcattcattccctctcctgctttctctctccaacccatccgtcctctctctccacacataaaaaccaacgaagcgggcgagtgatcaggcagaggcagcaggcaggaaataaatttgaagaaagctagacctctgatcagcaggagctcatgggcgccatgatggcctccataaccagcgagctcctcttcttccttcccttcatcctgctggccctcctcgccttgtacaccaccaccgtcgccaaatgccacggcacccacccgtggcgccgtcagaagaagaagcggcccaacctgcccccgggcgcccgcggatggcccttggtcggcgaaactttcggctacctccgcgcccacccggccacctccgtgggccgcttcatggagcggcatgtcgcacggtacgggaagatataccggtcgagcctgttcggggagcggacggtggtgtcggcggacgcggggctgaaccgctacatcctgcagaacgaggggcggctgttcgagtgcagctacccgcgcagcatcggcggcatcctgggcaagtggtccatgctggtgctcgtgggcgacgcgcaccgcgagatgcgcgctatctcgctcaacttcctcagctccgtccgcctccgcgccgtgctgctccccgaggtggagcgccacaccctgctggtcctccgctcgtggccgccctccgacggcaccttctccgcccagcacgaagccaagaagttcacgtttaacctgatggcgaagaacataatgagcatggaccccggcgaggaggagacggagcggctgcggctggagtacatcaccttcatgaagggcgtcgtgtcagcgccgctcaacttcccgggcacggcctactggaaggcgctcaagtcgcgcgcgtccatacttggagtgatagagaggaagatggaggacaggcttgagaagatgagcagggagaagtcaagcgtggaggaggacgaccttcttggatgggccctgaagcaatccaacctgtccaaggaacagatcctggacctcttgctgagcctgctcttcgcggggcacgagacttcgtccatggcgctcgccctcgccatcttcttcctcgaagggtgccctaaggccgtgcaagaactccgggaggagcatctcctgattgctaggagacaaaggctaaggggggcgtccaaattgagctgggaagactacaaggaaatggttttcacgcagtgtgttataaacgagacattgcggctcggcaacgtggtcaggttcctgcaccggaaggtcatccgagatgtacactacaatgggtacgacataccgcgggggtggaaaatcctgccggttctagcggcggtgcacctggactcgtcgctgtacgaggaccccagccggttcaacccttggagatggaagctgcagagcaacaacgcgccaagcagcttcatgccgtacggcggcgggccgcggctgtgcgccgggtcggagctggccaagctggagatggccatcttcctgcaccacctggtgctcaacttccggtgggagctggcggagccggaccaggccttcgtctaccctttcgtcgacttccccaagggcctcccgatcagggtccagcgggtcgccgacgaccaaggccatcgtagcgttttgaccgagagcacaagaggctgagagggaggaggcagttcaatttttcgttgcattttgagggctgtggtctcgtgttttatgtagattgtgattattattattatacatactaaaacaagatagaagcacgtatagacagagcaaagaggaggatggtccaaaagtgtttggggtagataaaatgtgtactcactagggttgtaataaggccggtccatggcccatgtcaagtaatactagagatatatagaatatagtggatatccaacatgtcttttttccttgtcttaaaaccatgtccagcagttc

SEQ ID NO: 92045 - DNA, 707 bp, Zea Mays
gacgaagtggggcgcctagcttcttactagttttttttttccttgcgcaaagcttgcacttgctgagagagagggagagagaaatccagagataaaggcgcttcattcattccctctcctgctttctctctccaacccatccgtcctctctctccacacataaaaaccaacgaagcgggcgagtgatcaggcagaggcagcaggcaggaaataaatttgaagaaagctagacctctgatcagcaggagctcatgggcgccatgatggcctccataaccagcgagctcctcttcttccttcccttcatcctgctggccctcctcgccttgtacaccaccaccgtcgccaaatgccacggcacccacccgtggcgccgtcagaagaagaagcggcccaacctgcccccgggcgcccgcggatggcccttggtcggcgaaactttcggctacctccgcgcccacccggccacctccgtgggccgcttcatggagcggcatgtcgcacggtgcgtcgccgccgccgctgtctctacctctgtgcagacagcagacgacatgcatgcacggtgcagcgagcagcgcgcacctatcatgcatggcgcgacatcgatggaatcagaattagctctgagaccgagagcttgcttgctaacgcggcgacgtccatgcgtgcatgcaggtacgggaagatataccggtcgagcctgt

SEQ ID NO: 92046 - DNA, 376 bp, Zea Mays
aaattccatcgtctccaatatggatgtccaaacgcagcattagggattacacgccccacgtgcataccaccgttgattgcctatccagcggtgctacgcgctcaacagcaggagagaggatacgagttcgtcttcctcgcctcgaatccctctttcttcgcctgctggctctctcgtcgtccgttcctcgtcctctccggcattcgaggatagtttttcgccgggggcggcctagaaatcagccgtcaggtgaaccgggaggggtggttgcctgaggaggaagagatgatcacgcgagcgaagctggtggagcagctgcgggagcaccagatccggtcggcccagtcctactccgccgcgctcgccgtcttctcgc

SEQ ID NO: 92047 - DNA, 258 bp, Zea Mays
atgacccaggtggaagtattgttggtgacgatgcgcctgggagaccagccatccggtcaggagactggagcgtcggggcagatggcggtaccagccctaacgaagagtggatggggccagccagcgcggcaggtggctgaagtgccacctctgaaggagcgggtggcacagccggcgaagaagccaccggtgggggtggtagtgccatacgagtacctgaaaaagaagacacgggcgatagtccaaaaggagctgtaa

SEQ ID NO: 92048 - DNA, 425 bp, Zea Mays
tctctcttgtccaattcccactcatgagagatctcaaggttgctgtcatctatgcggtcctgttttgttttctcatggtgtcctgctatgccgccctttacttgaaatggttcagactttcagccatgtttgtaaccttcgggatcctccttccagtgagtctcaaaatctctaggcatagaaggctgaagaggaaaagagaaaggagactgttgttgccactgtccatgtgaatacattttttttgatacaccctgtaacattctagtggagttggccagctacagaagatagggaaatcctcggcagacgaactcaactttacggccccagcctacgctttggaaaatgttgtatgcatcacctgttgtgcttctgtcctccacatgtgtacacacacacatacgtgccgaacactttgcgtt

SEQ ID NO: 92049 - DNA, 3190 bp, Zea Mays
gctccgtttcgataagactagggacctgtacatcgccgacgcctacttcagcttgctcaaagttggccccgagggcaggctggagagttgctgtgaaaactctcaagtgagggaacatgatcatgtgcacgcaagatcctgatgactgttggcagaatcaagtcatagttaaataaacaggcccccacccgacggcgcgagcgaggcacgcggccctcccggcggggtggacgcggcccctggctgtgaggcgacgatggggctggaggctgcgatggcgctgggcgacccgccggcggactacgcatccatcgcgacggtggggctgttcgtggcattcatgtgcgtctgcatcgtcgtcgggcacctcctcgaggagaaccgctggatgaacgagtccatcaccatgctcttcatcgggctgggaactagagcagtcatcctgttcgcgtcgagcgagaagcattcacgtgtgctggtgttcagtgaggacctcttatttatttacctgctgccgctgatcatattcaatgcagggttccaagtgaagaagaaacagttctttcgaaacttcattactattacactgtttggtgcagttggcaccttgatctcttttactgtaatatcccttggcgctctaggactaatatcaaggcttaatatcggcgcacttgaactgggagactatcttgcacttggggcaatattctcggccacagactcggtttgtaccttgcaggtgttaagccaagatgagacaccattcttgtacagcctcgtgtttggtgaaggtgttgtcaatgacacaacttctgttgtgttgttcaatgcaatccagaactttgatcatggaaatatcagcggtgccaaattactgaacttcattggcagtttcctttatctgttcggctccagcaccattcttggagtagcttctggacttcttagtgcttataccattaagaagttgtactttggcaggcattcaaccgatcatgaagtttccattatgatgctaatggcttatttatcttacatgctagctgaaaaagttcgagggtcacaaccaagcatgcctttgcaacattgtcgtttatcttcgagacttttctgtttctttatgttggtatggatgcattggatatagagaagtggaagattgtcggtcaaacttataggcatactctctccctctttctctctcttcattgctcaactagaagatctttcttctggatctgtattttctatcatgtgcagcccggtaaagtctatcgctttgagcagcaccattttagccttggtgctggtttcaagagctgcttttgttttcccactatcctttctatcaaatttgaccaaaaaactccaaatggaaagatatcttttaggcagcaggtaagtctttaacttagcaacatcttaacttcttatgttctcttgaaacagttgttatattccttacatgatattggtcatttaggttattgtttggtgggcgggtctcatgagaggtgttgtgtctattgtgttggcttacaataaggttaatcttgtgtttggtctatctggtttgagctttggtctggaattatgttactgcttttgtttcctctatccattccaaaacataggacattttttgttgtcgtaagtcaaaaattctctaactttgacagagtttatagaaaaacaaaccaacatcaacagccttcatttcttaatcttatatagaagttgcagtattttagtctaatagatggacatgttttaaattttgaggcattgaaacaatttgcatcatgaaggcgttcgacttaatgtttccaaggttctgtggcagtgcgaggcattttgggaggtggtgagcgcctcgcttggcaccttcattttcgtgatgatgctgtccttcaggctgcagtgccacacaagttcgtttggtgtaggtgctgcttgatttttggcggtgcatgccgggtgttcgacaatgtttctgaggttttgtggcagtgcgaggcattttgggagggacatcatcatgcccaacttgaagtcgtccgtgaccacaacagcgagcgcggtggagtacatggatgaagtattgaaggcgttgtcgccagccgccgccgccgacgacggaggagcagcacctctcgtctgtccaccgctgaccgctcgtttgtcagcctagcaccggggtgcatgaacgcccagtatatgctacagcaccgccgcccctggccctgccgcctgcgccggtcgttgccctgtgcactccgcgggcctcgggaatggccaaccaggacatttatcggtttgcccaccctctcctctcttctcttctctcccgcccgctctccctctctcccttctctccggcttccgattgggtattgtttattggcttctggctttaattaattactgtatttgcatgttcaggtatgttgttcatccatctcgtatgatgaagtgttttatgctcttttccaattattgttgcaagtagcaaaattagaacatgtccttatgtttagactatgaaagaaaacacttatttcaatttgtaggtgtatttttctgtttcagttggcatatcatcatgaggatgtgaattccacaggaaggcccatgtgatcttattgctcccttagatcttccacattttttacagtcttattccttgccgaggggagtcctgctccagtagtggtctcagaaggggcaaataccatggatgttggcaggcctgtgcttgtgcagaatgcaccaaggacaagactggatgcagggacatgggggacgatggggattggattggggtactgtattgcagctgcagtagctgaacctgaatgactcgtggttgctgtggagggcgattctggatttggcttcggtgcaatggaggttgaggtgaacaggggcttcaacagtgatgctgttttagcaatggagacgatccattccctgtcagcttcaaaatcaagttacccaatggctgatctcacccaactcttcatgacagctactcaagaagggaaaagatcagaatcgcaaggccagattcttagggtggaatgctatagcttaatgccctaatctttatatgcctcttcttatatctgcacttccatgggcaccgggcgacactaaattcacaagataccccctccacctcaaggtg

SEQ ID NO: 92050 - DNA, 2740 bp, Zea Mays
gctccgtttcgataagactagggacctgtacatcgccgacgcctacttcagcttgctcaaagttggccccgagggcaggctggagagttgctgtgaaaactctcaagtgagggaacatgatcatgtgcacgcaagatcctgatgactgttggcagaatcaagtcatagttaaataaacaggcccccacccgacggcgcgagcgaggcacgcggccctcccggcggggtggacgcggcccctggctgtgaggcgacgatggggctggaggctgcgatggcgctgggcgacccgccggcggactacgcatccatcgcgacggtggggctgttcgtggcattcatgtgcgtctgcatcgtcgtcgggcacctcctcgaggagaaccgctggatgaacgagtccatcaccatgctcttcatcgggctgggaactagagcagtcatcctgttcgcgtcgagcgagaagcattcacgtgtgctggtgttcagtgaggacctcttatttatttacctgctgccgctgatcatattcaatgcagggttccaagtgaagaagaaacagttctttcgaaacttcattactattacactgtttggtgcagttggcaccttgatctcttttactgtaatatcccttggcgctctaggactaatatcaaggcttaatatcggcgcacttgaactgggagactatcttgcacttggggcaatattctcggccacagactcggtttgtaccttgcaggtgttaagccaagatgagacaccattcttgtacagcctcgtgtttggtgaaggtgttgtcaatgacacaacttctgttgtgttgttcaatgcaatccagaactttgatcatggaaatatcagcggtgccaaattactgaacttcattggcagtttcctttatctgttcggctccagcaccattcttggagtagcttctggacttcttagtgcttataccattaagaagttgtactttggcaggcattcaaccgatcatgaagtttccattatgatgctaatggcttatttatcttacatgctagctgaaaaagttcgagggtcacaaccaagcatgcctttgcaacattgtcgtttatcttcgagacttttctgtttctttatgttggtatggatgcattggatatagagaagtggaagattgtcggtcaaacttatagcccggtaaagtctatcgctttgagcagcaccattttagccttggtgctggtttcaagagctgcttttgttttcccactatcctttctatcaaatttgaccaaaaaactccaaatggaaagatatcttttaggcagcaggtaagtctttaacttagcaacatcttaacttcttatgttctcttgaaacagttgttatattccttacatgatattggtcatttaggttattgtttggtgggcgggtctcatgagaggtgttgtgtctattgtgttggcttacaataaggttaatcttgtgtttggtctatctggtttgagctttggtctggaattatgttactgcttttgtttcctctatccattccaaaacataggacattttttgttgtcgtaagtcaaaaattctctaactttgacagagtttatagaaaaacaaaccaacatcaacagccttcatttcttaatcttatatagaagttgcagtattttagtctaatagatggacatgttttaaattttgaggcattgaaacaatttgcatcatgaaggcgttcgacttaatgtttccaaggttctgtggcagtgcgaggcattttgggaggtggtgagcgcctcgcttggcaccttcattttcgtgatgatgctgtccttcaggctgcagtgccacacaagttcgtttggtgtaggtgctgcttgatttttggcggtgcatgccgggtgttcgacaatgtttctgaggttttgtggcagtgcgaggcattttgggagggacatcatcatgcccaacttgaagtcgtccgtgaccacaacagcgagcgcggtggagtacatggatgaagtattgaaggcgttgtcgccagccgccgccgccgacgacggaggagcagcacctctcgtctgtccaccgctgaccgctcgtttgtcagcctagcaccggggtgcatgaacgcccagtatatgctacagcaccgccgcccctggccctgccgcctgcgccggtcgttgccctgtgcactccgcgggcctcgggaatggccaaccaggacatttatcgtcttattccttgccgaggggagtcctgctccagtagtggtctcagaaggggcaaataccatggatgttggcaggcctgtgcttgtgcagaatgcaccaaggacaagactggatgcagggacatgggggacgatggggattggattggggtactgtattgcagctgcagtagctgaacctgaatgactcgtggttgctgtggagggcgattctggatttggcttcggtgcaatggaggttgaggggcttcaacagtgatgctgttttagcaatggagacgatccattccctgtcagcttcaaaatcaagttacccaatggctgatctcacccaactcttcatgacagctactcaagaagggaaaagatcagaatcgcaaggccagattcttagggtggaatgctatagcttaatgccctaatctttatatgcctcttcttatatctgcacttccatgggcaccgggcgacactaaattcacaagataccccctccacctcaaggtg

SEQ ID NO: 92051 - DNA, 5205 bp, Zea Mays
gtggtgcacggttctgcctttgttccgcgcccctgcgtccggaaatctcgccgcgcccctgcgtccggaaatctcgccgcgcccctacgcaatcacctcctcctctcccctcactacgccgccacctcctcctctccccctcactgcgtcgccctcctctcccactcactgcgtcgtcccctggatcctcgccccagcctctccaaccgcctccgcgctgtcccctggatctcgcgtcgcgcgtctgcagcacgcccgccacacacgccgcgattggagattggtggaaagcggtccgcggcttcaactccgacatctccggcgagctcgagcgcctcgctgcaacgacgggggcgacgctcagatccgacgtgccggacgcggccgccgtggatctgaacgacctcgagtccatggatctgtcggcggacgctgctccgctggagcacatggagccgttcgtgctggcatgcgcgcgggtgctgggcccgacgccgggccggacgcgtggcgtcgccgacggccgggtcgtcttctgggacggcaagcggtgggtcccattcgcgacggcctctccgcgctggacgcaggagctctgcggcgggcccaaggcctcgccgctggagtatctccccacgcccggcgatggcgccctgcacctcacgcccgtgctccgcccccacacccagcaggcaggcatggatctcgcagggcagggatctcgcggatcacgccgtgcggggatctcgcggatcacgccgggcggggatctcggccaagcctgatcagaagtttggggccctatcaaagcgattcgcagaagtggaggctgggggatcgaagcggaggtggtggagatgacggaggcgctgaagtccgtctggaatccggtgacacagaaaaagatcagagtttctccttctacttcgtcgggtgaagtcccggtggtggacaacacctcgacgctgatccctctggaagctgcggcaggcattgctggtgccgatgcaacccacatttggcattcccactccaatcgaagggtttttggtgtcgctgaacaggacactaggcttctgctctgcttactaatccattggtttcaagatgacagaagccgtcatcaaactgaatacttcttctaactgaatacttcttcccagctgacagatcagatcaaacttgacgtgtgttaggtatcagagaaaaaaaccaaggcatggtgcacttctaaagagcacatctgcagctgcccgctcgggctccgtttcgataagactagggacctgtacatcgccgacgcctacttcagcttgctcaaagttggccccgagggcaggctggagagttgctgtgaaaactctcaagtgagggaacatgatcatgtgcacgcaagatcctgatgactgttggcagaatcaagtcatagttaaataaacaggcccccacccgacggcgcgagcgaggcacgcggccctcccggcggggtggacgcggcccctggctgtgaggcgacgatggggctggaggctgcgatggcgctgggcgacccgccggcggactacgcatccatcgcgacggtggggctgttcgtggcattcatgtgcgtctgcatcgtcgtcgggcacctcctcgaggagaaccgctggatgaacgagtccatcaccatgctcttcatcgggctgggaactagagcagtcatcctgttcgcgtcgagcgagaagcattcacgtgtgctggtgttcagtgaggacctcttatttatttacctgctgccgctgatcatattcaatgcagggttccaagtgaagaagaaacagttctttcgaaacttcattactattacactgtttggtgcagttggcaccttgatctcttttactgtaatatcccttggcgctctaggactaatatcaaggcttaatatcggcgcacttgaactgggagactatcttgcacttggggcaatattctcggccacagactcggtttgtaccttgcaggtgttaagccaagatgagacaccattcttgtacagcctcgtgtttggtgaaggtgttgtcaatgacacaacttctgttgtgttgttcaatgcaatccagaactttgatcatggaaatatcagcggtgccaaattactgaacttcattggcagtttcctttatctgttcggctccagcaccattcttggagtagcttctggacttcttagtgcttataccattaagaagttgtactttggcaggcattcaaccgatcatgaagtttccattatgatgctaatggcttatttatcttacatgctagctgaattgctcgatttgagtggcattctcactgtgtttttctgtggtatcgtaatgtcacactatacttggcaaaatgtaacagaaagttcgagggtcacaaccaagcatgcctttgcaacattgtcgtttatcttcgagacttttctgtttctttatgttggtatggatgcattggatatagagaagtggaagattgtcggtcaaacttataggcatactctctccctctttctctctcttcattgctcaactagaagatctttcttctggatctgtattttctatcatgtgcagcccggtaaagtctatcgctttgagcagcaccattttagccttggtgctggtttcaagagctgcttttgttttcccactatcctttctatcaaatttgaccaaaaaactccaaatggaaagatatcttttaggcagcaggtaagtctttaacttagcaacatcttaacttcttatgttctcttgaaacagttgttatattccttacatgatattggtcatttaggttattgtttggtgggcgggtctcatgagaggtgttgtgtctattgtgttggcttacaataaggttaatcttgtgtttggtctatctggtttgagctttggtctggaattatgttactgcttttgtttcctctatccattccaaaacataggacattttttgttgtcgtaagtcaaaaattctctaactttgacagagtttatagaaaaacaaaccaacatcaacagccttcatttcttaatcttatatagaagttgcagtattttagtctaatagatggacatgttttaaattttgaggcattgaaacaatttgcatcatgaaggcgttcgacttaatgtttccaaggttctgtggcagtgcgaggcattttgggaggtggtgagcgcctcgcttggcaccttcattttcgtgatgatgctgtccttcaggctgcagtgccacacaagttcgtttggtgtaggtgctgcttgatttttggcggtgcatgccgggtgttcgacaatgtttctgaggttttgtggcagtgcgaggcattttgggagggacatcatcatgcccaacttgaagtcgtccgtgaccacaacagcgagcgcggtggagtacatggatgaagtattgaaggcgttgtcgccaggtagtaccttcttcccactcatgacactacctcgtagacaacacaagtctagatgttgctggtgcagctgttcaacacgggcaaggtgctgttttccaatgtggtcgtcgacggcggcatgttcgtcttggccctcctcacctaccgcagcttcttcgcggcgccatcattctccctgtccgtctgattttctatcaggttgctcgatcgtcgtcaatataatccgtgtcaacaaattttaatcttggttcataagtaaagaacagaaaaggaaaacctagatgtctataattatacgtacatcaaatctaatgattttaggtacatattttctgtttgccattgcaaaatctaatcacgtgaattttatagttccaatcggggctatgtctatgtactcttatttttgtccagaacccttatgtaaggggaagtggaaagaaatggattggcacactgctggatggatcttcctcaatacgtttatcgagtaaataagcttgcattgttttggataattacatcatgtaaccgattttgacatttttttattaatcaccggcaacttacccaatttgctgtaataataaaataaaaggctacactatactacacactttcttgccatacattaaatctgacggtcattttttttattcctgacgacgcccgcagccgccgccgccgacgacggaggagcagcacctctcgtctgtccaccgctgaccgctcgtttgtcagcctagcaccggggtgcatgaacgcccagtatatgctacagcaccgccgcccctggccctgccgcctgcgccggtcgttgccctgtgcactccgcgggcctcgggaatggccaaccaggacatttatcggtttgcccaccctctcctctcttctcttctctcccgcccgctctccctctctcccttctctccggcttccgattgggtattgtttattggcttctggctttaattaattactgtatttgcatgttcaggtatgttgttcatccatctcgtatgatgaagtgttttatgctcttttccaattattgttgcaagtagcaaaattagaacatgtccttatgtttagactatgaaagaaaacacttatttcaatttgtaggtgtatttttctgtttcagttggcatatcatcatgaggatgtgaattccacaggaaggcccatgtgatcttattgctcccttagatcttccacattttttacagtcttattccttgccgaggggagtcctgctccagtagtggtctcagaaggggcaaataccatggatgttggcaggcctgtgcttgtgcagaatgcaccaaggacaagactggatgcagggacatgggggacgatggggattggattggggtactgtattgcagctgcagtagctgaacctgaatgactcgtggttgctgtggagggcgattctggatttggcttcggtgcaatggaggttgaggtgaacaggggcttcaacagtgatgctgttttagcaatggagacgatccattccctgtcagcttcaaaatcaagttacccaatggctgatctcacccaactcttcatgacagctactcaagaagggaaaagatcagaatcgcaaggccagattcttagggtggaatgctatagcttaatgccctaatctttatatgcctcttcttatatctgcacttccatgggcaccgggcgacactaaattcacaagataccccctccacctcaaggtg

SEQ ID NO: 92052 - DNA, 5197 bp, Zea Mays
gtggtgcacggttctgcctttgttccgcgcccctgcgtccggaaatctcgccgcgcccctgcgtccggaaatctcgccgcgcccctacgcaatcacctcctcctctcccctcactacgccgccacctcctcctctccccctcactgcgtcgccctcctctcccactcactgcgtcgtcccctggatcctcgccccagcctctccaaccgcctccgcgctgtcccctggatctcgcgtcgcgcgtctgcagcacgcccgccacacacgccgcgattggagattggtggaaagcggtccgcggcttcaactccgacatctccggcgagctcgagcgcctcgctgcaacgacgggggcgacgctcagatccgacgtgccggacgcggccgccgtggatctgaacgacctcgagtccatggatctgtcggcggacgctgctccgctggagcacatggagccgttcgtgctggcatgcgcgcgggtgctgggcccgacgccgggccggacgcgtggcgtcgccgacggccgggtcgtcttctgggacggcaagcggtgggtcccattcgcgacggcctctccgcgctggacgcaggagctctgcggcgggcccaaggcctcgccgctggagtatctccccacgcccggcgatggcgccctgcacctcacgcccgtgctccgcccccacacccagcaggcaggcatggatctcgcagggcagggatctcgcggatcacgccgtgcggggatctcgcggatcacgccgggcggggatctcggccaagcctgatcagaagtttggggccctatcaaagcgattcgcagaagtggaggctgggggatcgaagcggaggtggtggagatgacggaggcgctgaagtccgtctggaatccggtgacacagaaaaagatcagagtttctccttctacttcgtcgggtgaagtcccggtggtggacaacacctcgacgctgatccctctggaagctgcggcaggcattgctggtgccgatgcaacccacatttggcattcccactccaatcgaagggtttttggtgtcgctgaacaggacactaggcttctgctctgcttactaatccattggtttcaagatgacagaagccgtcatcaaactgaatacttcttctaactgaatacttcttcccagctgacagatcagatcaaacttgacgtgtgttaggtatcagagaaaaaaaccaaggcatggtgcacttctaaagagcacatctgcagctgcccgctcgggctccgtttcgataagactagggacctgtacatcgccgacgcctacttcagcttgctcaaagttggccccgagggcaggctggagagttgctgtgaaaactctcaagtgagggaacatgatcatgtgcacgcaagatcctgatgactgttggcagaatcaagtcatagttaaataaacaggcccccacccgacggcgcgagcgaggcacgcggccctcccggcggggtggacgcggcccctggctgtgaggcgacgatggggctggaggctgcgatggcgctgggcgacccgccggcggactacgcatccatcgcgacggtggggctgttcgtggcattcatgtgcgtctgcatcgtcgtcgggcacctcctcgaggagaaccgctggatgaacgagtccatcaccatgctcttcatcgggctgggaactagagcagtcatcctgttcgcgtcgagcgagaagcattcacgtgtgctggtgttcagtgaggacctcttatttatttacctgctgccgctgatcatattcaatgcagggttccaagtgaagaagaaacagttctttcgaaacttcattactattacactgtttggtgcagttggcaccttgatctcttttactgtaatatcccttggcgctctaggactaatatcaaggcttaatatcggcgcacttgaactgggagactatcttgcacttggggcaatattctcggccacagactcggtttgtaccttgcaggtgttaagccaagatgagacaccattcttgtacagcctcgtgtttggtgaaggtgttgtcaatgacacaacttctgttgtgttgttcaatgcaatccagaactttgatcatggaaatatcagcggtgccaaattactgaacttcattggcagtttcctttatctgttcggctccagcaccattcttggagtagcttctggacttcttagtgcttataccattaagaagttgtactttggcaggcattcaaccgatcatgaagtttccattatgatgctaatggcttatttatcttacatgctagctgaattgctcgatttgagtggcattctcactgtgtttttctgtggtatcgtaatgtcacactatacttggcaaaatgtaacagaaagttcgagggtcacaaccaagcatgcctttgcaacattgtcgtttatcttcgagacttttctgtttctttatgttggtatggatgcattggatatagagaagtggaagattgtcggtcaaacttataggcatactctctccctctttctctctcttcattgctcaactagaagatctttcttctggatctgtattttctatcatgtgcagcccggtaaagtctatcgctttgagcagcaccattttagccttggtgctggtttcaagagctgcttttgttttcccactatcctttctatcaaatttgaccaaaaaactccaaatggaaagatatcttttaggcagcaggtaagtctttaacttagcaacatcttaacttcttatgttctcttgaaacagttgttatattccttacatgatattggtcatttaggttattgtttggtgggcgggtctcatgagaggtgttgtgtctattgtgttggcttacaataaggttaatcttgtgtttggtctatctggtttgagctttggtctggaattatgttactgcttttgtttcctctatccattccaaaacataggacattttttgttgtcgtaagtcaaaaattctctaactttgacagagtttatagaaaaacaaaccaacatcaacagccttcatttcttaatcttatatagaagttgcagtattttagtctaatagatggacatgttttaaattttgaggcattgaaacaatttgcatcatgaaggcgttcgacttaatgtttccaaggttctgtggcagtgcgaggcattttgggaggtggtgagcgcctcgcttggcaccttcattttcgtgatgatgctgtccttcaggctgcagtgccacacaagttcgtttggtgtaggtgctgcttgatttttggcggtgcatgccgggtgttcgacaatgtttctgaggttttgtggcagtgcgaggcattttgggagggacatcatcatgcccaacttgaagtcgtccgtgaccacaacagcgagcgcggtggagtacatggatgaagtattgaaggcgttgtcgccaggtagtaccttcttcccactcatgacactacctcgtagacaacacaagtctagatgttgctggtgcagctgttcaacacgggcaaggtgctgttttccaatgtggtcgtcgacggcggcatgttcgtcttggccctcctcacctaccgcagcttcttcgcggcgccatcattctccctgtccgtctgattttctatcaggttgctcgatcgtcgtcaatataatccgtgtcaacaaattttaatcttggttcataagtaaagaacagaaaaggaaaacctagatgtctataattatacgtacatcaaatctaatgattttaggtacatattttctgtttgccattgcaaaatctaatcacgtgaattttatagttccaatcggggctatgtctatgtactcttatttttgtccagaacccttatgtaaggggaagtggaaagaaatggattggcacactgctggatggatcttcctcaatacgtttatcgagtaaataagcttgcattgttttggataattacatcatgtaaccgattttgacatttttttattaatcaccggcaacttacccaatttgctgtaataataaaataaaaggctacactatactacacactttcttgccatacattaaatctgacggtcattttttttattcctgacgacgcccgcagccgccgccgccgacgacggaggagcagcacctctcgtctgtccaccgctgaccgctcgtttgtcagcctagcaccggggtgcatgaacgcccagtatatgctacagcaccgccgcccctggccctgccgcctgcgccggtcgttgccctgtgcactccgcgggcctcgggaatggccaaccaggacatttatcggtttgcccaccctctcctctcttctcttctctcccgcccgctctccctctctcccttctctccggcttccgattgggtattgtttattggcttctggctttaattaattactgtatttgcatgttcaggtatgttgttcatccatctcgtatgatgaagtgttttatgctcttttccaattattgttgcaagtagcaaaattagaacatgtccttatgtttagactatgaaagaaaacacttatttcaatttgtaggtgtatttttctgtttcagttggcatatcatcatgaggatgtgaattccacaggaaggcccatgtgatcttattgctcccttagatcttccacattttttacagtcttattccttgccgaggggagtcctgctccagtagtggtctcagaaggggcaaataccatggatgttggcaggcctgtgcttgtgcagaatgcaccaaggacaagactggatgcagggacatgggggacgatggggattggattggggtactgtattgcagctgcagtagctgaacctgaatgactcgtggttgctgtggagggcgattctggatttggcttcggtgcaatggaggttgaggggcttcaacagtgatgctgttttagcaatggagacgatccattccctgtcagcttcaaaatcaagttacccaatggctgatctcacccaactcttcatgacagctactcaagaagggaaaagatcagaatcgcaaggccagattcttagggtggaatgctatagcttaatgccctaatctttatatgcctcttcttatatctgcacttccatgggcaccgggcgacactaaattcacaagataccccctccacctcaaggtg

SEQ ID NO: 92053 - DNA, 3172 bp, Zea Mays
gtggtgcacggttctgcctttgttccgcgcccctgcgtccggaaatctcgccgcgcccctgcgtccggaaatctcgccgcgcccctacgcaatcacctcctcctctcccctcactacgccgccacctcctcctctccccctcactgcgtcgccctcctctcccactcactgcgtcgtcccctggatcctcgccccagcctctccaaccgcctccgcgctgtcccctggatctcgcgtcgcgcgtctgcagcacgcccgccacacacgccgcgattggagattggtggaaagcggtccgcggcttcaactccgacatctccggcgagctcgagcgcctcgctgcaacgacgggggcgacgctcagatccgacgtgccggacgcggccgccgtggatctgaacgacctcgagtccatggatctgtcggcggacgctgctccgctggagcacatggagccgttcgtgctggcatgcgcgcgggtgctgggcccgacgccgggccggacgcgtggcgtcgccgacggccgggtcgtcttctgggacggcaagcggtgggtcccattcgcgacggcctctccgcgctggacgcaggagctctgcggcgggcccaaggcctcgccgctggagtatctccccacgcccggcgatggcgccctgcacctcacgcccgtgctccgcccccacacccagcaggcaggcatggatctcgcagggcagggatctcgcggatcacgccgtgcggggatctcgcggatcacgccgggcggggatctcggccaagcctgatcagaagtttggggccctatcaaagcgattcgcagaagtggaggctgggggatcgaagcggaggtggtggagatgacggaggcgctgaagtccgtctggaatccggtgacacagaaaaagatcagagtttctccttctacttcgtcgggtgaagtcccggtggtggacaacacctcgacgctgatccctctggaagctgcggcaggcattgctggtgccgatgcaacccacatttggcattcccactccaatcgaagggtttttggtgtcgctgaacaggacactaggcttctgctctgcttactaatccattggtttcaagatgacagaagccgtcatcaaactgaatacttcttctaactgaatacttcttcccagctgacagatcagatcaaacttgacgtgtgttaggtatcagagaaaaaaaccaaggcatggtgcacttctaaagagcacatctgcagctgcccgctcgggctccgtttcgataagactagggacctgtacatcgccgacgcctacttcagcttgctcaaagttggccccgagggcaggctggagagttgctgtgaaaactctcaagtgagggaacatgatcatgtgcacgcaagatcctgatgactgttggcagaatcaagtcatagttaaataaacaggcccccacccgacggcgcgagcgaggcacgcggccctcccggcggggtggacgcggcccctggctgtgaggcgacgatggggctggaggctgcgatggcgctgggcgacccgccggcggactacgcatccatcgcgacggtggggctgttcgtggcattcatgtgcgtctgcatcgtcgtcgggcacctcctcgaggagaaccgctggatgaacgagtccatcaccatgctcttcatcgggctgggaactagagcagtcatcctgttcgcgtcgagcgagaagcattcacgtgtgctggtgttcagtgaggacctcttatttatttacctgctgccgctgatcatattcaatgcagggttccaagtgaagaagaaacagttctttcgaaacttcattactattacactgtttggtgcagttggcaccttgatctcttttactgtaatatcccttggcgctctaggactaatatcaaggcttaatatcggcgcacttgaactgggagactatcttgcacttggggcaatattctcggccacagactcggtttgtaccttgcaggtgttaagccaagatgagacaccattcttgtacagcctcgtgtttggtgaaggtgttgtcaatgacacaacttctgttgtgttgttcaatgcaatccagaactttgatcatggaaatatcagcggtgccaaattactgaacttcattggcagtttcctttatctgttcggctccagcaccattcttggagtagcttctggacttcttagtgcttataccattaagaagttgtactttggcaggcattcaaccgatcatgaagtttccattatgatgctaatggcttatttatcttacatgctagctgaattgctcgatttgagtggcattctcactgtgtttttctgtggtatcgtaatgtcacactatacttggcaaaatgtaacagaaagttcgagggtcacaaccaagcatgcctttgcaacattgtcgtttatcttcgagacttttctgtttctttatgttggtatggatgcattggatatagagaagtggaagattgtcggtcaaacttatagcccggtaaagtctatcgctttgagcagcaccattttagccttggtgctggtttcaagagctgcttttgttttcccactatcctttctatcaaatttgaccaaaaaactccaaatggaaagatatcttttaggcagcaggttattgtttggtgggcgggtctcatgagaggtgttgtgtctattgtgttggcttacaataaggcgttcgacttaatgtttccaaggttctgtggcagtgcgaggcattttgggaggtgtgcgaggcattttgggagggacatcatcatgcccaacttgaagtcgtccgtgaccacaacagcgagcgcggtggagtacatggatgaagtattgaaggcgttgtcgccagaatgcaccaaggacaagactggatgcagggacatgggggacgatggggattggattgggggcgattctggatttggcttcggtgcaatggaggttgaggtgaacaggggcttcaacagtgatgctgttttagcaatggagacgatccattccctgtcagcttcaaaatcaagttacccaatggctgatctcacccaactcttcatgacagctactcaagaagggaaaagatcagaatcgcaaggccagattcttagggtggaatgctatagcttaatgccctaa

SEQ ID NO: 92054 - DNA, 552 bp, Zea Mays
atgtctatgtactcttatttttgtccagaacccttatgtaaggggaagtggaaagaaatggattggcacactgctggatggatcttcctcaatacgtttatcgaccgccgccgccgacgacggaggagcagcacctctcgtctgtccaccgctgaccgctcgtttgtcagcctagcaccggggtgcatgaacgcccagtatatgctacagcaccgccgcccctggccctgccgcctgcgccggtcgttgccctgtgcactccgcgggcctcgggaatggccaaccaggacatttatcgtcttattccttgccgaggggagtcctgctccagtagtggtctcagaaggggcaaataccatggatgttggcaggcctgtgcttgtgcagaatgcaccaaggacaagactggatgcagggacatgggggacgatggggattggattggggtactgtattgcagctgcagtagctgaacctgaatgactcgtggttgctgtggagggcgattctggatttggcttcggtgcaatggaggttgaggtacgaatacaa

SEQ ID NO: 92055 - DNA, 2074 bp, Zea Mays
gtggtgcacggttctgcctttgttccgcgcccctgcgtccggaaatctcgccgcgcccctgcgtccggaaatctcgccgcgcccctacgcaatcacctcctcctctcccctcactacgccgccacctcctcctctccccctcactgcgtcgccctcctctcccactcactgcgtcgtcccctggatcctcgccccagcctctccaaccgcctccgcgctgtcccctggatctcgcgtcgcgcgtctgcagcacgcccgccacacacgccgcgattggagattggtggaaagcggtccgcggcttcaactccgacatctccggcgagctcgagcgcctcgctgcaacgacgggggcgacgctcagatccgacgtgccggacgcggccgccgtggatctgaacgacctcgagtccatggatctgtcggcggacgctgctccgctggagcacatggagccgttcgtgctggcatgcgcgcgggtgctgggcccgacgccgggccggacgcgtggcgtcgccgacggccgggtcgtcttctgggacggcaagcggtgggtcccattcgcgacggcctctccgcgctggacgcaggagctctgcggcgggcccaaggcctcgccgctggagtatctccccacgcccggcgatggcgccctgcacctcacgcccgtgctccgcccccacacccagcaggcaggcatggatctcgcagggcagggatctcgcggatcacgccgtgcggggatctcgcggatcacgccgggcggggatctcggccaagcctgatcagaagtttggggccctatcaaagcgattcgcagaagtggaggctgggggatcgaagcggaggtggtggagatgacggaggcgctgaagtccgtctggaatccggtgacacagaaaaagatcagagtttctccttctacttcgtcgggtgaagtcccggtggtggacaacacctcgacgctgatccctctggaagctgcggcaggcattgctggtgccgatgcaacccacatttggcattcccactccaatcgaagggtttttggtgtcgctgaacaggacactaggcttctgctctgcttactaatccattggtttcaagatgacagaagccgtcatcaaactgaatacttcttctaactgaatacttcttcccagctgacagatcagatcaaacttgacgtgtgttaggtatcagagaaaaaaaccaaggcatggtgcacttctaaagagcacatctgcagctgcccgctcgggctccgtttcgataagactagggacctgtacatcgccgacgcctacttcagcttgctcaaagttggccccgagggcaggctggagagttgctgtgaaaactctcaagtgagggaacatgatcatgtgcacgcaagatcctgatgactgttggcagaatcaagtcatagttaaataaacaggcccccacccgacggcgcgagcgaggcacgcggccctcccggcggggtggacgcggcccctggctgtgaggcgacgatggggctggaggctgcgatggcgctgggcgacccgccggcggactacgcatccatcgcgacggtggggctgttcgtggcattcatgtgcgtctgcatcgtcgtcgggcacctcctcgaggagaaccgctggatgaacgagtccatcaccatgctcttcatcggctttgggaccttgatgttgcaatgctgtatgttggggattgcaggggctgggaactagagcagtcatcctgttcgcgtcgagcgagaagcattcacgtgtgctggtgttcagtgaggacctcttatttatttacctgctgccgctgatcatattcaatgcagggaggcaggagcatccttaattgaacggcagtgatcctgcagtttatgttggaaagaaattaacataggagcattgcacgtatttggttattgttttagaacctatttctataggttttctctttggagctttctgagctaaagtccaaaaaggattccatcttctgaacacttcagtagcaaagcaactatgttgtgctattaaatataaatctgcaattattccaccaa

SEQ ID NO: 92056 - DNA, 3440 bp, Zea Mays
atgagcccggcacatttaagcaattacgggccggaccgtgggccgaaggctagactcatggatcggtccgatacaacccaaaattcaaacaatacggatcttttcagacttgggccggaccggacgcccaaatatacacctatatcgacgaccgatcaacccaccaccgcaccgcaccggcagcacgaccacccggttgcctccggaccccgggcgaaacggtctcgtactcgtcctggtcgtccatcggagtatcggaccatcgccctacggccctaccctttcccagccaagcacactgcacatcgccacccaccagcaccccagtgtatacgtcggctgtgtcgcatgcctcgctcactcgtcgtcggcgacctcgccgtaccggagatggcgcatccgtacatgaagaaggacgacgacgacgaagatgtcgagtattcaccattctttgggatcgagaaggggtctgttctgcaggaggcacgagctttccatgatccacagcttgatgtgagacgatgttcgcaagtcatcatcaagctattatatttacttaatcaaggagagacattcaccaaggttgaggccacggaagtcttctttgcagtaacaaagttattccagtctagtgatgctggtcttaggaggctagtgtacttaatgatcaaagaactttctccatcgtcagatgaggtcatcatagtcacaagctcattgatgaaggacatgaatagcaagacagatatgtaccgtgccaatgctattagagttctttgtagaataattgatggtaccctactaactcaaattgagagatatttgaagcaagctattgttgacaagaacccagtggttgctagtgcttctcttgttagtggcatccacctggcccaggcaaacccagaaattgtgaaaagatggagcaacgaagttcaggaagctgtgcaatcaagagctccacttgtccagtttcatggccttgctcttcttcaccagattagacagaatgatcgtttagctgtaagcaaactagtttcaagtttgacaaggggatctgtccgttctcctcttgcacaatgtcttctgattcgttacacaagccaggttatgtgtgagtcaagcatgaacactcaaaatggtgaccgtccattttttgattttctggaatcatccctcagacataaagcagaaatggtggctttggaagctgcacggaagataacagagatggatgttacaagccgtgaattggcaccagcaattactttgttacagttatacttgagttcatccaagcctgtgcttcgatttgctgctgtccggactctcaataaggttgctaggacacgacctctggcggtgacaaactgcaatgtggacttggagagtttgttgtcagaccagaacaggagtatagcgaccctggcaattactactcttcttaaaactggcaatgaatcaagtgtggatcgtctcattaaacaaattacccttttcatgtctgacatagcagatgaattcaagatagttgttgttgaagctatacggtctttgtgcctgaagttcccactaaaatatcgctcaatgttgaattttttgagcaacagcttgagggaagaagggggctttgagtataaaaaagccatagtggattccatagttactttggtcagtgaaataccagatgccaaagaaattggcctgcttcatctttgtgaattcatcgaagactgtgaattcacatatctttctagtcagattttgcactttttgggaaatgaaggaccaaggacatcagatccaagcaggtacattcgctacatatacaaccgtgtgatattggaaaatgccactgttcgtgctagtgctgtcagcacgctggcaaagtttggtgccctggttgatacgctcaagcctcagatctttgttctcttgcaacgatgcctgtttgatactgaagatgaggttcgtgatcgtgctacactctatctccaaacccttagcggtgaagttgccattggtaatgatgagaaggatgtgaaagacttcctatttggatcttttgatgtgccattagccaacctggaagcaagcctaagaacttatgaaccttcagaggagccatttgacatatctttggtgtcaagagaagtcaggtcgctaccacctaaagagaaggcagcccctggcaagaggccacctgctggtgctgccgccgccgccgcccctgtttcaactgttgatgcttatcagaaaatgctttcgttcattcccgagttctctgggtttggaaggctcttcaagtcctctgaacccatggagctgacagaggcagaaactgaatatgctgttagtgtggttaaacacatttatgacggctacattgtattgcagtacaattgtgcaaacactatagaagaacaactgctagaagatgtcactgtttgcgttgatgcctcagatgctgaggagttttcagagatttgttcaaagcctcttgcaagcttgccgtataattcacctgggcaagtttttgttgcttttgaaaagccagagcgtgtacctgttgttgggaagtttttaaatttgttgaagtttacagttaaagaggttgacacaactacgggggaagctgatgaggatggtgtggaggatgaataccagttagaggactttgaaattgtttcagctgattatatgctgagggttgttgtctccaacttcaggaacgcctgggaaaatatggacccagatagtgagcgtgtcgatgagtatggactcggggttagagaaagtttggctgaggctgtcaatgctgtcattaatatccttggaatgcagccgtgtgagggcactgaggttgtaccgaaaaatgcaagatcgcacacctgccttctatctggtgtatttattggcaacatgaaggtcctagttaggttgtcatttggactgagcgggcccaacgaagtggcaatgaaattagctgtgagatcagatgaccctgaagtcagtgataagattcatgagattgtcgccagcggataaagtgcaagacatacaaatcttctgccaaaagtgtagagcgggtagatagcctttatacttcgatgcttacagccttgtctcttcgtggacatctcagattatcagttagcatattctataaatttttttgctgtacaaataacatcaggtattatctgatgtttattcaagtactgatttcatggaatattgggaattggaatgtactgtagcctccgtggtttccttttgatttgtgctgaactgtatcccacctttcttgagaggaaaactcgtggaatctatctaccttatttccgatccgttacgataccttattttcgacccgaccttatttttgacccgttacgataccttatttccgtcccgttacgaccggccgaaatagaatg

SEQ ID NO: 92057 - DNA, 5122 bp, Zea Mays
atgagcccggcacatttaagcaattacgggccggaccgtgggccgaaggctagactcatggatcggtccgatacaacccaaaattcaaacaatacggatcttttcagacttgggccggaccggacgcccaaatatacacctatatcgacgaccgatcaacccaccaccgcaccgcaccggcagcacgaccacccggttgcctccggaccccgggcgaaacggtctcgtactcgtcctggtcgtccatcggagtatcggaccatcgccctacggccctaccctttcccagccaagcacactgcacatcgccacccaccagcaccccagtgtatacgtcggctgtgtcgcatgcctcgctcactcgtcgtcggcgacctcgccgtaccggagatggcgcatccgtacatgaagaaggacgacgacgacgaatcgagtattcaccattctttgggatcgagaaggggtctgttctgcaggaggcacgagctttccatgatccacagcttgatgtgagacgatgttcgcaagtcatcatcaagctattatatttacttaatcaaggagagacattcaccaaggttgaggccacggaagtcttctttgcagtaacaaagttattccagtctagtgatgctggtcttaggaggctagtgtacttaatgatcaaagaactttctccatcgtcagatgaggttaaataaatgatgttttcagatgaatacaatgtttttgatgccttctaatctaattaaaagatggttgagctttatgattgtaataggtcatcatagtcacaagctcattgatgaaggacatgaatagcaagacagatatgtaccgtgccaatgctattagagttctttgtagaataattgatggtaccctactaactcaaattgagagatatttgaagcaagctattgttgacaagaacccagtggttgctagtgcttctcttgttagtggcatccacctggcccaggcaaacccagaaattgtgaaaagatggagcaacgaagttcaggaagctgtgcaatcaagagctccacttgtccagtttcatggccttgctcttcttcaccaggtatacttgttccattgagccagccattggtttcctagatgctaaacccaccagacggtcagtcaccctttgattagcgtttagttggtgtggacaataaattatatggtttaaacagtttgcactgtagcagtaaatatgcatacaaacactatagttacatactaaatttttgaatgttactcgagacatgcacacagttgcacaatatatcatagacaattagacagacataatgacatagatagtagacttgcagttcttggttctcgcatagttaaatgataagctgttattacgtaataacattacatttgtgtcggggatcagatacccgggccccagggggccacaagtcagaagaggagtagggagggacctgcctgggcgggaccgccttcggaagacccccgcgccctgagcccaggggtcgggcgaggtgaagcacggtcggagggccagaacgaatcgacagggaaccactcaagtggattccgcgtccggtcataagactgctctcgccatcaatgctccgcacaccacattaattgtgcctggcactgagccgcggcgttgagccgatccgcctaccactcatgacctacgagtccgaggcctgagccccactcataacctatgggccctaggcctgagcccccgactccctacggagcacacaagacgatggaagaaagctagaaggacagactaaaggttcggcgcgagaagaggcgaacaggaggagtaatgatggcgttcagactcccgtcgcaagcacgcttccccaacatatttaagatgagcacgagtcatatgaggacaaatatcaacgaggattttaccaagagaaaaccattccattttaccagcgtagcagttccttccgattgaagatatctgtaaccgcccctgcggcccccttcttgatctataaaaggaaggtcggcccgacgaagaagagagaccgaatccgagaagcacacttgagacatagacccttcagcacacacacatagagacttggcaccccttcctctctagcccacttgtaacccctactgtgagcaacaaggtgtcggtagcgcgagccatcgaagacgggaagtagggtcgttttgttcaaaccagtataaatcttgcgtccattgagcacatcatccggagccaaaacgtgcatacacaaatttactcgttggtgctggttcggaacactgacaatcattgttattaaaacgtcgcttaaacgtcgtttaaacgacaaaatgtgattaagagttgaaacatccgaacgttttaccaaaatggagtagaacgtctgtttcacgcatttaaacgttggttaaatgtcctctgagcgttttaaggcgttttacttgcgtttaggacgttctactcgtcgtgggcttttcctttcctgggccaaaagatggaaaaaccctaagttcctttggttccattctactgtatatgtaaaattatatgatagtttcagtaaacggtcaggttttatagtgtgcatttggataatgtgtactatgctctagtttctcttcgctttttatacttaatcttcatttgatttctccccaacttgcagattagacagaatgatcgtttagctgtaagcaaactagtttcaagtttgacaaggggatctgtccgttctcctcttgcacaatgtcttctgattcgttacacaagccaggttatgtgtgagtcaagcatgaacactcaaaatggtgaccgtccattttttgattttctggaatcatccctcagacataaagcagaaatggtggctttggaagctgcacggaagataacagagatggatgttacaagccgtgaattggcaccagcaattactttgttacagttatacttgagttcatccaagcctgtgcttcgatttgctgctgtccggactctcaataaggttgctaggacacgacctctggcggtgacaaactgcaatgtggacttggagagtttgttgtcagaccagaacaggagtatagcgaccctggcaattactactcttcttaaaactggcaatgaatcaagtgtggatcgtctcattaaacaaattacccttttcatgtctgacatagcagatgaattcaagatagttgttgttgaagctatacggtctttgtgcctgaagttcccactaaaatatcgctcaatgttgaattttttgagcaacagcttgagggaagaagggggctttgagtataaaaaagccatagtggattccatagttactttggtcagtgaaataccagatgccaaagaaattggcctgcttcatctttgtgaattcatcgaagactgtgaattcacatatctttctagtcagattttgcactttttgggaaatgaaggaccaaggacatcagatccaagcaggtacattcgctacatatacaaccgtgtgatattggaaaatgccactgttcgtgctagtgctgtcagcacgctggcaaagtttggtgccctggttgatacgctcaagcctcagatctttgttctcttgcaacgatgcctgtttgatactgaagatgaggttcgtgatcgtgctacactctatctccaaacccttagcggtgaagttgccattggtaatgatgagaaggatgtgaaagacttcctatttggatcttttgatgtgccattagccaacctggaagcaagcctaagaacttatgaaccttcagaggagccatttgacatatctttggtgtcaagagaagtcaggtcgctaccacctaaagagaaggcagcccctggcaagaggccacctgctggtgctgccgccgccgccgcccctgtttcaactgttgatgcttatcagaaaatgctttcgttcattcccgagttctctgggtttggaaggctcttcaagtcctctgaacccatggagctgacagaggcagaaactgaatatgctgttagtgtggttaaacacatttatgacggctacattgtattgcagtacaattgtgcaaacactatagaagaacaactgctagaagatgtcactgtttgcgttgatgcctcagatgctgaggagttttcagagatttgttcaaagcctcttgcaagcttgccgtataattcacctgggcaagtttttgttgcttttgaaaagccagagcgtgtacctgttgttgggaagtttttaaatttgttgaagtttacagttaaagaggttgacacaactacgggggaagctgatgaggatggtgtggaggatgaataccagttagaggactttgaaattgtttcagctgattatatgctgagggttgttgtctccaacttcaggaacgcctgggaaaatatggacccagatagtgagcgtgtcgatgagtatggactcggggttagagaaagtttggctgaggctgtcaatgctgtcattaatatccttggaatgcagccgtgtgagggcactgaggttgtaccgaaaaatgcaagatcgcacacctgccttctatctggtgtatttattggcaacatgaaggtcctagttaggttgtcatttggactgagcgggcccaacgaagtggcaatgaaattagctgtgagatcagatgaccctgaagtcagtgataagattcatgagattgtcgccagcggataaagtgcaagacatacaaatcttctgccaaaagtgtagagcgggtagatagcctttatacttcgatgcttacagccttgtctcttcgtggacatctcagattatcagttagcatattctataaatttttttgctgtacaaataacatcaggtattatctgatgtttattcaagtactgatttcatggaatattgggaattggaatgtactgtagcctccgtggtttccttttgatttgtgctgaactgtatcccacctttcttgagaggaaaactcgtggaatctatctaccttatttccgatccgttacgataccttattttcgacccgaccttatttttgacccgttacgataccttatttccgtcccgttacgaccggccgaaatagaatg

SEQ ID NO: 92058 - DNA, 410 bp, Zea Mays
tttgatttctctatcaataatttcctcgcaacatgatgcaaatctcaaagttggcctaccaacccgttcctgtactacaagctaccagcctactgcatcattcatctgtacaatattctttcaggaccagaccatatatgcaaaaccaaaaagacatgccaaattacaagaattcatgctaacaagaaaaggagcgatcagaatccacaaaatcataccatagcatttgtatttattatacagtggtttccaagcaacaaattgaattattgaatgaaccagtaaaagagagtaattctgcgcaaataaaatccatggatgctgctacaaagggggaacaaaaatctctacacagtaacttcatcctcatttgatcttgctctatttcagtgcatcttgggaacacaatc

SEQ ID NO: 92059 - DNA, 2147 bp, Zea Mays
gacttggttcctcgcgcctctgatctcggctctggcggcatttgcattgcaggggttcgtcacgaggaggaggaggaggaggaggtgcgtcgttccaatcgaaccccggcgcacaatctagaggccggggtggatcatcatcctcaccaagacagaactccatccccgttaaggtgttaaacattaatcatggccacaccgccagacggggcgcccgctggacctgatgacacgtcgccgccgccttcttccaactcgtcgacgccgcctccttccgactcatcgacgccgccacccaagtcctccggctcgggctcgccgtcgccatcgccacccgcaccgtcgttgtcgccgccaccaccggcgtcgccgcaggatagcacggcgccagcggccagaggctcgccggccgcgccgtcgagggactccccgtcaccaccggctccaaagcgcagcgacagtgactccgataatagtggcagcagcaagagcggaagcggaagcggaagcagaagcagaagcagcgggtcgacgcaggtggatgtcatcctggccggcgtggtgattggggtcctggcatttagcctgctgatgtgcatcgccgcgtgcgtgtgctgcgccaagaagaagaggaggaagaagcccccgcacatgaacatgccgtactacaccgacgagcacgggaacgtcttctacgcgaacagcatgcccaagtggcagagcagcgcgatggaccacggctggcacgcgccgtactcgcccgcaagcggggacatgagcggctcgcacgggccggggctgggccagatgccgccctcgccgggcatgccgtcgctgggcttctccaagagctcgttctcgtacgaggagctagccgcggcgacgggcggcttctcatcgacgaacctgctggggcagggcgggttcgggtacgtgtacaagggcgtgctcgcgggcagcggcaaggaggtggccgtgaagcagctcaaggccgggagcgggcagggcgagcgcgagttccaggccgaggtggagatcatcagccgagtccaccaccgccacctcgtctccctcgtaggctactgtatcgccggctcctcccagcgcctgcttgtctacgagttcgtgcccaacaacaccctcgagcaccacctccacgggaagggtgtgccggtgatggcctggccggcgaggcttgccatcgccctcggctccgccaagggcttggcttacctgcacgaagattgccaccccaggatcatccaccgtgacatcaaggcagccaacatccttctggacgagaatttcgaggctaaggtcgcggatttcggacttgccaagctgaccacagacaccaacacgcacgtctccacgcgtgtcatgggaactttcgggtatttggccccggagtacgcgtcgagcggcaagctcaccgacaagtcggacgtgttctccttcggcgtcatgctcctggagctcattaccggcaggagaccggttgatcccacgaactacatggaggacagcctggtcgactgggccaggcccctcttggcgcgcgcgctgtccgaagacaacttcgacgagctgctcgacccgcggctggagaacagggtcgaccggctggagctggagcggatgtgctcctctgccgcggcggccgtccgccactcagccaagcggcggcccaagatgaaacagatcgtccgtgctctggaaggggacgcgtcgctggacgacctgaacgagggggtgaagccagggcagagcatgatgttcagctccggatcggagtacgacggggccaactacgcggccaacatcagcaagttcaggaaggtggccttcgagagcagcgagttcagcaacgactacagcgggacaagcgagtacggcgccgactccggggaagcggcgacccagcggcagcaacatcgctgacctcctcgtccgagatgcgtgtgtggtgtacaatatttataccaaggggtcgatgtcgactgtcggatactatcagagatacccaaccctcgatcgtgacagctttagtacatgtaatgatgctcataaaatgtcatgtaacgtacgtatttgtgtgtgacatgttgctgcttgcttgactggcgaatttcgctgcttagttgtgc

SEQ ID NO: 92060 - DNA, 531 bp, Zea Mays
atggctcctctcccgtgctccatcccgccatggtgcatctcgctcctctcctgtgctccatcccctgcagacgccgagccccctgcgcgacaaatcgctgatatgttctcggacgcgaaagctcgaccaaccaatcaagcacagctaattgttccacacttaatcattaagacagtcacaatttgcttcacaaatattgcaaaaaaggaacaaatcatccttgaaactgcaaaacagcaagctatgccatttatctcagctcggttcacaaatgaaacaatcaccgatctatttgttgttaccgtagtcatgaggatccccagcgacatcgtgcttgacctcttcgtgcaccacgttattgctgacggcctgggcattcctcgacacgccactttacagctatgcgtgaaacaagggctgagtgggcaaggcgttgtgctcagcggtaaactccagctgtccagcaagaactctatgagcacagcgcagcaggtgtatggtaaagaacgcactggatctgaatccccttag

SEQ ID NO: 92061 - DNA, 4033 bp, Zea Mays
agagaccgccaccgcgctgttccgagcccgctaaccgcgacggttaaaaacgcgtacggcatcgtcgcgttccctcctcccagtccccccatctctgtccctgtcccccctcctcctcgccttttaccccgcatcgcctcgccgcctcctgcccgtctcgctgaaaccctcttggtcaccgccgtggtcgatccgacccggcagtagccgcagcatcctacgagggccgttggcggggtcgtcgtcgtcgtcgtgttcggcggcgggaattggatgcgccacggagcgggcgaggggacctagttgagttgaatacggcagcgacgggaggacgtgatgccgggggtggcgtcagcagcgggatcggggatctggtcgcgccggcgggacgagatcacgttcgatcgccttcagaagttctgggatgacttgcctcctcaagcacggcaggaactcctcaaattggataagcaaactctcattgaacaagcacgcaagaatttctactgctcaaagtgcaatgggttgcttctggaaagttttgcaaaaattgttatatatgggaagtcattgcagcaagaagcttcagatatttgtcgcctgaggacagctattgaatcaagagttacgcaaggagagcaagatggggctcaggacccatcaattcatccctggggaggcctttcaaccacaaaagatggcttccttacacttcttgactgctttataaaagcagaatcattatgtgtgcttcagaatgtatttgacaatgcacgggcaagagaaagggaacgggaaatgctttatcctgatgcctgtggtgcaggtggcagaggatggatcagccaagggatggctaactataggggtcatggaataagagaaatgtgtgctctacacactgcccacctttcatgtgatacactcgtggatttctggtcagcgcttggtgaagaaactaggtcatctcttctgcggatgaaggaggaggatttcattgaaaaacttatgtacaggtttgatagcaagagattttgccgagagtgtcgaaggaacgttatccgcgaattcaaggagctgaaggaactaaagcgcatgcgaagggaacctcactgcaccagttggttttgtgttgcagatactgcgtttcagtgtgaggtgtttgaggatgctgtcatagttgattggcgccagtgtttatcagagccagatgaatcttatgaccactttgaatgggctattggaacagatgaaggagaatccgatatttttggctttgaaaatgttggaatgaatgcacaagtccacagaaatggaatcgatcttgatcagtttgaggactacttcataacactgcgagcttggaggcttgatggccagttcacagagctgtgtgtaaaagcacatgcattgaagggtcaatcatgtgtccaccacaggctagtggttggtgatggctttgtgactatgacaaagggtgaaagtattagaagtttctttgagcatgctgaagaggccgaggaagaggatgaagatgatgacatggacagggatggaaatgattttgatggtgatggtgcccatccacagaagcatgccaagagccctgaactggcaagagaatttcttttggatgctgctgctgtgatattcaaagaacaggttgagaaggccttcagggaaggtacggcacagcaaaatgcacatagtatttttgtgtcccttgctttaaaacttttggaacagcgagttcatgtcgcatgcaaagaaattattacgttggaaaaacagaacaaacttcttgaggaagaggagaaagaaaagcgtgaagaacaagagcgcaggttgaagaggagaacaagagagagagaaaagaagaacaggagaaaagaaaggctgaaagaaaaggaaaataataaagggaaaaaactagttgaatcaaagtcacgaaatgatattctatcttcagctccaagcaactccacaacatctatcaatgattattcgacaaatactctggactcaagagattcagttaaggaagatgaagatagtgctgaagttgtgaatctgtgctctcctgacagctgtatgaatcaatcttcatgtacaaaaattaatggagaaaacagtgtccacttcaatgcagtaacagaattttctccaatggacagtagtgacctttgtacatcagatcaatccaagtcttcgagacggggtccaaggtcaagggaggattttcctcaagatcagtcctgttggtatgatgactgcggagatgagtctggaagaattggtgaattacaatggaagtcaagggaaaggacaagaagtattaatagaagtcgcaacgcagcatccacctcaaacaacaggacaagagagaggcaatcatacaattcttgcagctgcggccatctggaagactatggagtcatggacagctgtttcttgccaacagctagatctggcaaagagacgaagatagcaagaaaatcaggagttgagaaacctagggtgcagtaccacagatgctatacattggatagctttatagtgtcaaaaggaaaccgtgctggttctacacagaaaaatgctatcccaaagcaaatatgggagcctatggatgctcgaaggaagactaaattacacaatacagttcatgattcaggttcagttaacgatgttgattcactgaaacatgtggtttttgataacagtggatctcaaaattttggagtaggatgtgaatcacagcctcaggcttctgaaagttccagggatgaatgtaattcagatcaaccatgtgcaaatggtgggagaaatcaaactatttcatgtgctagtagtactcttatggtgaaccaacaaaactgttgcgcaggaaatgatgaaggctccaggcatgatgaagagctgatgatgaactctgctggctctgatagctcctcgtcatgcatgagcgagggagatagggaaagcagctccagcagtacaacctcttcaagcgctcaaaatccggaatcatcttctgagtctgaggaatcacccgagagaataaatagcacagtaggtacacaatcatcaagagctgctgcttcacggtctttgcttgaagcatgtgcaggtaatggtttcagagaataccaacccaaggcaaccggcctagctcacaatgacatgtttgggtacaatgtatcccctgtccaggaccagctgctgcattaccaaagcatgtatccacctcaacatcggccaataacaatggggtttcatgacggttcttgggctgcaccaacgaatggaaactttcagtatgctcgaccatcccacttatattctagtccactcgtattcggaatacctgggaaccattttattgattatccttacatggctcccgccttcagccatatacctccagagcctattcacaaggccgcatccagctttagagccatgcctctgtcactgccttttcaaaacggacatcggcaggctgctagtcttactcagagagacatgaatctagaaaggcgccctgcaaagttgactaagccgacaggcaaggatcccccagaaaacaagaacaagtcgggcctaaaggatctcccagaagacaagagcaaatcatgggatgcggatgcatccttctcgttgttccaattcaacttgccaatagcttcgcctgtaacaccatcatcaaaagataagagcggagagctggccgcaaggacgccactggctcaggtgcaagctcagctttgctcgagggaacaagcagatgtcaaggagtatagcctgttctcctcgaaagataatggcatattttcgtttatgtagataaaagaaaaactgtgacaaacctgctacccttcgtttctggtgtctcttgctgcacttcgtgaatgctttgtgttctccggagcaaaataaaggatgttgccattttcttcatgctgtctgtatcttcgttttacatttgtgtctgttaccgtgtgtgctaaaagctagtaatctgcaatgctgctga

SEQ ID NO: 92062 - DNA, 1428 bp, Zea Mays
ctgctctacttctccgttattctcgttcttattctctgtggagtgatcggagttgctaacaccctcacatggacgcgccccctgctcgtgatctccccaggaccgagcgcccctccccaactctcctacaccctcaagtcgagtgggctctctccatgggtgaagcttaggcgccgatgctctccttctctggttcgacatgtcagcttggtgccctctctcccatgcccgatcctgaggtccctgcctcgacctccacatcggcctccatggcgctcttctccctgggcacccagacgtgtgcgcccccttccctgctcttgccgcggcgagctccttccctccaagcaccagccctggacgccaggccgcaggccatagttcccgtgcacttgtccgcagccagaaaaactccccgtgggctctggaagtgcccagctcgcgccggagcgtggcgaggcttgactaacgcccagccatggtggctgtaggctgagcagacccctctgctccagccatggcgcggacctcctctggtccgagctcgagcagtgaactctccgtggcgccttcccctgcaatttttccccttcctcccctctacttctgtggcgctcagcactcctgccacaggtccggctgcagcaagcgctcttttttcccatggccgagcaggcgctcccaacagccgcgatgcctggtttctctccctagccactacgccgtcatgctccctctgcccctgctttttttcaggacgccgagcaccctccccacagatcgctttttccagctgcgccggacactctgtgatttggccgcgtcgcgtccaggacttccatggctgcctccctggcgtacctcgcgcagcagccgcgacgccagttcgcgcagccacgtgaatctcctttgcgtcacgccctcggcgtgctcgacataatgccgcagcaagcctgcagcagcagccccggatcccctccgcatcgagagcagccgcgtcgtcgatccgtgcaaccccgacgtctccgtgtcttgcttcgccgtcaatctgcgcagtccccgtcgcgatgccgtcgaaacccgcgccccttgtcattgtcgcgcttcgcgcgtcgtttctcgacagaaagccaaaccaacatgcacgcatgcacaacaccaatcggatttcggccaggttgttcgatttagaaaaattgtgttttttgttttatttacgattcaatcgatggcgtgaatatgtgtgtgaaaatataattgtatgaatgaacgcgtgtagagaagaaactgaagtagaaaagaactcggacatttttatattttgataggaaaattatgcgatgcgttgtttgatgtgaaaaactaagttacaaaatgtggattatgttttgggaaatgcatcgatatgtgtttatgtgaaaagtataa

SEQ ID NO: 92063 - DNA, 100 bp, Zea Mays
ctctaaatcctaacacatattttgcaggatccatgagccatcatcagaagaacacaaaccacgtgcagacaataaataaagtattaacacacccaaatta

SEQ ID NO: 92064 - DNA, 901 bp, Zea Mays
tttctctattttctctttgttgataatgaaaaaccacctactttctcttagctactataaatggattatttttaaccttgaagtggtgctaccgttacaaataaaagttacttgagccaaatgcttgctctggaatcacttcggactatcacctagagcagttgccacatgcagcaccaagattacttgcacgttacaaattggctaggactgacagacaaccttgttattgctatcctccatgtagtatcgctggtaggtgaatcagctcctccagaaatgcttcagaagttgacatatctggctatcagacaccatcctcagattaagcgtgttgacaccgttcgagcatacacctttggggtgctttactttgttgaggttgacattgagcttccagaggacttgccacttaaggaggcacacgccattggagaatctctccaaatcaagattgaggagctacctgaagttgagcgagcattcgttcacctagatttcgaatgtgaccataagccggagcattcaattctcaacaagcttcccagcagccagccttgatccgaacgaatcctgtgtggtagattgtcgtgcagaatctgctgcagttcttgcattggcgtcttgtgctgtatgacaaaactaagagttcaattagttttgtggcggtgagtttaagatcaggcgcatctaagactacgagagatgaaggtgccgaatgcagagatttctcgagtgtggaaccctttgtggttctgttggtatggtcttcgttttgagcgaaattaagcattttgctgttggcatcatggcatgtgattggcggcgatctagctgtgtgctatcgactacggtgatgtttagacatggtttcgagaaagagagtagatccttgatttct

SEQ ID NO: 92065 - DNA, 1627 bp, Zea Mays
aggatttcccttacttttatgattgaacagctcgtgacttcactatcacttggtgcttcttgtgtgcatgtttctttgtaaaatagatagcttatattctctacatatttggtggaggaattaccttttcggcgtgtttgtgactttgttctctggtcatggctctggccttctaggcatgcaaacgagttttacagataccacgtagcaggcagtgtcctggcctcctggcctcctggccctggggcacctttctctccctgaaactaaagggagagagagtactatgagaaacaatttgccacattgaggtcctttgaggaagttgactcactagaagaatccaatgaaatcaacgaggatgaggagcttgcggagcaaatccagagtgaatttgctatgaagatatcaaattatgcaaacattgttctcttagcgttgaaggtatacgctacaataaaaagtggatcaattgctatagctgcctcaacactggattcactgcttgatctcatggctggtggtatcctttggttcacacatctgtcaatgaagagcatcaatgtctacaagtaccccattggcaaactgagggtacagcctgtaggcattatcatcttcgctgctgtcatggccactttaggcttccaagtatttattcaggctgttgaaaagctggtagtgaatgaggctccagataaactgaaccaagtgcaattattgtggctatattcaatcatgatctttgcaacaatagtgaaattaggtctgtggctctactgccgaacgtctggtaacaagattgtccgtgcttatgctaaggatcactatttcgatgttgtcacaaatgttgtgggtttggctgctgctgtccttggtgatagattctactggtggattgacccaattggtgcaattgttcttgcagtgtacacgatttcaaactggtctggaacagtgtgggaaaatgcagtatcgctggtaggtgaatcagctcctccagaaatgcttcagaagttgacatatctggctatcagacaccatcctcagattaagcgtgttgacaccgttcgagcatacacctttggggtgctttactttgttgaggttgacattgagcttccagaggacttgccacttaaggaggcacacgccattggagaatctctccaaatcaagattgaggagctacctgaagttgagcgagcattcgttcacctagatttcgaatgtgaccataagccggagcattcaattctcaacaagcttcccagcagccagccttgatccgaacgaatcctgtgtggtagattgtcgtgcagaatctgctgcagttcttgcattggcgtcttgtgctgtatgacaaaactaagagttcaattagttttgtggcggtgagtttaagatcaggcgcatctaagactacgagagatgaaggtgccgaatgcagagatttctcgagtgtggaaccctttgtggttctgttggtatggtcttcgttttgagcgaaattaagcattttgctgttggcatcatggcatgtgattggcggcgatctagctgtgtgctatcgactacggtgatgtttagacatggtttcgagaaagagagtagatccttgatttct

SEQ ID NO: 92066 - DNA, 1718 bp, Zea Mays
cggggcgtccttgccatttcccaccctacttgagctaggcggcaggacggacgcggacgggcgggggaggagaacacacgaccgcgacggaatcgcgaggggtaggcgaggcgaggcgaggcggcgaccgagggaggagcagtcgagcagagcgtagggggcgcgagggatggacgcgaacgggtgcggggagaatgacgacgcgcgggcgccgctcctggccgggcctgggcggcggcgcaactccgtcgcgtccatgcgcggggagttcgtgtcgcggttgcccaagaaggtgctcgacgccgtcgaccccgagcgcccgtcgcacgtcgacttctcccgctccaagggcctcctcgaaggggagagagagtactatgagaaacaatttgccacattgaggtcctttgaggaagttgactcactagaagaatccaatgaaatcaacgaggatgaggagcttgcggagcaaatccagagtgaatttgctatgaagatatcaaattatgcaaacattgttctcttagcgttgaaggtatacgctacaataaaaagtggatcaattgctatagctgcctcaacactggattcactgcttgatctcatggctggtggtatcctttggttcacacatctgtcaatgaagagcatcaatgtctacaagtaccccattggcaaactgagggtacagcctgtaggcattatcatcttcgctgctgtcatggccactttaggcttccaagtatttattcaggctgttgaaaagctggtagtgaatgaggctccagataaactgaaccaagtgcaattattgtggctatattcaatcatgatctttgcaacaatagtgaaattaggtctgtggctctactgccgaacgtctggtaacaagattgtccgtgcttatgctaaggatcactatttcgatgttgtcacaaatgttgtgggtttggctgctgctgtccttggtgatagattctactggtggattgacccaattggtgcaattgttcttgcagtgtacacgatttcaaactggtctggaacagtgtgggaaaatgcagtatcgctggtaggtgaatcagctcctccagaaatgcttcagaagttgacatatctggctatcagacaccatcctcagattaagcgtgttgacaccgttcgagcatacacctttggggtgctttactttgttgaggttgacattgagcttccagaggacttgccacttaaggaggcacacgccattggagaatctctccaaatcaagattgaggagctacctgaagttgagcgagcattcgttcacctagatttcgaatgtgaccataagccggagcattcaattctcaacaagcttcccagcagccagccttgatccgaacgaatcctgtgtggtagattgtcgtgcagaatctgctgcagttcttgcattggcgtcttgtgctgtatgacaaaactaagagttcaattagttttgtggcggtgagtttaagatcaggcgcatctaagactacgagagatgaaggtgccgaatgcagagatttctcgagtgtggaaccctttgtggttctgttggtatggtcttcgttttgagcgaaattaagcattttgctgttggcatcatggcatgtgattggcggcgatctagctgtgtgctatcgactacggtgatgtttagacatggtttcgagaaagagagtagatccttgatttct

SEQ ID NO: 92067 - DNA, 992 bp, Zea Mays
aagcaaaacgaactacccgatttcaacggcccatatcactccaccaaaccctaaaaccgcttccgcaaccacgtataaaaacaccgcacgcgccgccgccgccgtcctattcctcggagaggagaagccgccgtcgcagcaatcacagcagcccggagaacggccaggtccgacaagatgcagatctttgtgaagacgctgacagggaagaccatcaccctcgaggtcgagagcagcgacaccatcgacaatgtcaaggccaagatccaggacaaggaagggatcccgccggaccagcagcggctgatctttgccgggaagcagctggaggatggccgcacccttgcggactataacatccaaaaggagtctacgctccacctcgtgctcaggctccgcggtggcatcattgagccctcgctgcaggcgctcgctcgcaagtacaaccaggacaagatgatctgccgcaactcagggtagaagtggtggagggtgtttttgcaaaaaatacagggcagcgagatggctgttggatccagaatgaattgtcgcaatttaatatatgtaccatgtacaccaaaggtgacacagatgctatgcacggctgcaccctagggctgtcaactgccgcaagaagaagtgtggtcacagcaaccagctgagggccaagaagaagatcaagaactgaggtgttgctgctagtcagtttcatggacaatgttgtttggttgttgaaccgtgtttgtttacgaactgtatttttgtttggttgttgaaccgtgtttgtttaccgaacatattggccttatgttatgttttaccatgttgtcgatgacacaatactatatgacgatagcaactatgctattgtagttttggtcattgttcacctgatatgtgccatatttcggtacaatttcgttagtgggcatcccgaactgtttcctttctactcattccattttaaattattgaacttttatttagcaata

SEQ ID NO: 92068 - DNA, 871 bp, Zea Mays
aagcaaaacgaactacccgatttcaacggcccatatcactccaccaaaccctaaaaccgcttccgcaaccacgtataaaaacaccgcacgcgccgccgccgccgtcctattcctcggagaggagaagccgccgtcgcagcaatcacagcagcccggagaacggccaggtccgacaagatgcagatctttgtgaagacgctgacagggaagaccatcaccctcgaggtcgagagcagcgacaccatcgacaatgtcaaggccaagatccaggacaaggaagggatcccgccggaccagcagcggctgatctttgccgggaagcagctggaggatggccgcacccttgcggactataacatccaaaaggagtctacgctccacctcgtgctcaggctccgcggtggcatcattgagccctcgctgcaggcgctcgctcgcaagtacaaccaggacaagatgatctgccgcaaatgctatgcacggctgcaccctagggctgtcaactgccgcaagaagaagtgtggtcacagcaaccagctgagggccaagaagaagatcaagaactgaggtgttgctgctagtcagtttcatggacaatgttgtttggttgttgaaccgtgtttgtttacgaactgtatttttgtttggttgttgaaccgtgtttgtttaccgaacatattggccttatgttatgttttaccatgttgtcgatgacacaatactatatgacgatagcaactatgctattgtagttttggtcattgttcacctgatatgtgccatatttcggtacaatttcgttagtgggcatcccgaactgtttcctttctactcattccattttaaattattgaacttttatttagcaata

SEQ ID NO: 92069 - DNA, 987 bp, Zea Mays
aagcaaaacgaactacccgatttcaacggcccatatcactccaccaaaccctaaaaccgcttccgcaaccacgtataaaaacaccgcacgcgccgccgccgccgtcctattcctcggagaggagaagccgccgtcgcagcaatcacagcagcccggagaacggccaggtccgacaagatgcagatctttgtgaagacgctgacagggaagaccatcaccctcgaggtcgagagcagcgacaccatcgacaatgtcaaggccaagatccaggacaaggaagggatcccgccggaccagcagcggctgatctttgccgggaagcagctggaggatggccgcacccttgcggactataacatccaaaaggagtctacgctccacctcgtgctcaggctccgcggtggcatcattgagccctcgctgcaggcgctcgctcgcaagtacaaccaggacaagatgatctgccgcaaggtagaagtggtggagggtgtttttgcaaaaaatacagggcagcgagatggctgttggatccagaatgaattgtcgcaatttaatatatgtaccatgtacaccaaaggtgacacagatgctatgcacggctgcaccctagggctgtcaactgccgcaagaagaagtgtggtcacagcaaccagctgagggccaagaagaagatcaagaactgaggtgttgctgctagtcagtttcatggacaatgttgtttggttgttgaaccgtgtttgtttacgaactgtatttttgtttggttgttgaaccgtgtttgtttaccgaacatattggccttatgttatgttttaccatgttgtcgatgacacaatactatatgacgatagcaactatgctattgtagttttggtcattgttcacctgatatgtgccatatttcggtacaatttcgttagtgggcatcccgaactgtttcctttctactcattccattttaaattattgaacttttatttagcaata

SEQ ID NO: 92070 - DNA, 994 bp, Zea Mays
ctattcctcggagagggagaagccgccgccgcagcaatcacagcagcccggagaaagcccaggtccgacaagatgcagatcttcgtgaagacgctgacagggaagaccatcaccctcgaggtcgagagcagcgacaccatcgacaatgtcaaggccaagatccaggacaaggaagggatcccgccggaccagcagcggctgatctttgccgggaagcagctggaggatggccgcacccttgcggactataacatccaaaaggagtctacgcttcacctcgtgcttaggctccgcggtggcatgcagatctttgtgaagacgctgacagggaagaccatcaccctcgaggtcgagagcagcgacaccatcgacaatgtcaaggccaagatccaggacaaggaagggatcccgccggaccagcagcggctgatctttgccgggaagcagctggaggatggccgcacccttgcggactataacatccaaaaggagtctacgctccacctcgtgctcaggctccgcggtggcatcattgagccctcgctgcaggcgctcgctcgcaagtacaaccaggacaagatgatctgccgcaaatgctatgcacggctgcaccctagggctgtcaactgccgcaagaagaagtgtggtcacagcaaccagctgagggccaagaagaagatcaagaactgaggtgttgctgctagtcagtttcatggacaatgttgtttggttgttgaaccgtgtttgtttacgaactgtatttttgtttggttgttgaaccgtgtttgtttaccgaacatattggccttatgttatgttttaccatgttgtcgatgacacaatactatatgacgatagcaactatgctattgtagttttggtcattgttcacctgatatgtgccatatttcggtacaatttcgttagtgggcatcccgaactgtttcctttctactcattccattttaaattattgaacttttatttagcaata

SEQ ID NO: 92071 - DNA, 790 bp, Zea Mays
ctattcctcggagagggagaagccgccgccgcagcaatcacagcagcccggagaaagcccaggtccgacaagatgcagatcttcgtgaagacgctgacagggaagaccatcaccctcgaggtcgagagcagcgacaccatcgacaatgtcaaggccaagatccaggacaaggaagggatcccgccggaccagcagcggctgatctttgccgggaagcagctggaggatggccgcacccttgcggactataacatccaaaaggagtctacgcttcacctcgtgcttaggctccgcggtggcatcattgagccctcgctgcaggcgctcgctcgcaagtacaaccaggacaagatgatctgccgcaaatgctatgcacgactgcaccctagggctgtcaactgccgcaagaagaagtgtggtcacagcaaccagctgagggccaagaagaagatcaagaactgaggtgctgctcctagtcagtttcatggacaatgttgggctgtattgctgtgtggttgttgaaccgtgtttgtttacccaacatttgggccttctgttatgttttaccttgttgtcgatgacacaatactatatgacaatagcaactctgttattgtagttttggtcactgttcacctgatatgtgccatatttcggtaagtatcgttagtgggcaaccggaactgtgtcctttctacttattccattttaaattattgaacttttatttagcaatttcttgaggtgtaattttgctgacttcaataaaattttaaaaaatcaattacat

SEQ ID NO: 92072 - DNA, 1570 bp, Zea Mays
ccttcagatccaagaaaaggcgcgcgctccctgtgaccacctcacgaactccgtggctataagactcgccgggccataacactgaactgatcgagtcacatgctagcgtgcgtgtgcgtgtgcaacggctataccacctgcgcgacccaccgcgagcgcccgcagctaagctagctctcgctcgcgcgctctgggagaggagagatcaatggcgtcccgtggcagcatgacctgtagtcttcagctcgccgtcctcgtttccgccgccatcgcgctcgggttcggcgtccgggccggcgaggcgcagctgtccagcgagtactacggccagacgtgccccgtcgtgcaccgggtcgcgcggcgggtgctgaagaaggcgcacgaggccgacgtccgcatctacgccagcctcacccgcctccatttccacgactgcttcgtgcaaggctgcgacggctccatcctgctggacaacagctcgagcatcgtgtcggagaagttcgccacgcccaacaacaactcggcgcgcgggtaccccgtggtcgacgccgtcaaggcggcgctggaggaggcttgcccaggcgttgtctcctgcgctgacatactggccatcgccgccaagatctcggtcgaactgtccggcgggccaaggtggcgcgtgcctctcggccggcgcgacggcaccacggccaacatcaccgccgccaacaacctcccgagccccttcgacaacctcactacgctccagcagaagttcggcgccgtcggcctcgacgacaccgacctcgtcgcgctctcaggggcgcacacgttcgggcgcgtgcagtgccagttcgtgacggcgcggctgtacaacttcagcgggacgaaccggccggacccgacgctggacagggggtaccgggcgttcctctccctgcggtgcccgagggccggcaacgcgtcggcgctcaacgacctcgacccgaccacgccggacaccttcgacaacaattactacaccaacatcgaggcgcgccgtgggacgctgcagtccgaccaggagctgctgtcgacgcccggcgcgcccacggcgccgatcgtcggacggttcgccgccagccagaaggagttcttcaggagcttcgccaggtccatggtcaacatggggaacatccaggtgctgacggggagtcagggtgagatcaggaagaactgtaggatggtcaacggaagctagacccgtcgacggcacaagttactggtgaactgaaagcagttctgctgtatgtacgatgcctcaaacatgttgatgggataatggtgcgccgatcgatttatttgtcaaggagatccaataaattggttttttgcatttttttttcaacaaatatatacatgtactaaaggtccgtttgacagagccattcagctctagtttcactagaaagtagtattttttagagctgaagtcatttcacgaatcgttatcttagagctagagttatttcttttatcttagagccagagttatttcgccgtattaaagtgtcagagccgatgaagctactattcatggtttattctttac

SEQ ID NO: 92073 - DNA, 1407 bp, Zea Mays
cgtggctataagactcgccgggccataacactgaactgatcgagtcacatgctagcgtgcgtgtgcgtgtgcaacggctataccacctgcgcgacccaccgcgagcgcccgcagctaagctagctctcgctcgcgcgctctgggagaggagagatcaatggcgtcccgtggcagcatgacctgtagtcttcagctcgccgtcctcgtttccgccgccatcgcgctcgggttcggcgtccgggccggcgaggcgcagctgtccagcgagtactacggccagacgtgccccgtcgtgcaccgggtcgcgcggcgggtgctgaagaaggcgcacgaggccgacgtccgcatctacgccagcctcacccgcctccatttccacgactgcttcgtgcaaggctgcgacggctccatcctgctggacaacagctcgagcatcgtgtcggagaagttcgccacgcccaacaacaactcggcgcgcgggtaccccgtggtcgacgccgtcaaggcggcgctggaggaggcttgcccaggcgttgtctcctgcgctgacatactggccatcgccgccaagatctcggtcgaactgtccggcgggccaaggtggcgcgtgcctctcggccggcgcgacggcaccacggccaacatcaccgccgccaacaacctcccgagccccttcgacaacctcactacgctccagcagaagttcggcgccgtcggcctcgacgacaccgacctcgtcgcgctctcaggtaaaaaaaaaagggggggagagaaaaccggcgatgcatgcctcgtgattcttgcacctgcacagcacgacacatggcgtcacaacgacggcggatgcattgcaggggcgcacacgttcgggcgcgtgcagtgccagttcgtgacggcgcggctgtacaacttcagcgggacgaaccggccggacccgacgctggacagggggtaccgggcgttcctctccctgcggtgcccgagggccggcaacgcgtcggcgctcaacgacctcgacccgaccacgccggacaccttcgacaacaattactacaccaacatcgaggcgcgccgtgggacgctgcagtccgaccaggagctgctgtcgacgcccggcgcgcccacggcgccgatcgtcggacggttcgccgccagccagaaggagttcttcaggagcttcgccaggtccatggtcaacatggggaacatccaggtgctgacggggagtcagggtgagatcaggaagaactgtaggatggtcaacggaagctagacccgtcgacggcacaagttactggtgaactgaaagcagttctgctgtatgtacgatgcctcaaacatgttgatgggataatggtgcgccgatcgatttatttgtcaaggagatccaataaattggttttttgc

SEQ ID NO: 92074 - DNA, 1422 bp, Zea Mays
ctcgtatatcaacacaacagtagcacgtacgtagctgtgcggactgcagtgcagaggtagacaaacatggagcgcaaatcattctcctgcagagacactgcgagctgcctcgccctgctcgccgtcgcgctgtgcctcggcgccgccacggtggcgcggggccagctgacggacgacttctacgacgactgctgcccccaggcggagaacatcgtgagggcgcgcgtgtccgccgcgatgaaggccgagccccgcatgggcgcctccctgctcaggctccatttccacgactgcttcgtcaacgggtgcgacgggtcgatcctgctggacgggaacaacaccgagaagctggcggggccgaacctgaactcggcgcgcggcttcgatgtcgtcgacgccatcaaggccgacctcgagaaggcgtgtcccggggtcgtctcctgcgccgacatcctcgccatcgcggcaaagtacggagtgctgctgagcggagggccggactacgacgtgctgctgggaaggagggacggcctggtggcaaaccagtccggcgccaacagcaacctgcctagcccgttcgatcccatcagcaccatcacaaagaagttcagcgatgtgggtctcaacacaaccgacgtggtcgttttatcaggaggccacacgatcgggcgagcgcggtgcgtgctgttcagcggccggctggccaacttctcggcgacgagctccgtggacccgacgctgaacgcgtccctggcgtccagcctgcaggcgctgtgccggggcggggacggcaaccagacggcggcgctggacgacggctccgccgacgcgttcgacaaccactactaccagaacctgctgggccagaggggcctcctgtcctccgaccagggcctcttctccagcaccgacggcagcgcggccaccaccagggcgctcgtccaggcctacagcgccagcagcgagcgcttcttctgcgacttcggcaggtccatgctcaagatgggcaacatcctcccgctcaccggctccgccggccagatccgcagcaactgccgtgccatcaactgagctgagcatggaacagcccgcgtgcaggtcgtcgaactgccatgcatgcacctcaatcaacaaaaaaaagtgggatcgtgacgcgtagtcattgtggtgtggagcgtgtttcgtgtggcttaagccagggttcattaattcatgcatggtcaatatcactagctattgggacggatgagtggtagcctggtaggtattcgactctcttcaaacgaacgagataggatctgtaactgccgcgacagtacccaacgaattatctgtaggtgcatgcgttccccgatcgatgttgttctcgtgaacaagcaagaagacggaataaataaaagcatcatccctggttactacgca

SEQ ID NO: 92075 - DNA, 444 bp, Zea Mays
ttgacgagcaaagagcttcgcgcgcgcaagaacaacagacgctatgcgcgcgacgcaaaggcgagcaggacgcaggcaacaggggagcttcgacggcgagcaactgagaatggctcgacgatgtcatggagcagcaggaaataacaacgccaagatggtcgaggagacaagtccagcgacaacatagacggttagcacggcgagcaggggaggagctcgggcgagctgagggagcggtaaaggggacgattaggccgagcaggtcacggtgcgtgcgcaggatagcgcgcacgggaagaagaccttggttggagagagcgctggctggagatggacgccgagcgcgcagaccgagcagtcgccatggggacgagcgaagctccggtcggcgagctggagcaaggtccagtgcgcggccgagcaggagagagatggacggccgag

SEQ ID NO: 92076 - DNA, 444 bp, Zea Mays
ttgacgagcaaagagcttcgcgcgcgcaagaacaacagacgctatgcgcgcgacgcaaaggcgagcaggacgcagccaacaggggagcttcgacggcgagcaactgagaatggctcgacgatgtcatggagcagcaggaaataacaacgccaagatggtcgaggagacaagtccagcgacaacatagacggttagcacggcgagcaggggaggagctcgggcgagctgagggagcggtaaaggggacgattaggccgagcaggtcacggtgcgtgcgcaggatagcgcgcacgggaagaagaccttggttggagagagcgctggctggagatggacgtcgagcgcgcagaccgagcagtcgccatggggacgagcgaagctccggtcggcgagctggagcaaggtccagtgcgcggccgagcaggagagagatggacggccgag

SEQ ID NO: 92077 - DNA, 1223 bp, Zea Mays
atggtcgacatcttcttctctgtatacgattgccatgaaggggctcctcggggacgtcgtcgctccatcgggcacgcgggctttgccgcggccacctcgcgggcacgcgaacaccgtaaccttgcaacccagcccgaaggcgcgcacgttaacgccgcctcgctgccatcagaacgcgagcagccccgcgcgggtaactacacatacaacgggcagcagcacgacgcgacggcctcgcctgaaggagcagtggcttgggtggatagtagtttcaccggcacaggtcgtcgaaggcaagtaaagaatgtgttgagcaacatatgtcatatgaaatggcctggattggtgatagaggatggtaaggaggtccctgtcacaagatgggatcaatatgcccttgcaataaatgcacaacatgggaatgcgcaagctacagtttggcacgacttctggaaacattacaagttgcccgaaggagatactcatacggaacacgcacactccgtgttccataggaatgcgacaagtgttgtttgggatatgatgtactatgctcgaatccaggtgattagtcaagctatgtttggtagtgaagggcgacgtccagagagtaagaatgaggcgacacaatatggactcgatatgactgagcaacaatatcttgagatagctgccaatgatgctacagttactttgtcgaaaccctcttcgctagtggaggtatcgaccatcactcgtcactgtaacccgatggtgatcggcgaccgtgagcttccatgttattgtgttctgatacttgagacttttattatgactatgtatgagatattgtctcttattagtattggatgatgagatgtgtcttattattactatggatgagacttttgtaatgtaattgatgagactatagatttaaatattgttatgtgattgtgtgtgagatgttttatgtgaaaatatgttgtgctatagctgttgatatatttgttatattgtggaatgtggtgtaaaataaaaataaacatcatttgtaatgctggtcaaattaacttcctagaggcttattgggctgtaggaagttagtcagctaacttcctaggggctacagtcagtcgtaggaagttagccagctaacttcctaggggctacagttagtcgtaggaagttagtcagctgacagcgtgaagctactaacttccgagaacctactaacttctgag

SEQ ID NO: 92078 - DNA, 2457 bp, Zea Mays
ctggaacaaaagttgttcttggtacagactacagagcgtagagcgagtgggtatcggacacttctctggcaattgcagattatctccgaatctgtatgaactgactgccgcggtccattccgtctgaagaccctcctcctacctaattatttttctctgtcgtgacgtgaaatgccagcgcgcagcttcttgatccgttccggctgatcccgtggaccggacttggggttgggggaggccctctgtctccatggatgaggcagcagggctgctgttgcaagaagagggtggaggtggggaccaagaagctctcctccttccacttccacaggatgttggcctttacacaggtgatggatctgttgatgtcaaagggcgccctgcgttaaagggcactacaggcaattggaaagcatgctttttcatcctagggaatgaatgttgtgaaaggctggcctactacggaattgcaaaaaacctagttacttatttgaaagtgaagcttcatctaggcaacctcgaggctgcaagacatgttaccacttggcaagggacatgctatctcactccccttgttggaggcatcttagcagactctcgttgggggaaatactggactattgctgttttctcatcggtttactttattggcctggctattttaacgctttctgcatcagtcccagcgttgcaaccaccttcatgtttaaggacagtttgtccagaagcaagcttacttcagtatggcatattttttggtggcctctatatgattgccctagggactggaggtatcaaaccttgtgtctcctcctttggagctgatcaatttgatgacactgaccaagcagagagagctaagaagggttcattcttcaattggttctacttctgtataaatataggttcattcatatcaggcactatgatagtgtggatacaagataacactggttggggaataggctttgcgattcctactatattcatggcattagctatttcattcttcttctcagcttcaaataagtacagattccaaaaacctggtgggagtccactcacaagagtgtgccaggtggttatagcagcatttcgtaagtggcacattgaagtgccacatgatacatctctcctatatgaagttgatggccaaacttcagcaattgaaggaagccggaagctggagcacacaaatgagctcgagttccttgatagagctgctgttatctcatctgctgatctgaagagtgaatcctttaccgacccatggaagctttgcacagttacccaggtggaagaattgaagatcctaataagaatgtttcccatttgggctactactatcatattcagtgctgtttatgcccaaaactcttccatgttcatagagcagggcatggttcttgacaagcgcattgggtctttcaacattcctcctgcatctctctccacttttgatgtaatcagcgtcatcatgtgggtcccactctatgaccgcatcctggtgccactagctagaaaattcactggaagggagaagggtttttctgagctacagcggatgggaattggattagtcctgtccattctcgcgatggtatctgcagctctagttgagttgaagcgtttagagattgccaggtctgaaggtctcattcatgagaaggctgctgttccaatgagcattctttggcaaataccacaatatttcttggtgggcgctgctgaggtgtttacttgtattggtcaagttgagttcttttacgatcaggccccagatgccatgaggagtttatgtagtgcacttgcacttattacagtctcactgggaaactatataagctccatcatactgacattggtgtcgtacattacaactcagggaggagatcctggatggatccctgacaatctgaatgaaggccatctcgaccggttcttttggttaattgcagggataagctttgtaaatttgatagtttatatgggttgtgctgtcagatacagatataagaaagcctcttgattatatttatgtgaactcttgtaatgtgatttcccattcccgatatcatacttatcaaatacaatgcactgtacagatttctgaaatcctgcgattcatctgactgctttctattgcaaaacctactgtagtttattagatgcagaataaagtttcttgtgattactttgtttgtgaaatacaccaggggcagtagagttattgccttgttctgtgaaaaagcttccaattgttcgttcaaagtaggccattgtgctactcgtttgcttgaaatatagccaccctgttccgccttttgaattgtggttgccttaatttctttcatggtgatactccatattacacatggatccaagtaaaaacattgcaaaacagctttcgctgccaaacttaacaccacaaattccattctccttacttgcatgatc

SEQ ID NO: 92079 - DNA, 89 bp, Zea Mays
tatttggcgctccaaaaaagcgtcaacatactttttggcgactccgctggggacatacatatctaagctcatcaaatcggccctcaatg

SEQ ID NO: 92080 - DNA, 2092 bp, Zea Mays
catattagttggaccaacatcaattgccggcaataaaaaaaacatcaattgccgaagaagcaatcactgatcactcttcaaggttcgaagctttcccttacttctggagagaaaagcctccacggaccacggcttcagaagctgctttcatggagtcgtcgctggtggaggagcggcggcaaaacctgctggtgcgcgcgacggagcctgaggatcttgccaggtacacaggtgatgggtcagttgactttagaggttttcctattttaaagcataacacagggaactggagagcatgttcattgattcttggaactgaagtttgtgaacgtttggcctactatggaatctcaaaaagtttggtcacttacctttcaacaagactacatgaaggaaacgtttctgctgccaggaacttcacaacctggcaaggaacttgttatcttacaccacttattggagcaaccttagcagattcgtactggggaaagtacaggactattgctgttttctccactatttactttcttgggatgtcggcattgacactttcagcatcagttccttctttccagccccctcaatgtgttgggtctatttgtccacaaccgaccttatcacagtatcttttatactttgttggattatacatgattgctctgggagctggtggtataaagccgtgtgtttcatcctttggggctgaccaatttgatgatactgatccagttgagaaagcaaagaaaggagctttcttcaattggttttatttctgcataaatattggttctttgatctctggcacagttcttatttgggtacaagagaattgtggatacagcattggctttgggatccctacttttttcattgccttggctattggaagcttttttataggttcagatatatataggtttcagataccgggaggaagcccacttacaagagcatgccaggtagttgtggcagccactcacaagcgaaaaacagatttgccggttgacagttctcttctctatgagctagatggtaagacttcagctattgaggggagtcatattcatttatactgcacttttgttctgacattgcatgcttttaagcttgtgtcttggaacttcctggacacagcaaccttttttcagaactatgaaagtttccttgacaaagcggcagtcattttgtggaatgaatgtgatggtcctcgcaattcatggagactttgcacagtcacacaagttgaagagcttaaaatactactgaggatgtttccaatctgggcaacaggaattgtgttcttcaccgtatgtgctcaaaactcatcgatgttcatagaacaggggatgaccctcgataaccaaattggtccattcaagattccagcagcaactctgtcgtccctagatgttatcagtgttgtcgtttgggttccaatttatgagaggttagttgtgcccatagccaggagattcagtgggaaagagagaggtttctcagaacttcaacggatggggatcggtctatttgtgtctacagtcgcagtggcagttgcagcgctagtcgagatcaatcgtctacaggtggcagtggcagaggacctggttcatcagaaggtacctgttcctatgagcatcctttggcaagcgcctcagtatttgctggtcggtgtgggcgaggtgttcacatcaattggtcaagctgagtttttctacaatcagtcaccagatgccatgagaagcttatgctcagctttcgctctcgttaccgtgtcacttggaagttatctcagctcattcatcttaagcctggtgtcatatttcacaactcggaatgggcaattggggtggatccctgataacttgaacgaaggccatcttgaccgctttttctggctgatagccggtctcagctcactaaatttccttgtttttatatattacgctcaacaatacaagtgcaagatagcttctgttgcttaaagttccttctccactttgcaatttacttgtacagcaaagctcaatgtacaatttgtttatgctgaaatactacagtgcgtacataatctcatgtgtcgtgtactgtgtac

SEQ ID NO: 92081 - DNA, 150 bp, Zea Mays
atgggaagggcagaggacgagacaagagacaaaggagctctagatggacacaaagtgggtatgggaaacccgttgggtacccgaaacccgcatgggtatgagtttgggcaaaattttatacccgtcatgggtacgggtttcggcaagtaa

SEQ ID NO: 92082 - DNA, 1568 bp, Zea Mays
tttttttacgttttcgcgggctgtaacatgaaatgctctagcagtctacacttctattattctatgctttagagaacatatataacaacataacacgggtttctttttccacagatattcaggcatgtcacggttccaacaaagttatagtgctgtctgacgtcactaggagatgatacataggacgaaggaacagacggtctttttatcacagcagtcacaaaaacagaacaaatttataggttcattacctgttcctataaataattggcctactctgaaacatggcaatctctagctgctcctgtcgcatgcgagagctaaccttttctatatctgggacctctcggtggggcaccaaaaacgggtacaactctgctgctcttcgtctccccagcaacagctcattcacacttgattgatttgtatatgtggcggacaaagaacagggcggcgcggaagcccaccatcccgagcatcaagaagaatgcatagcagatgcaggccatgtagccaaagaagaaagatgtctgcatgaagccagacatgtcggatcgcgcatagtagtagtacaggcagtagccgtacacgaaaaacccagttgatcctccgcaaaggaatgacctgcaggataaacagatcagcactgcagttgacccaaaatgttgaaggggcagttatacttgttcgaccaagggttgtgttttgaaagcagtctacactctacacacgtaggatcacacaattgaattcaatgctacaatacatttcagcagctgacttatgccattcagataatagatgctctgcgtgacattttgcttaactacatccagtgacatatattggttgaaggggggactaatcaggaagcctagtagtgtggcaaaaatataaaccgaccacaagaattgctgctaggctctcaacaagttgaaataggttatagtgacataatatacttaataaaatacaatctgctctcaattgatacatttcctttccatcttactctttttttaagtgtcagcacacttacataagtatacattcaaaagcaagatttagaggaaaacagcatacctccaccaccactcatggtcttcagcagcaagctggaagtatgtcagtgcaacagtgatgaacgcggtgacaataaggaggatgatgaagacaataaacagaatgctgtagattgtgtagatcctgtggccccaaacactagcaaagatgtagtatagctcaatgtatatggcgctgaaaggcaagaacccagccatagccatctgtggaatggttctccggtaccagggaagtggaggaatctccctggggtattttgtggtacggcaaggagcttggaactcacttttgctgtttttaccagcaataccacccaaaacaagcaaaggaaacgtgaccaaggtccagatgagcacaatgacacagatagtgccaaagggcagtgctgctgttgcactataagcaatagcaacagtgttcaagaagcaaaatgtcagtaagagaggtccacagaacaggcatcctgtcaatagcaagttcctcac

SEQ ID NO: 92083 - DNA, 1551 bp, Zea Mays
cagcgatatacgcacccttgaagctttccaccccgtaaagctagctaagccttcccttggcacctctatcccactaaggagcaaaaagagaagcgagagggaaaggagacaaggccggcgcccctgtggtagcgtttgtgaccttagcttaattgcttgcttggccaggactcccttaaaagaagcaagctcatggcactgctggtcaagagccaccaccaaatgttggtctcctcctccacctcctcgtcgtccccttccgcgtcccagcagcggcagccaccgccaccacctccctcctcctcctgcctcaccgagcagcagccgtcccccgccaagcgcaagaggcgccctcccggcactccggaccccgatgcggaggtggtggcgctgtcgccgcggacgctgctggagtcggacaggtacgtgtgcgagatctgcgggcaggggttccagcgcgagcagaacctgcagatgcaccggcggcgccacaaggtgccgtggcggctcgtgaagcgggcgccgccgcctcctgctgctgctgctggcggcggcggcggcgccgccgacgctaataacagcagcggcacaggaggtggtgcaggcggcggcgcgccccggaagcgcgtgttcgtgtgccccgagccgagctgcctccaccacgaccccgcccacgcgctgggcgacctggtgggcatcaagaagcacttccggcgcaagcacggcgggcggcggcagtgggtgtgcgcccgctgcgccaagggctacgccgtgcagtccgactacaaggcccacctcaagacctgcggcacccgcggccactcctgcgactgcggccgcgtcttctcacgggtggagagcttcatcgagcaccaggacgcgtgcaactccagccggatgcgcggcgaggcggtggtggtggccgtgcccgtgcccgtgccgccgccgtcggcgctcccggtcatccgtcccgccgtcccgcggcatccgcccacggtggcagtagcaccgccgccgccgccggtgctccagctcctccccgcctccgcggcggcatcagcgccgcggactagtagcgccacgacgaccgcctctccgtccaccaccacaaccgcgtcccaccaccaagcaaaaccccacgcggcgacaacaacaaagctgcagctctccatcggccccatcgtcacggctgcggcggcggcggccgtcgactgcggcgaggacgagtccgaggcggaggagctgcggcgcgcggtggaggagaaggccgcggcggacgcggcgcgggagcgggcgcgcggggaggccgcggcggcggagcgcgcgctggacgaggcccgccgcgccaggcagcgtgcccgggccgacctcgagaaggcgtgcgcgctgcgggaccacgccgctcgcctgctcgggcaggtcacctgccacgcgtgccgccaccgctcgctcgccgtcgccgtggtcaggggtgccgccgagggccacgccgccggccccgcggtggcctgcgactccatcaggggaggaggcttaggagcaggcatctag

SEQ ID NO: 92084 - DNA, 1251 bp, Zea Mays
attcccctccgtgtccgatgcctctcatcgccagaagaccttcccggtacgacgccaccgcaccacggaattaacacgagcactgcatcggtgaatctgcaagcccgcccgcccgtcgctcgccaccgccatgttcggcatcgtcttcccggaccacacctttcccctcgacgccaccgctttcgcgcaggtggcgcccaattcctgggtcctcgatctctccactctcgcgctcgccgccgcgccgcgctcggcagtcgtcttcctgctccccgctgccgtgacagcgctgccgcccggcaaggccgtctccgtctacttccaggccgccaccaaccgccccttcgcattcttaggtgcgctcgggcccacgcgcccctcggccagcttcccgcttccggaggccggcgacgagccggagcctgctgtgggccccgctaaactgggtgtcgccgtggaggacgcggccgcgttaccgccgccccctgacgagcagcgtgccgagcgtgtggcgctccgtgtcggcgagaacctgttcaacttcatgcaatcgttctgcggtgccgacggcggcaagctggtagtgcccacggacatcctggaccggtggttccgcaagttccaggagcgagccaagaaagatccagcgtacctcaagagcttcgacttttgagagcaaaggtcattttgcagataccatgtgggaagaatgttggatagcagtatagcagtgttttgtgtctcatctaggccctcctacattgcacacaatgttacgccgtgtcttaggggctgactgaatgaaggtgcatatgcagcttctctatctattgtagagaaggacaacgacaccaaaagcgaccagataggttagatggtggtgcttcaagtccttgcacccgaatgagaagtcttcttagaaacttttacaacaatacatcggatggttctgcttcgaatgtcagtattttgtggataatatctgggaatctcaggactaagatgaatgcgattgagttcttgtcgcactcctttgtgaaagagtagaatgagaaacctagtggatcttaaacccattgataaaagaaaaaaaggataacaactatggttagggaataaaagagggtttggggatagagggataaggcctcacgactttataagtcgacggattttccttttactagaaatttcattgttgtagtattgacatgtagaatgagactctctcgaagcatatttttatttccc

SEQ ID NO: 92085 - DNA, 1286 bp, Zea Mays
ctcgctctttcacttgggccgcttctggatctgtacgcggacgcccacgcactgcttggccttcgtctccgcttctcttgcgctttcgactcctgctagctggcggggcggctcgcctctcgcgccacaatggaggtcgaggacgacgacaacacggcggcgccgagcgcgtggccgagttcatccaggcgtcgccacctcctccagttccttctccacgcctccatgaggctcgacctccggcccatcgtcaagtacgccgcgcttaccttcttcgctggacgcttcctcccggcactcccgaggaagatggggttctgcggcgcgcgaagcggccgaatagtcaggtcctggctcctcgagcccctgagggacagcaatctcgagctattcgcgctcgtcgcggtgtggattgccagcaagatccacgatcagaagccaatgtcagtgaagagcctcaaagccctgggtgatcgcatcatcgccgaccagcatttcatgtgccgtgattttgccagtgccgaattggtgttcttggaggtagtggaacacaacattggattttcaagcatttgtttcatatacctggaggagcttctcatgcatttcagggaaatatcaaaaataggcgaacttttggatctggatgtgtgcatggaaattttggacattctgtatgaaacggaagatacctcgttactttttaattgtccctgctcacttgctgcttccactcttgttgctgcatatgctatatcagttcctaagcaaacatgggagtttccaatccttccttgggtcaggtttgctacatcatacgatgaagaggaaatcatgaagattgttctgacaattctcctacatgtgcttaaactggatggtatcgaagagaagggcaagggacgttttgatgccagatgtttgtcgtgagtatgtgatatgtagagcacgagattgtgccccaattttgccttttgagttctgaagtattaaccatctaactgaccgtgtgcagcagatacatgcttttagaagacactgtagctagtttttgacaggcggttttgagattgagatgcccataatagttatgtgaactaaaactatatgatcaagggagtgcgcgtaagcgccttgcaatggaattctgtattggatgtattttgaagaaagatgcctgctaagtaatgccttcaggttggaattcaagtttgacataattatcaatgtaatgacatttaagctccttgagatctcaaatggaaggatgttgcattgccgccgca

SEQ ID NO: 92086 - DNA, 1069 bp, Zea Mays
ctcgctctttcacttgggccgcttctggatctgtacgcggacgcccacgcactgcttggccttcgtctccgcttctcttgcgctttcgactcctgctagctggcggggcggctcgcctctcgcgccacaatggaggtcgaggacgacgacaacacggcggcgccgagcgcgtggccgagttcatccaggcgtcgccacctcctccagttccttctccacgcctccatgaggctcgacctccggcccatcgtcaagtacgccgcgcttaccttcttcgctggacgcttcctcccggcactcccgaggaagatggggttctgcggcgcgcgaagcggccgaatagtcaggtcctggctcctcgagcccctgagggacagcaatctcgagctattcgcgctcgtcgcggtgtggattgccagcaagatccacgatcagaagccaatgtcagtgaagagcctcaaagccctgggtgatcgcatcatcgccgaccagcatttcatgtgccgtgattttgccagtgccgaattggtgttcttggaggtagtggaacacaacattggattttcaagcatttgtttcatatacctggaggagcttctcatgcatttcagggaaatatcaaaaataggcgaacttttggatctggatgtgtgcatggaaattttggacattctgtatgaaacggaagatacctcgttactttttaattgtccctgctcacttgctgcttccactcttgttgctgcatatgctatatcagttcctaagcaaacatgggagtttccaatccttccttgggtcaggtttgctacatcatacgatgaagaggaaatcatgaagattgttctgacaattctcctacatgtgcttaaactggatggtatcgaagagaagggcaagggacgttttgatgccagatgtttgtcgtgaatacatgcttttagaagacactgtagctagtttttgacaggcggttttgagattgagatgcccataatagttatgtgaactaaaactatatgatcaagggagtgcgcgtaagcgccttgcaatggaattctgtattgga

SEQ ID NO: 92087 - DNA, 1140 bp, Zea Mays
tcgactaaatttgatattccaaaatttgatggctaaattagttttgctatttggcagattcagatgaaggttgttctgacccagttggttgttcaaaaggcattgaggacgcgacctgctgacatgactgatgataagtggcaatatattgatgagagagctttgtccggcatacaactcagtttatcttttgatgttctgcgtgaagtaatgcatgaaaaatctgcagcaacattgtggaagaaattggaggagttgtatatgactaagagtcttgcaaacaaactacgtctcaaggggcgtctttaccctattcgcatgtcagaaggtacatctatgcagtcacatcttaatgaatttaattcaattattgtggatcttgagagtcttgatgtgaagatagatgatgaagataaggcaattttgttggtagtctcattgtcttcttcttttaagaattttaaggaaattatgttttatggtaatcatacttcactgtcctttaagaatgttaagtcaaatttgttgtccaaggaaacatttgatgttgattctcgttctgaacccaaaggtgaaggtgtaattgttcagggatctggagatcataaatccaacctttattgtcgttatcccagaaaaaatactgatcatatttcttagtgcccaaaagtgagaaataaagaggagaaaaagaaaaaagaattggataagtcttctattgaagccagttttgttgaaactttggatagtggagaagttacatttgttgcctttgttgaaaagttctcttcttgggttctcgatttcgcttgcacttttcatatttgtttgcatagagattggttttctgattatgttcagtctcatgctggtgaggttgttattggagatggatccacatgtgagattattggaatcagctctatttatatccaagttcatgatggtagtattaagaaacttattgatgtccattttgttccaaaattgaagagaaatcttatttctttgagcacttaagaagcaatgggattcaattttgctgctattgatggtgttcttaaggtttctcgtggcaatcgtattatcttcaagggcaacagtttgaataatctatactatttgcaatgttcaacagtt

SEQ ID NO: 92088 - DNA, 1076 bp, Zea Mays
tttttcttttcttggcagccttccttgagttcttgcctcacccagttcatgtcatgttcatcgtggcctagccttctcgacgtctcggttctctgaatagctgcttctctctctctctctctctctaggcatgctggcttcgaccacaaggtacggtgagacagcagagaaatcaagtgacgggtgaaaagattgttgccatcagtcagggatgaacagcaaggagatgtgccaagaaccgtgcgacgagctgtccgagatcagcagccaggaggcgtccaactcctccggcctggtaagcctcgacctcacgctcaccgtcgccgccgccgccgccgccgagtcgagcactaccgacaacagtaacagcggcggcacgccggccgacgcggcggcggtcgcccgcgagccgtcgcgcgtgttcacgtgcaactactgccagcgcaagttcttcagctcgcaggcgctgggcgggcaccagaacgcgcaccggcgggagcgcacgctggcccggcgcacgctgcggctcgacgcggcgggcccctacggctactacgccgacgtggcgtccctgccgctgtacggctccggcctgtaccccatcggcatccaggcgcacgcatcgatggcagcgcacccggagcagcagcagcggcacgaggacgccgccgagctgaggcccgcgcgggggctgctgagccccatgccattcctcgtggccgacgaggcggagatgagcttcggctggcccgggagcttcagaccagccaccgccgtcgctcctgcgccggcggggagcgccgtcctgaactcggctggcggcgtcgccgtgcatgcccgggaggagcccgatctgacgctcaggctgtgaagtgtgtgtgaactgatccgtcgactagactggttaatccgtcaggctttcattctctttaaattgatgatcggcccatggctgatgcagatcagaccgtggcggtctcttgcttgaccagattcttcctattgtttcgtgtgcgtgcaagaatttttgtacagcagttggatgtgcaagagctcgagatatctctctttattca

SEQ ID NO: 92089 - DNA, 1695 bp, Zea Mays
actcccaactctcccacaagtcacacacatcccttgaattgaatcccttttcatccctctctcttttcaatgctcctatcccttcgctcccggaaacgaaatatctacgagtacattagcatctcaactcagtgcttttagatgggtggaagtggaagcacgcttaatccagcagcccccagttgtttactctttactgcaagctgtgggcactttctatcgtgcccttttccttagatggtggtagtagtggtggtggtacaaagacagcaaaagggatggaaaaaaaagctcaagcctatgtatgtatacttacttgtacacacacaaacaatatcctggtgcatctttagtgcagtgcagtgcaggcacacacacacacatacaacatccctctccctctccctttgcaggtctgcctgtactaccaccacttgtgagatggagcagcgcggcatcactgtcctacatccatccctgcccctaccagtaatttaccaaacctctgctgctttccataatcaagcaccacacagtgccagtgggggtgccagtgccactttaactgatgaaacaccaccccccctcctcttcctcactttgccccccacctctctctctctcactacgcgcagtagtatctctctctccacccttgggtacgctgagcacaaacaaggggcaattggtaaggagcacaaggcctgggctctgatgggagtggagtgaggcgctgcacgggattctctgcttctgcgtggtagagcaggtacggtgagacagcagagaaatcaagtgacgggtgaaaagattgttgccatcagtcagggatgaacagcaaggagatgtgccaagaaccgtgcgacgagctgtccgagatcagcagccaggaggcgtccaactcctccggcctggtaagcctcgacctcacgctcaccgtcgccgccgccgccgccgccgagtcgagcactaccgacaacagtaacagcggcggcacgccggccgacgcggcggcggtcgcccgcgagccgtcgcgcgtgttcacgtgcaactactgccagcgcaagttcttcagctcgcaggcgctgggcgggcaccagaacgcgcaccggcgggagcgcacgctggcccggcgcacgctgcggctcgacgcggcgggcccctacggctactacgccgacgtggcgtccctgccgctgtacggctccggcctgtaccccatcggcatccaggcgcacgcatcgatggcagcgcacccggagcagcagcagcggcacgaggacgccgccgagctgaggcccgcgcgggggctgctgagccccatgccattcctcgtggccgacgaggcggagatgagcttcggctggcccgggagcttcagaccagccaccgccgtcgctcctgcgccggcggggagcgccgtcctgaactcggctggcggcgtcgccgtgcatgcccgggaggagcccgatctgacgctcaggctgtgaagtgtgtgtgaactgatccgtcgactagactggttaatccgtcaggctttcattctctttaaattgatgatcggcccatggctgatgcagatcagaccgtggcggtctcttgcttgaccagattcttcctattgtttcgtgtgcgtgcaagaatttttgtacagcagttggatgtgcaagagctcgagatatctctctttattca

SEQ ID NO: 92090 - DNA, 2178 bp, Zea Mays
aaagctttcttttaacatgataagctcacaaagttggttgggtattgctagggttatttgatgtccgattattagaaaaaaagaaaaacaggaaaaccacgctgtgtctctgcctccgttgtctgtccgacccggcgttgtgattgggggagtatgaagtgctcacaccatctcctctccattcacatcagcgctccacgcctgcgcccctgaattcccaaatcctgcgcgcctctgccccaaccccgctcgtcgactcctctctgccaaacacgtcggaggaatccttctccggaactcgtcttcgtcctgtctgtcgggctggcgtggagtggagatccatcaccacgtggataggtctcttcttctgctggttcaacgctgaatctgtccttcaatgccttcacaggctctacccctgaagaagttgcagagttagaagctattgccgcattttttgttgaagggaacatttttttgggtcatatccagattgaatacgaaacatgctcgtccttttgggactttaagagaataagaggcaaaaggaacataaggatagaggagagaaataaacaatggggaagggagatgtggctaccaggtcaaaatctcaaaaatcaccagcaatacagaatgagcagagtacacctgctaacccgcccacagcatatcctgattggtctcagttccaggcatactataatgctgctgggacagctccagtgaccccacctttttttcatccatctgtagctccaagccatcaggggcacccatatatgtggggtccacagatgatgtctccttatgggacaccaccaccatatgcagcaatgtatgcacaaggtacaccatatcagcaggcaccaatgccaccgggttcacacccatacagtccttatcctatgcagttaccaaacgggacagttcaaactccaacatctggtgctggtggtacagcgacagataaatcaaataaaaataagcggaaggcttccctcaagagatcaaaaggaagcttaggtagtctggatgttgttgcagtaaaaaataacaagtcaccggcaaagccttcaacttcttcctccaatgaaggttcttcacaaagtgagagtggaagcgggagttcttctgaaggaagcagtacaaattcaaaaagtggttcaagggtgaaggataattctgagcaaggacagggtaatgatgctaggagtaaatgtactcaaagctctgtcgttgagcccacacaaccatcttcagggtctgttgtgcttaaccctatgatgccattttggcctgtgccccctcccatggctggcccagcaactactctgaatatgggagtggattactggggtactcctgcttctgtacccatgcatggtaaagttattgcagcaccgacatcagctccttcgtcaaattcacgtgatattgttctcagtgatccgactatacaggatgggagagaactgaagagacaaaaacggaagcaatcaaatagggaatcagctcgacgctcaagattgcgcaagcaggctgaatgggaggaagtagccaatcgtgcagatttgctaaagcaggaaaatagttcacttaaagaagaattgaaacaacttcaggagaagtgtgatggcttgacctcagaaaatacatctctacatgagaagcttaaagcgcttgaggatgagaaatcaaatggaaattggtacaaggattaaaggctgaaacttctctctctttctgactgctgatataatttggtggtaacctgataggacgacaactaaggaggtattcatatacggtattagacttttgtccgagggggtaaaattgtatcataggatttgacatggttgacggctacagattcttcgtccagttgtgctgctgtgctgtgttgtctttcttccctcttcgtgctagatcctacagaagtacaactatgtagaaacccccaggtggtgtttgaagcctggggggattagcgtgtggtattggtatagctgttgtagagctgctcactgagcttcttgacagaaactgaagcgtgctaaagcagtcgtgtgatttacgattcagacggattaattttacggatagtaatgtaactgcactcatgaatacaaatagccttttactgatttcgccctgtacggggaacggctttgg

SEQ ID NO: 92091 - DNA, 2123 bp, Zea Mays
aaagctttcttttaacatgataagctcacaaagttggttgggtattgctagggttatttgatgtccgattattagaaaaaaagaaaaacaggaaaaccacgctgtgtctctgcctccgttgtctgtccgacccggcgttgtgattgggggagtatgaagtgctcacaccatctcctctccattcacatcagcgctccacgcctgcgcccctgaattcccaaatcctgcgcgcctctgccccaaccccgctcgtcgactcctctctgccaaacacgtcggaggaatccttctccggaactcgtcttcgtcctgtctgtcgggctggcgtggagtggagatccatcaccacgtggataggtctcttcttctgctggttcaacgctgaatctgtccttcaatgccttcacaggctctacccctgaagaagttgcagagttagaagctattgccgcattttttgttgaagggaacatttttttgggtcatatccagattgaatacgaaacatgctcgtccttttgggactttaagagaataagaggcaaaaggaacataaggatagaggagagaaataaacaatggggaagggagatgtggctaccaggtcaaaatctcaaaaatcaccagcaatacagaatgagcagagtacacctgctaacccgcccacagcatatcctgattggtctcagttccaggcatactataatgctgctgggacagctccagtgaccccacctttttttcatccatctgtagctccaagccatcaggggcacccatatatgtggggtccacagatgatgtctccttatgggacaccaccaccatatgcagcaatgtatgcacaaggtacaccatatcagcaggcaccaatgccaccgggttcacacccatacagtccttatcctatgcagttaccaaacgggacagttcaaactccaacatctggtgctggtggtacagcgacagataaatcaaataaaaataagcggaaggcttccctcaagagatcaaaaggaagcttaggtagtctggatgttgttgcagtaaaaaataacaagtcaccggcaaagccttcaacttcttcctccaatgaaggttcttcacaaagtgagagtggaagcgggagttcttctgaaggaagcagtacaaattcaaaaagtggttcaagggtgaaggataattctgagcaaggacagggtaatgatgctaggagtaaatgtactcaaagctctgtcgttgagcccacacaaccatcttcagggtctgttgtgcttaaccctatgatgccattttggcctgtgccccctcccatggctggcccagcaactactctgaatatgggagtggattactggggtactcctgcttctgtacccatgcatggtaaagttattgcagcaccgacatcagctccttcgtcaaattcacgtgatattgttctcagtgatccgactatacaggatgggagagaactgaagagacaaaaacggaagcaatcaaatagggaatcagctcgacgctcaagattgcgcaagcaggctgaatgggaggaagtagccaatcgtgcagatttgctaaagcaggaaaatagttcacttaaagaagaattgaaacaacttcaggagaagtgtgatggcttgacctcagaaaatacatctctacatgagaagcttaaagcgcttgaggatgagaaatcaaatggaaattggtacaaggattaaaggctgaaacttctctctctttctgactgctgatgtaaggttacttgtgagctgccgttaggccccttacagaataccaactctgattgctggtgtaatgttctccatatttttttcagataatttggtggtaacctgataggacgacaactaaggaggtattcatatacggtattagacttttgtccgagggggtaaaattgtatcataggatttgacatggttgacggctacagattcttcgtccagttgtgctgctgtgctgtgttgtctttcttccctcttcgtgctagatcctacagaagtacaactatgtagaaacccccaggtggtgtttgaagcctggggggattagcgtgtggtattggtatagctgttgtagagctgctcactgagctt

SEQ ID NO: 92092 - DNA, 1451 bp, Zea Mays
aagagcaaagaggccaagcaaggcccgagcctcggacccaaacccaaacatccatctcatcgatctccttatcccttcccgtcgcataaacccccgccgccgtgacctcgcagcgaccctgccctcgttctaggctttcattgcaggcctcgcgtctccagggcaagagaaaggagaggatggcgtcgccgataccgcgcgagtgggtcgggctgcagcagtttccggcggctacacagaccaagctgcacgaactcctcggcaaactcaaggaggaggatgtgagcacattaacaattctggtgatggggaaaggtggagtgggaaagtcatccactgttaactccatcgttggggagagggttgcctctgtcagcgctttccagtctgagggtctgagaccaatgatgtgctcgcgcacaagggcagggttcactttgaacattatcgacactcctgggcttattgaaggtggatacattaatgagcaggccgttgacatcattaagagatttcttctaggcaagactatcgatgttctcctgtacgtggatcgtttggatgcgtatagaatggatacactggatgaacaggttataagagccatcaccaattcatttggaaaagatatttggcgaagatcattggttgtgttgacccatgcccaactctcaccacctgatggaatcgactataatgatttctttacaagaagatcagaggcacttttgcgatacatccactcaggagcaggaatcaacaaacgagaatatggggatttccccttgccaatagcattggtggagaacagtggaaggtgcaagactaatgagcatggggagaagatacttccggacggaactctgtgggttccaaacctgatgaaagaaattactgttgtcatctcaaacgggagcagtcccactcatgttgatcagaagttaattgatggtccaaaccctaacaatcgccgaaagttgttcataccacttatccttgctgtggagtacttcttggtggtaaaaggaatccggagggcgatccatgcagatatcgcaaacgggaaggtagatgactgggagcagcgttaccgggacctggtgggaagcagggacctcgtagagcagaaaggttctacctcccggaaccgcaaagcctaagttggtgtaccagaaaggattctattcgtgttgagacccacccactcgatctgctgctccttttcctaaatctgtgctgggggctttatagagttcgctggtactacttgaaaaaaaaatgctcctgttgtagttgataagattatgtttcccattttatgacgattggccgtcttcgcaattttgaagatgttatcgaatacgtgttattttattgttttaaattatatatggcatggaaacatcaagtgtggactggagtgctctgaacatcctcaaacgtcggttgat

SEQ ID NO: 92093 - DNA, 1407 bp, Zea Mays
ctcggacccaaacccaaacatccatctcatcgatctccttatcccttcccgtcgcataaacccccgccgccgtgacctcgcagcgaccctgccctcgttctaggctttcattgcaggcctcgcgtctccagtggcagggcaagagaaaggagaggatggcgtcgccgataccgcgcgagtgggtcgggctgcagcagtttccggcggctacacagaccaagctgcacgaactcctcggcaaactcaaggaggaggatgtgagcacattaacaattctggtgatggggaaaggtggagtgggaaagtcatccactgttaactccatcgttggggagagggttgcctctgtcagcgctttccagtctgagggtctgagaccaatgatgtgctcgcgcacaagggcagggttcactttgaacattatcgacactcctgggcttattgaaggtggatacattaatgagcaggccgttgacatcattaagagatttcttctaggcaagactatcgatgttctcctgtacgtggatcgtttggatgcgtatagaatggatacactggatgaacaggttataagagccatcaccaattcatttggaaaagatatttggcgaagatcattggttgtgttgacccatgcccaactctcaccacctgatggaatcgactataatgatttctttacaagaagatcagaggcacttttgcgatacatccactcaggagcaggaatcaacaaacgagaatatggggatttccccttgccaatagcattggtggagaacagtggaaggtgcaagactaatgagcatggggagaagatacttccggacggaactctgtgggttccaaacctgatgaaagaaattactgttgtcatctcaaacgggagcagtcccactcatgttgatcagaagttaattgatggtccaaaccctaacaatcgccgaaagttgttcataccacttatccttgctgtggagtacttcttggtggtaaaaggaatccggagggcgatccatgcagatatcgcaaacgggaaggtagatgactgggagcagcgttaccgggacctggtgggaagcagggacctcgtagagcagaaaggttctacctcccggaaccgcaaagcctaagttggtgtaccagaaaggattctattcgtgttgagacccacccactcgatctgctgctccttttcctaaatctgtgctgggggctttatagagttcgctggtactacttgaaaaaaaaatgctcctgttgtagttgataagattatgtttcccattttatgacgattggccgtcttcgcaattttgaagatgttatcgaatacgtgttattttattgttttaaattatatatggcatggaaacatcaagtgtggactggagtgctctgaac

SEQ ID NO: 92094 - DNA, 1742 bp, Zea Mays
agtcttcgcattgaactctccacacctcacccaccaagagaccaatccagcagcacacgcctctccgtcgtcgtctccgataattcatcgtcgaaatcctgcccttctagcttcgcttccttcagctaactggtttcgatggcgctgctggtgcggagggcacggagggcggcgaccaaggccgcggtgtccctcgccggcagaaccggcagcgtggagcttgccatcccggcgcacttccggtgcccgatctcgctggacctcatgcgggaccccgtcacggcgccggcgggaatcacgtacgaccgcgagagcatcgaggcgtggctggacacgggccgcgccacctgccccgtcacccacgcgccgctccgccacgaggacctcgtccccaaccacgccatccgtcgcgtcatccaggactggtgcgtcgccaaccgctcccgcggcgtcgagcgcatccccacgcccaagatccccgtcacgcccgtccaggcctccgagctcctcttcgacctcgccgggtccgcgcgccgccgcgacgccgctgcgcggtgcgtcgaggtggtcaccaagataaaggtcctcgccagggacagcgagcgaaacaggagctgcttcgcgtccatcggcacgggccgcgtgctcgccgccgcgttcgagtcgctcgctgctgctgctgctgacgccgccgcaccggcggggcgcgtccttgaggacatcctggcggcattggtctgcatgatgccgttggacgaggagtccgccaggacgttggccttgccgacctcgctggggtctctggtcgccattgctgagaacggcagcttggcaggaaggctgaacgccgtgctggcgatcaaggaggtcgtctcatgcgacggggcggccactgatctgagcgggaaggccgacgagatcgtagacgcgctggcaaagatcatcaagtctccaatctgtcctcaggcaaccaaggccggcatggtcgccacctatcacctggcgctatacgacgagcgtgtcgcggcgcgccttgccgctgccgggctcgtccccgtgctcgttgaggtccttgtagacgccgacaagagcatgtccgagaaggcactggccgtgctcgacgcggtgctcgcctcggaggaaggccgcgcgagcgcgcgggcgcacgcgctcgccgtgcccatgctcatcaagaagatgttccgcgtgtccgacctggctacccagcttgccgtgtcggcgatgtggcggctcggaaaggcgcacagcgacggcgaggatgacggtgcggtgacgcggtgtcttgtcgaggcgctgggggttggggcgttccagaagcttctcctgctcttgcaggtcggctgcagggacgcaaccaaggagaaggccaccgagctgctcaagttgctcaacaagtacaagagcgtaggcgaatgcgtcgacgctgtggatttcagagggctgaataagctgtcatcttaaatcaatgggggctgcgatgtaaaaaatgtgtattttgtaaaacagagagacgatttaacttgtaagtagatgcagataggctagttgcaattttgttgggcgtgcttgcatgctatttcagcagcttagtttcaaacggaaacttagatccgaattccgttttatgaagaacttcagtgtaaatttcttgttttaaaagatgtttttttttcttttagataatggaagcaataacatgttctctaaagaagttttagaat

SEQ ID NO: 92095 - DNA, 1088 bp, Zea Mays
ccaaatttgagaggaggggagcctggtccaagtcgccgcgaaaacgacctcatcgaatcgcttggcgatgaggcaaatcgccgagagcccgagacgaataaaccgatgcgacgcgtcttcaatccacctgtccgtgatccgctcacctagaacctactagaaggcgaaccaacccgcacattcacttctcttcccatccgtacgaactcgcagatcagagagaccgaggcgcccgcggttctgctttccttccttgccccgttcacgagagaattttctggagtcttcgactcgagcagggttccgatggcgctgcaatggatgatcctggcgtgcgtggtggcggtggaagctgcggtggctgcgctggtcacgctcccggtgccccgcgctgtgcggggccagatcgtcgcgctcacgtccttgttcctgcagcccctgtccagtgtgatacccttcgccgccttccagatcctcgatctctactggaagaaggagcacagactgatgtgcacctcggagatttgcaccgccgaagagcgcattcgcttcgagaaatctatgtttaaagctcagagaaatgtcattctttgtgtttcagcatgtctcctttattggtgcatttatcgtattgtaaaattgaacaaggatattaaggctttggaagagaccgagaagcgcctcaaggaagagtagatctattgtgttttaaggttagtgattttagtggtgattcaatgtgtactaggttcttgcacttttttcttaatataatgatacacggacctggtgcagtggtagagcctaccgtctgtaaccgaaaggtcccgggttcgagcccctggctctgcatattatgcgggtaaggcttgacgcttaaagataccctttcccagaccccgcacagtatgggaagcctacggcactgggtacgccctttataatgatacacaactcttcctgtgtgttcgcgaaagaattgtgtagttggcaagatcatctttggctcctatttttacttgcttgtaagttgtaataccaatggcagtatgagtagccaaaaaaaaaaaaaaaaaaaaaaaaaaaaa

SEQ ID NO: 92096 - DNA, 1011 bp, Zea Mays
ccaaatttgagaggaggggagcctggtccaagtcgccgcgaaaacgacctcatcgaatcgcttggcgatgaggcaaatcgccgagagcccgagacgaataaaccgatgcgacgcgtcttcaatccacctgtccgtgatccgctcacctagaacctactagaaggcgaaccaacccgcacattcacttctcttcccatccgtacgaactcgcagatcagagagaccgaggcgcccgcggttctgctttccttccttgccccgttcacgagagaattttctggagtcttcgactcgagcagggttccgatggcgctgcaatggatgatcctggcgtgcgtggtggcggtggaagctgcggtggctgcgctggtcacgctcccggtgccccgcgctgtgcggggccagatcgtcgcgctcacgtccttgttcctgcagcccctgtccagtgtgatacccttcgccgccttccagatcctcgatctctactggaagaaggagcacagactgatgtgcacctcggagatttgcaccgccgaagagcgcattcgcttcgagaaatctatgtttaaagctcagagaaatgtcattctttgtgtttcagcatgtctcctttattggtgcatttatcgtattgtaaaattgaacaaggatattaaggctttggaagagaccgagaagcgcctcaaggaagagtagatctattgtgttttaaggtggctgttgtctgctcctggtcttcagaagatattgttaaaatatcatggttcataggatatctagtgtatagtcttcttgcagcaaagaagataatgttttgctgtttcagcaaacatctgaagtatgagtcttattattaagaggtcttttctttaacttatggcgagtttagcatcggtcagttatcaaacagttaaagcgttttctgaaatcttgtttgaatatccgcagtcctttttttggtttggcatgccgaattattctgaaatgtttagtaccccgttgttcgtattt

SEQ ID NO: 92097 - DNA, 243 bp, Zea Mays
tagagcaaggaaaaagactgtatgcaagctaccaaatacagtcaatacattacattcaatcacaggttgcatactcctttaagccgttgaattttacattaggacagtttttactacgagacagcgtcctgagatcagacaacaacctcagccagacgagaaaagccgccatttagaatctacctcctcacaggaggcgcgctacctcgtccaacaggaccaccaccacgaccagcagcagcc

SEQ ID NO: 92098 - DNA, 1607 bp, Zea Mays
aaccatgaaacggttctctttcccgttccaactcccatccaaacgccaccatacagtgctccgttcagcgcctaccttttcttctgcccgtccaccgtgcgcgaggcgctctctcgtgtagctactagacgaccgccaccgccgtctggtcttcgtcgggtccttcgccgatcaacacccaccatttatcgggtgtacatgtgtacacccatgtcctacactgggtccgcccccgagccttctgatcctaacaggaaacctgcaaaaaagcagactcgacaatgggctgcgtggacacaccaagaggaggagatttttttcaatgcgctgcggcaagtaggaaaaaactttgacaagattacacaccgtgttcagagtaaaaacaaggatcaggtcaggcattactattatcgtcttgttcggcgcatgaagaagctactgggtcctaggttctcacttgatgcaaaaaactccaaggataccattgctgctatgcttcgctggtggtctctgcttgagaaatttagctgcactgcatcaaagttgcatctcaaacctcggaggttcaaaacatttgtagaagcactggggaaacaactgctaaaggacagaaataagtccaggagaaagcgttcacgagtggatatgtgcctaccttctccatctccaattatcagcaaagctcctgggaatgagaatcctcctgtaaagttcctgtcagtagatgctcagaatggtagcagagtagcatctcctaaagggtcaattttcaagcaggttgcagaaccgatttctaacaagccagggacaactaaaggggaactctctgccacaagaaccgtgaaacaaaaaaggaaggcaggtggcgctgttgcatctgctgcatataagaaatgggagagagcagccatggctggtgtttctttagttgctgatgcagctgaggagctcgagcgcaacacgattaacccaggcattttttgtaatgttgatgcaagaacactgacttcattatcagaaagactttctagcattgatggcattagcacaaatcatatgaaggaagcagattcacaggcacctgtgaagctgaagctacagttatttccaataaatgaagctactcggaaggcattggagaaggatgaccataatcctcatctagagctcacattaagctctagaaagaaaatatcatctgtgctagaacatctaaaccgaaaatggggtaactcaaacatcgcatctggagagcttattctttttccatattgtgctaatcaagaggatttggctacatatcagaggtggacaacaagagatactgttgcagtagctgatgtgtttctttctgtgaatagcccgtctgttttccgtttaaggtatggttgggtttcccttgttgagcttggagcaggagtaagtgaaatatctttaacccattttgaggattgcatgataccagaagtcatccaagtcaaatcgccatcaggagataaggcttgtgttcaaagtgatggtactttcctcagtaactgcattcatgatcaatatccttgtagttcgatgttattgcatattgttagatgttgtattgtgtgcataat

SEQ ID NO: 92099 - DNA, 782 bp, Zea Mays
cggccaaaataatcctgaactcctttgccaacagaatagtggcacaaattacatcagaccagaaaaaaaaaagaaacataaatgcagtaccgacccacaggagcacagtagcaaagaaggaaccctaaaacagtaaaacaagatatgtaattcccattcaaactaatttgtctttccaacaacacaaaagggcgtcaaatactaatgctaccccgtgctaaggaacacaaaaagaacagcacaacatggcaaccgatccttttaccaaaatatgatattgtataaaaattaatttaaaattcaactaagaattgacatacacacacttagggatgaaagtggatatccaaattgtttagacaaatttaatattttaaaatagatatgtatgaaatttcatgatgatcttttcttatgttatcaaacacataattataattagaataaaatttgtataaattgttttatgcatttttcgctccttacagcaaaaaagatgaaaagaaaatatctgattccatatttttatatgtatccgaatttcatacctatcatttgagaaaatatatgatacaaataagatttaccttttattaatctttacaggctcaatggcaaaaacaaaaaatacaaatttgcatagaagattatatatcttatttattcgcaatcaaagaaaaataaataaatatccaaataagtatccattttcatcccccactatttacacagaaaattttgtgcaacatctaattaaacagtcacaaaagcacccatgcgtc

SEQ ID NO: 92100 - DNA, 1796 bp, Zea Mays
gattttggttagcgagtcgctaatcgttgggtggcgagctggtgcgcaggagcagagccaaagccggtgctccgcacggtgctgcacccgagcgtggggctggagcccaaggtgatcatcccgaacccgaaccggcgcgcgcggtccatgtccatggacttggacgccccatgctgcggtcacggcgccgcggacgcgccggcaagcaggtgcttggacgacgccaccaaaggcgacggcggcgtggcacccgagcagaggctcgggtggccgctgctccgccgcgcgcacgccgccgccgccgcctcagctgcccctgtacagacgcccggcggcaagaatcatgagccgcggaagcagtcggtggtgcactgggtgatgagcctgccccggcggtccgcgccgtcggagtccgccgagccgcatgccggggcggggctcgagtcggagctcaaggcaatgcttggcggcagtggcgcgcggtgccggtggttccgctacgaggagctctacgactccaccaaccacttctccgcagagaacctgatcgggaacggagggaacagcagggtgtacaggggcagcctcgcctgcggccggcaggtggcgatcaagttgtgcaaggcgtcggcggaggcgtccaaggacttcctccgggaggtggacatcatcaccaagctgcagcaccaccggatcgtccccttgatcggcgtctgcgtggaaggccgcaacctcatctccgtttaccgctacctccccaggggcagcctcgaggacaatctacacggggaaaggtcaaagccggcgctgtcgtgggagaaccggtacaaggctgcgctggggatcgcggaggctctgagctacctgcactccggcagcccgcggccggtgatccacagggacgtcaagtcgtccaacatcctcctcgcagaagagttcgagcctcagctatccgatttcgggctggccatctgggcgccgacgaatccgacgtccgtgacgcacagcgacgtcgtcggcacattcgggtacctggcgccggagtacttcatgtacgggaaggtgaccgacagggtggacgtgtacgcgttgggcgtcgtcctgctggagctcctgtccggccggaagtccatcagcagcgacgggtcgtcacccaagggccaggagagtctcgtcatgtgggcaactccggtgcttagcagcggcaacatctgtgacctgctggacccgaggctggacgtgaagcacgacgaggtggaggtcaggcggatggcctctgccgcgtcgctctgcctccggaggtcggctcgactcaggccgccgatatcgcagatactgagcatactacgaggagaaagcgcggcgagcatcgccgaccagggcgcgacggagccggactgcgtggacgacgaggcgtaccccgccgcgaacgtgaggtcgcacctgggcctcgcgcttctcgacgtggaggactcggagtccatctccagcacggagcacagcagcggcctcagcccgttggaggagtacctgcgagaacgttggagccgatcgtccagcttcgactgatgattcatgcccgcgctgcgattttgtttgtgggcatgtgttttagtttttttttccctctccgccggtaattcacatgtttatcgtatggtttggttaccggggccgtgtgtacagtggacagtcaaaaatcaccagagcgagccacatcttcggcgacaaagacgcgattggttgagcttgacctgcctcgcacctgccggccaggcaagttgcgtacaagtgac

SEQ ID NO: 92101 - DNA, 1153 bp, Zea Mays
cgtccccgtcacacctctgcccacgcaccatcgccgatcctattgcccactacaatttccccatttctctcacgtaagtaggccgcaacctcatctccgtttaccgctacctccccaggggcagcctcgaggacaatctacacggggaaaggtcaaagccggcgctgtcgtgggagaaccggtacaaggctgcgctggggatcgcggaggctctgagctacctgcactccggcagcccgcggccggtgatccacagggacgtcaagtcgtccaacatcctcctcgcagaagagttcgagcctcagctatccgatttcgggctggccatctgggcgccgacgaatccgacgtccgtgacgcacagcgacgtcgtcggcacattcgggtacctggcgccggagtacttcatgtacgggaaggtgaccgacagggtggacgtgtacgcgttgggcgtcgtcctgctggagctcctgtccggccggaagtccatcagcagcgacgggtcgtcacccaagggccaggagagtctcgtcatgtgggcaactccggtgcttagcagcggcaacatctgtgacctgctggacccgaggctggacgtgaagcacgacgaggtggaggtcaggcggatggcctctgccgcgtcgctctgcctccggaggtcggctcgactcaggccgccgatatcgcagatactgagcatactacgaggagaaagcgcggcgagcatcgccgaccagggcgcgacggagccggactgcgtggacgacgaggcgtaccccgccgcgaacgtgaggtcgcacctgggcctcgcgcttctcgacgtggaggactcggagtccatctccagcacggagcacagcagcggcctcagcccgttggaggagtacctgcgagaacgttggagccgatcgtccagcttcgactgatgattcatgcccgcgctgcgattttgtttgtgggcatgtgttttagtttttttttccctctccgccggtaattcacatgtttatcgtatggtttggttaccggggccgtgtgtacagtggacagtcaaaaatcaccagagcgagccacatcttcggcgacaaagacgcgattggttgagcttgacctgcctcgcacctgccggccaggcaagttgcgtacaagtgac

SEQ ID NO: 92102 - DNA, 3306 bp, Zea Mays
aacctccaccaaggaattctttgcccaatgcgctcatcgtccccgtcacacctctgcccacgcaccatcgccgatcctattgcccactacaatttccccatttctctcacgtaagtaggccacaccatcgcgtcatctctgctccgcctccttcccgccggcttcccgccgtcctttcgctgccgctgccattaccgccactgccgcaccggctggccgcgctaaaacagcagccgcgcccgcgctacgctgaccggcgacggcggccggcaagactgcccgttcgtccggtcccttcactccaccttcgcgcaacggcacaaggcggcaagggaccggacggggccggcctcgtgctttttgtgcgtggttggagtggttgagcgagccgatggcgacgatcccgggcggcgtggcgccatgacggcagccatttcaatacgcgccccccagcagctgaaacctgacaagctaaccagattttaggtggttacccgtgccgtgtcgcctgcctcgcacacccctcgcccttcgcctcttttccaccctggacccaggatatagttcccgctctcgtcgcttgcgcttgtatcttcctcgtctcaggcctccccgccgcgcctttcggttcgggttcagcgaattcagccacgaagcgagcgggcggccggagggttcctggtaacggaactcgctcgctttccagtttccaggtcaggccaggcgacgaccgccgcctcggcagttttctattccagcgtcgcggttccgggtcagaaattggttgcaggctcgcagccagccagtagcccggcgagatcgtcttgtgacagcggcaagtccacggcggttagcaggttgagcgaaccagtggcctggctacttaccagcttgccgtgccatgtgcaactgcggttcttcctgctgatctcgggagctgcaagcccggctctcggccaccgttcgtgggcgtcatggcggcggaccacggggagggcgtcgggcggtgcatactggtggggctgcacatggacgccgtcggcagggacctgctccagtgggcgctccaccaggaggtcaggcggggcgaccgcatcgtcgccgtgcacatttaccgcaagtccgacaagacgaacacactgaagctgatcaggacgctggacgactacctggcggaatacgaggctctctgcaaccagaaacaggtggttctcgtcggccgggtgacgccgggaagctcgatccagaaggagctggtgaaggaggccaagctctgcgccgccatggtcgtggtgcttggcgccaataagaagtactccttcggagggtcgtcctgcctggccaagtactgcgccaagaagctgccgccgacaaccaccgtcgtcgccatccaggacggcaaggccgtcttcgtccgggaggcgcccaggccgccacttggagcagagccaaagccggtgctccgcacggtgctgcacccgagcgtggggctggagcccaaggtgatcatcccgaacccgaaccggcgcgcgcggtccatgtccatggacttggacgccccatgctgcggtcacggcgccgcggacgcgccggcaagcaggtgcttggacgacgccaccaaaggcgacggcggcgtggcacccgagcagaggctcgggtggccgctgctccgccgcgcgcacgccgccgccgccgcctcagctgcccctgtacagacgcccggcggcaagaatcatgagccgcggaagcagtcggtggtgcactgggtgatgagcctgccccggcggtccgcgccgtcggagtccgccgagccgcatgccggggcggggctcgagtcggagctcaaggcaatgcttggcggcagtggcgcgcggtgccggtggttccgctacgaggagctctacgactccaccaaccacttctccgcagagaacctgatcgggaacggagggaacagcagggtgtacaggggcagcctcgcctgcggccggcaggtggcgatcaagttgtgcaaggcgtcggcggaggcgtccaaggacttcctccgggaggtggacatcatcaccaagctgcagcaccaccggatcgtccccttgatcggcgtctgcgtggaaggccgcaacctcatctccgtttaccgctacctccccaggggcagcctcgaggacaatgggaaaggtcaaagccggcgctgtcgtgggagaaccggtacaaggctgcgctggggatcgcggaggctctgagctacctgcactccggcagcccgcggccggtgatccacagggacgtcaagtcgtccaacatcctcctcgcagaagagttcgagcctcagctatccgatttcgggctggccatctgggcgccgacgaatccgacgtccgtgacgcacagcgacgtcgtcggcacattcgggtacctggcgccggagtacttcatgtacgggaaggtgaccgacagggtggacgtgtacgcgttgggcgtcgtcctgctggagctcctgtccggccggaagtccatcagcagcgacgggtcgtcacccaagggccaggagagtctcgtcatgtgggtaagagtgccgtccgtcctaccgatcatgcatctcatgtctctggcaattcatctgtgacgcagaggaaggagtaacaactgccttgtcgtgacaggcaactccggtgcttagcagcggcaacatctgtgacctgctggacccgaggctggacgtgaagcacgacgaggtggaggtcaggcggatggcctctgccgcgtcgctctgcctccggaggtcggctcgactcaggccgccgatatcgcaggtcggcccactgccagcctcctccaaccagctttagctcgtgtgatcttgcttgcattccatccaccgaccggtttcttgtgccgcggcgccgcgcagatactgagcatactacgaggagaaagcgcggcgagcatcgccgaccagggcgcgacggagccggactgcgtggacgacgaggcgtaccccgccgcgaacgtgaggtcgcacctgggcctcgcgcttctcgacgtggaggactcggagtccatctccagcacggagcacagcagcggcctcagcccgttggaggagtacctgcgagaacgttggagccgatcgtccagcttcgactgatgattcatgcccgcgctgcgattttgtttgtgggcatgtgttttagtttttttttccctctccgccggtaattcacatgtttatcgtatggtttggttaccggggccgtgtgtacagtggacagtcaaaaatcaccagagcgagccacatcttcggcg

SEQ ID NO: 92103 - DNA, 1998 bp, Zea Mays
atgcacgcatcgcggagccacctccccacgtccggcgagtctctcctccgccttttggccgcctgccgtgcacccgcccacctcccatccctgcgcgccgcgcacgcgcggctcctcgtgctgctccacccttctcacccatccgcggcacacgctaacgtcaaactcatccaagcctacgctgcctgctccgcgctccccttggcgcacaccgtgctcgagtcctcctcccccgacggcaggagcagaaccaccaccgtctgcttcaacgtactcattcgcgcgctcaccgcctcctctctccaccgcgatgcgctcgtcctcttcgcctccatgcggccgcggggcccagcctgcttccccgaccattacacctacccgctcgcgctcaagtcgtgctcggcgtccaaggatctcctcctcggcctccagatccactccgccgtcgctaagctccgcctcgacaggaacgtctacgtggcacactccgcgatcagcatgtactcgcggtgcggccgcccggaggacgcttacagagtgttcgacggaatgccgcaccgggacgtcgtctcttggaatgctatgatcgcggggttcgcgcgtgtgggtctgttcgaccgtgctattgaggttttcaagcagtttgtggtgctgcagggttcaatgccagatgccggcaccatggcaggtatcttacccgctatggggaacgccaagccagatgacattaggtttgtgaggagagtgtttgacaatatgcagtttaaggaacttatatcttggaatgctatgctcgctgtatatgctaacaatgaatttcatgttaaggcagttgagctgttcatgctgatggaaaaggatgaggttgagccagattcaattactctagcaactgttcttcctccatgtggggagctatcagcattttcagtgggaaaacgtatccacgagattatcaagcgaaaaaatatgtgccctaacttgttgcttgaaaatgctctcatggacatgtatgcaagctgcggctgtttgaaggatgctagggaaatctttgatttgatgagtgcccgggatgtgatatcatggacttcaatcatatctgcttatggaaagcatggtcatggaagagaggctgttgatctttttgagaagatgctaggacaggggctggaaccagactctattgccttcgttgctgttctagcagcatgcagccatgctggacttttggctgatggaaagcactactttgattccatgacatccaggtatcatatcattccaaaagcagagcactacacttgcatggtggaccttctcggccgtgctggatgtataaacgaggcatatgattttatcacgacaatgctgattgagccaaatgaaagagtctggggagccttattacaagcttgtcgaattcactccaatatggacattggactcgtggcagcagacaatctgttcagcttagtacctgaacaaacaggatactatgtgctgttatctaatatgtatgctagagctgggagatgggcagatgttacctcggtgagaagtgtcatggtgaataagggtatcaagaaatttcctggtactagtattgttgagctaggggatcaggttcacacatttcatattggtgatagatgtcacccacaatctgaaatgatctaccataaactggatgagctattgggaaaaataagggggatgggttataacccagaggtagaggctacacttcatgatgtcgaagaagaagacaaggaagaccatctttctgttcacagtgagaaattagctattgcatttctccttttgaacactagtccaggtacaattatcagggtgactatgaatctcagaacctgtagcgactgtcatcttgctgcgaagctgatttcaataatcacctgtagagagattgtcctcaaagacaccaataggatccatcatatagtacaaggagtttgctcatgtggggattattggtag

SEQ ID NO: 92104 - DNA, 1633 bp, Zea Mays
agcccggatcggaggtggagggtgggctttgtgcagaggccattccctcgctctctatactggagtagatagcagcaggaggaagataacatctcctcaaaaatagatatagcttcttcctctttggttctcttcgttcttttctttcttcttcgatctaaacacgccttcgatccatcctagtatccttgctgttttttcttccccaaggattttgctagctctcctgttgcagatttcctctcaaactaatacgagttctctcagctcctaaccacctgaattctttttagggagcgcttccttttccattcagcaatcaatatcgaaaacctgtctttcttgagcaaaacagcgcaaatactacctaatcaagaagcttttgttctatagatcgacaaaagcaagatggaaaacgttctcctggatcgatcatctagaagccttgagttcccgaagcgatccctaattggtcgcggccggcgggggccagctggcgcgaggacggcggtgccgccgttcggctcgtacagctcgttcacgacgtggcaatcacacaaccacctgcacaaaggtggcgcatgggcctccgctcccgcgcttccatacgcgaggcctccggtgatatactcgtcgccgtctcttcctctcctgccgtcccaccaaccgccgctcctgccgctcccaccgaccgctgcaaagtacgccactttccccgccctaccagcagctccgcccccgccggcgtcggcgccacgcgccggcagggcagcagcgggaagcaccacagtatcagtttcggcagcagtgccgcctgcagcccctgcgccgccgcgccagagggacaggaggaggaggccggcaaggccgcctccgccgacgatggagaggtccgcagcgcagaagaagaagccgctggagcgcgcgacgcctctgccgcccgcgccagtggtgacggaggcactggacgacctcgagcaggaggtggccagggacttcgttcaggacctgctgcacgtgctggcgccgccgccaagcagcctgccgctgcccagcttctccctcgtcgtgaaagcgtcctcccctaccaaggacaccagagtggtgatgccggccgcgccgtcctgcaacgtggaggccgccaccgccgatggcatccgcggcctcctccgtctgtaggacagcagggagaaggcccatctgccagtctgtcgtgcttggtattccataatatttccccgccaatattatttttttggttgggaaaattaaatgcgtagaaaaatattgcaagaaaagatgtgatgcttgagctctggtcggtcgagttgtccgcagcgtgactgtgatgttggcgttggatggatgctacctctggcggtgcaaaagcgagaggaagacgacgatgtcagctaaggttagtttgtgcgagacgtcggtgtggtagatatctagggttttacgttagtgtctactgccgtactccactagtactgctttttcttgattgggtgatgggttttttgaattaccttgtatcaagatcactgcatatatacgatgtaatgtatgcaagtgcgtgtgactttacatatatattatatatttgaaacattgtattcttgttggattt

SEQ ID NO: 92105 - DNA, 770 bp, Zea Mays
gcagaagccaaggggatggaggtcacaatagcagagaagaagcctcgggccgccgatgacggcggcggcctggttgagaggctccccgaggcgctcctggtggaggtgctggcccgtgtcgatgtcgatggtgcctgctccgccgccgcgtcctgccgctcgctctactccgccgccaacgtcgttctcctcgccctcacctccatcgacctctccgtgagctttagcctccccttctcacccaccgcctgccaaacaggcggcaacaacaatgagaattccagcggtatggcagctctgagaccaaacaccatagttctatctaggcttagtggcagtggcaaaaccactatttactaccagaaagaaaaagtaaaacttgtgcatgttattgatgttcctggtcatgctaggctcaaacccaaacttgatgaagtcctgcctaaagttgctacagttgtctttgttgttgatgctcaagatttcttgtctagcatgcaagctgctgcagagtaaattttgcccctccccctccttaatttttaccaaatgcatttggtgtctatttctatttcatctactttcacttttatgtttagatttatatgagccatcaacttaatgatgattaaccttgattgcaccagctgaagttggtgcataaggctgcaacaccgtctagtggagggtgttctggacaaagaaatcttgtacgttaaaataggaggatacaagaagctggagtggttgtctgaaggctttcgaactgc

SEQ ID NO: 92106 - DNA, 2938 bp, Zea Mays
ctgctgccgcctccaccgctcgtcctcggcatcggcacacggtgccatcactctcccactcccactcactcacacactgtctcgctcgctcgcttgctcacccaccaatggcgagtcctcctcgctacccgttccccgtcctcctcctcggcctcgcgctggtggcgttgatggcgccggcgctactgcgagcagatggcggcgccgaggaggaggaggaggcgcggaagacgtacatcttccgcgtggaccacagcgccaagccgtccgtgttccccacccacgcgcactggtacgcctccgccgcgttcgcctcggcggcaccgggggcaaccccgctgcggccgctccacgtctacggcaccgtcttccacggcttctccgcgtccgtgccggcgtcccgcgccgaggagctgcggcgccacccggccgtgctcgccgcgttcgaggaccgcgcccgcccgcttcacaccacccggtcgccgcagttcatgggcctccgcgcgcgcctcggcctctggtccctcgcggactacggctccgacgtcatcgtcggggtgctcgacaccggcgtctggcccgagcgccgcagcctgtccgacaggaacctgccgcccgtccccgcgcgctggcgcggcggctgcgacgccggccccggcttcccggcctcgtcctgcaacaggaagctcgtcggcgcgcgcttcttctcgcagggccacgccgcgcgcttcggcgcctcggccgccgcgtccaacggctccgtcgagttcatgtcgccccgcgacgcggacggccacggcacgcacacggccaccaccgccgcgggcagcgtcgcgtacggcgccagcatggagggctacgcgcccggggtcgccaagggcgtcgcgcccaaggccagggtggccgcgtacaaggtctgctggaagggcgccggctgcatggactccgacatcctcgcgggcttcgaccgcgccgtcgctgacggcgtcgacgtcatctccgtctcgatcggcggcggcagcggcgtcacggctccgttctacctcgacccgatcgcgatcggcgcgtacggagccgtctcccggggggtgttcgtggccacctccgctggaaacgaagggccggcctccatgtcggtgaccaacctcgccccgtggcttgccaccgttggcgccggcaccatcgaccgtaatttcccggctgaaatcgtgctgggcgacggccgacgcttgtccggcgtgtcgctgtactccggcaagcctcttaccaactcatcgctgcctctgtactaccccgggaggactggcgggctctccgcttcgctgtgcatggagaactccatcgacccttcactggtgaaaggcaagatcgtcgtctgcgaccgcggcagcagcccgcgcgtggccaagggaatggtcgtcaaggaagctggtggcgcggcgatggtccttactaacggggaggccaacggcgagggactggttggagacgcccacgtcctccctgcttgcgcggtgggcgagaaggagggcgacgcggtcaaagcgtatgccgcgaacgcctccagcccgatggcgacaatcagcttcgggggcacggtcgtcggcgtcaagccggcacccgtggtggcctccttctcggcgcgtggacccaacgggctcgtcccggagattctcaagccggacttcatcgcaccgggcgtcaacatcctcgccgcgtggacgggcgccacgggtccgaccggcctggagggcgatacccgccgcacggagttcaacatcctgtccgggacgtccatggcgtgcccgcacgccagcggcgccgccgcgctgctccggtccgcgcaccccgggtggtcgccggcggcgatacggtccgcgctgatgactacggccatcgtgacggacaaccgcggcgggcccgtgggcgacgaggcagagcccgggcgcggcgcgacgccgttcgactacggcgccggccacatcaccctgggcaaggccctggaccccggcctggtctacgacgccggggaggacgactacgtcgcgttcatgtgcagcatcgggtacgagccgaacgcgatcgaggtggtcacgcacaagcccgtggcgtgccccgcgacggcgagcggggccaaggccagcggcagcccctcgggctccgacctcaactacccgtccatctccgtggtgctccgcggcggcaaccagtccaggacggtgacccgcacggtcaccaacgtcggcgcccaagcttcggcaacgtacactgcgcgcgtgcagatggcgtctagcggcggcgtgaccgtatccgtgaagccgcagcagctcgtcttctcccctggcgccaagaagcagagcttcgcggtgacggtgactgcgccgtctgctcaggacgcagcggcgccggtgtacgggttcctcgtctggtcggacggtggcgggcacgacgtgcggagccccattgtggtgacgtggctgcagcccatgtgactgtcaggtggggacaactctacggcctctgtggagcctgccctggctgggactgccgataaagatggcagcaggagtcaaggcgcagtggccagtgggccagtaacggtaaagtcgtgcggtcgggactgcgccattaaaggtgggtcctgcacgctcgctctgcagaattgattaaccgggcgtgctgtaacagtatgggcttatccgagtatagtgactactggtagtgacagtggtgtgtgaaaaactgataactctggtgtttctacttgcttgactgtgtatggaggcaacagtacttgcttgccactggcggacaggacacaggagcaacggaaagaaatggagcaacaggacaaagctatgaaaaacgagtactgctagctttggtatttctatgtggattatctgaatagttttatcgtccacttgcattctctccc

SEQ ID NO: 92107 - DNA, 1691 bp, Zea Mays
gtgtggggggagggagcgaatagtatgtggctattgcagcattattgccttttccccattcgttgagatgagagggagaggaatgaagggaatttttgggctgcttgttgccgcactctttttataaagtcgacccaccctcacctaattttaatgtcaaaagaacccgcagcagggaagactgagagtctgggagatagagagaggagagggagggtttcctcaaagagaacccgaacccaaacccaaaccgaagcagagcacactagcgttccctcaccagggcgtccatcccagcagccatggcgatggcgtacaagatggcgacggaggggatgaacgtgaaggaggagtgccagcgctggttcatggagatgaagtggaagaaggtgcaccgcttcgtggtgtacaagatcgacgagcggtcgcgcgccgtgctggtggacaaggtgggcggccccggggaagggtacgaggagctcgtggccgcgctgcccggcgacgactgccgctacgccgtcttcgacttcgacttcgtcaccgtcgacaactgccagaagagcaagatcttcttcatcgcctggtcaccggcggcgtcgaggatcagggccaagatcctgtacgcgacatcgaagcaaggcctgcggcggctgctggacggggtccactacgaggtgcaggccaccgacccctccgagatgggcttcgacgtcatcagaggccgcgcgcaatgaggcccccgctgcgctctgctcctatttacgtacttacctgtgcgtgggcgtgttctcctactactcactgctcagtagtcagtagtcatctgcgttcgtgtgtgtgtgtgtgtgatcggccggatgctaattggcgttggtgtgctcccgtagcgatcgatgctgccaatctgacgaggcttcgcgtgtgtttgctttgctattttcggttctcgggagagatggtgcaggcgtggtgtgttgatgttgatgggtggagtagaagctcaggggagtggcagcggactaatgaaacgtccacctctgcgacgtagaattccactgaaaaaaaaatgctccagtgtaccataagctgcttcagatttgatcgtgttttctctcccatggtggcgtttctacctacatttttcttagaaaacacatttctagttactcgttcagttctgaattataaaatgttttgatttttctagatgtattgcttttgctacgtttagatatacacaatgtctagatagatagttaaagcaataaatctaagaaaaatcttataatttagaacgagacaatatgattcagagcaaagttgggttacgagagcaacatagaagaaaaaaaagtacaaagtggggaatagccatggcaattaaaatgaagttgtgtttaaaaattgcttgctccagttctcaggatctgcctagttttccggtccgttttttagaatcgttttgatgaaaatcgtccgaaatcgacataaacatgccgagtcgtagtgatagtagtaatccgtcacttttaaaacctaaaccatataaactcgtttatctttctttgcacgtaattcttacgatactcatattaataaaagtttgttagaaaaaagctaaaacaaatagtcccatattaggtactctcacactttccagtctagaccttgtactatatagttgggccaac

SEQ ID NO: 92108 - DNA, 941 bp, Zea Mays
gtgtggggggagggagcgaatagtatgtggctattgcagcattattgccttttccccattcgttgagatgagagggagaggaatgaagggaatttttgggctgcttgttgccgcactctttttataaagtcgacccaccctcacctaattttaatgtcaaaagaacccgcagcagggaagactgagagtctgggagatagagagaggagagggagggtttcctcaaagagaacccgaacccaaacccaaaccgaagcagagcacactagcgttccctcaccagggcgtccatcccagcagccatggcgatggcgtacaagatggcgacggaggggatgaacgtgaaggaggagtgccagcgctggttcatggagatgaagtggaagaaggtgcaccgcttcgtggtgtacaagatcgacgagcggtcgcgcgccgtgctggtggacaaggtgggcggccccggggaagggtacgaggagctcgtggccgcgctgcccggcgacgactgccgctacgccgtcttcgacttcgacttcgtcaccgtcgacaactgccagaagagcaagatcttcttcatcgcctggtcaccggcggcgtcgaggatcagggccaagatcctgtacgcgacatcgaagcaaggcctgcggcggctgctggacggggtccactacgaggtgcaggccaccgacccctccgagatgggcttcgacgtcatcagaggccgcgcgcaatgaggcccccgctgcgctctgctcctatttacgtacttacctgtgcgtgggcgtgttctcctactactcactgctcagtagtcagtagtcatctgcgttcgtgtgtgtgtgtgtgtgatcggccggatgctaattggcgttggtgtgctcccgtagcgatcgatgctgccaatctgacgaggcttcgcgtgtaagaaaaaaaagtacaaa

SEQ ID NO: 92109 - DNA, 3105 bp, Zea Mays
gtgatacacatccgtcccttctagtctcctaataactagtttctatcttgctccccaaaccagcgcaaaccctgccctgacaccggcagcgacacgtccaccggcggcgccatggtgctcgaggcaacgatgatctgcatagacaattcggaatggatgcggaacggcgactacgctccgtcgcggttccaggcgcaggccgatgccgtcaacctcatctgcggcgccaagacccagtcaaacccggagaacacggtaggcgtgatgacaatggccgggaagggtgttcgcgtgcttgtcactcccaccagcgacctcgggaagattctcgcctgtatgcacgggttagaagttggcgctgaggcaaacttggctgcggcaatccaggttgcccagcttgctctaaagcatcgccagaacaagaggcagcagcagaggattatagctttcattggaagtcctgtgaagtacgacaagaaagttttggagaccattgggaagaagctgaaaaagaacaatgttgctcttgacattgttgactttggtgaatccgatgatgaaaaacctgagaaactggaagcattgattgctgctgttaacagcagtgatagcagtcacattgttcatatccctcctggtgaaaatgccctctctgatgtcctcctaagcactcctatatttactggtgaagaaggtggaagcggttttgctgcttccgcagcagctgccgcagctactggagcatctggatttgaatttggtgtggacccaaacgtagatccagaattggcacttgccctgcggttgtctatggaagaagagcgggcaaggcaagaggctattgcaaaaaaggctgctgaagatacttctaatacagaacataacaatgtcccaagctcaaacagtgattctgttatggctgaaggagaacctgcctcaaatgctgctgctggtgacaaagaacaaccaaaggatgatgacgatctactacagcaggcacttgcaatgtcaatggagggtggtgcttcaggatctgcagctgtgactgactctgctatggcagaagctgctcttcaaatgtctgtccaggatgcaaacatgtccagtgacactgatatgagtaaggtgtttgaagacagaacgtttgtgtcatctatccttaattcgcttcctggtgttgatcccaatgatccatctgttaaagatttgctggcatcgttgcacagccagggagagcaagagaagaaggaagacacgtcagacaaaacagaagacgataagaactgatatagccatgttcacgcttccatgcgtacaaagaaattaaagaccggtctccattgactgcgtttactctcttggtcgtggagtttgtttatcctcatataacggtgctttgattataacttaccgccgagggaatttgtattatgacactgcaacaatcttctctccatatatgttcaagggattttcgtgtttcaatgctctccatatatgttcaattgatttccgtgttacaagttctctttgcactgtttaatttgaagcgacacactatatattattttattttgaagcgacaaacaggaaattcgctctcgtgtaagccgatctggttagttattgtaagctgttgccctacaattttacagcgaccggcgaccagagaggcggctggcaaatatctggaatttacgcgcacttcgtagaagatgctagatgtctacgagcatgtccagcgtttctatattatgaaagcagaacgaaaacggcgtcagctaggccatccgtcgtctaaaattcaggtggctcggcgtctccatatgtcgtgaaggttcgagaaccatcgtatgttcacaaatcgatttcctgtcacacacaggctctctacgatacgggaagtcaggaaccttccggatggactccttcctcagccattgtagcttgcctcgcggcactggcggcggctccgcccggccagcacaaccgcagtcccagtcttctagacgaagcgaacgtgcgacaggaaaaacacggccgctgttggtcgaatccacgccggcgatgtcccctgccgccgcccaactgagtggtacaggtacatcgtacaccaatccatccgatctctaggcctaataccttggaacaagcaaaggggagcgatgcacgacgtcaatggaagactccgccggccaggaggtctgcgtcgttcttggcattggggacaacatcaagggcctcttggccacgctgtcgcgcgttgacgccatcatctcctatgattcgtcccctcgctcaacctgcatcctatcataccctatcccgtgccaagtccccgattcacggtggctgtgtggtagtcggtaatgctgcatatgaacttgggcgacattaagtgtgaggtgttctgcaaccaggtgccccgcacggcggagaacttcttggccctctgcgctagcggctactacgacagcactgtgttccaccgcaacatcaagggcttcatggtataaggcggcgaccccatcggttccggcaatgcagggcctccatctgggcaccaagttcgccgacgagttcagggagtcccaaggtagcacactatgcagtgcaggagctaacagcagacccaacgccaacggcagccgattcttcatcacctacgccaagcagccgttctgaaaaaaaattgaacagagtcacccaagaatgtgcatgtatggaatgacagcttcagattaacgacaaccacaattttccaattgtgtggttttgatggagtcatgtatgggtaaccaggaggccatctaaataaatccgagaactacgactcattatattaagaagataggaaaaaaaggcttgagaattacgcctcatgattcatcgcatttttcttggtcgttgttgcttcaaggataacaggtatatttactgcaactactcagcatgttaggtaatatcaattttttaagttgttgcatcatcatatcttattttaagttgttgtctcaccacatgtactactttataacatgattactaagttgagtgcataattattttgtgaccactaaaaccaatattttgtatgttcagtac

SEQ ID NO: 92110 - DNA, 1571 bp, Zea Mays
aggacaatggttggatagagagcgtgatacacatccgtcccttctagtctcctaataactagtttctatcttgctccccaaaccagcgcaaaccctgccctgacaccggcagcgacacgtccaccggcggcgccatggtgctcgaggcaacgatgatctgcatagacaattcggaatggatgcggaacggcgactacgctccgtcgcggttccaggcgcaggccgatgccgtcaacctcatctgcggcgccaagacccagtcaaacccggagaacacggtaggcgtgatgacaatggccgggaagggtgttcgcgtgcttgtcactcccaccagcgacctcgggaagattctcgcctgtatgcacgggttagaagttggcgctgaggcaaacttggctgcggcaatccaggttgcccagcttgctctaaagcatcgccagaacaagaggcagcagcagaggattatagctttcattggaagtcctgtgaagtacgacaagaaagttttggagaccattgggaagaagctgaaaaagaacaatgttgctcttgacattgttgactttggtgaatccgatgatgaaaaacctgagaaactggaagcattgattgctgctgttaacagcagtgatagcagtcacattgttcatatccctcctggtgaaaatgccctctctgatgtcctcctaagcactcctatatttactggtgaagaaggtggaagcggttttgctgcttccgcagcagctgccgcagctactggagcatctggatttgaatttggtgtggacccaaacgtagatccagaattggcacttgccctgcggttgtctatggaagaagagcgggcaaggcaagaggctattgcaaaaaaggctgctgaagatacttctaatacagaacataacaatgtcccaagctcaaacagtgattctgttatggctgaaggagaacctgcctcaaatgctgctgctggtgacaaagaacaaccaaaggatgatgacgatctactacagcaggcacttgcaatgtcaatggagggtggtgcttcaggatctgcagctgtgactgactctgctatggcagaagctggtgcagttgaccctgacttggcattggctcttcaaatgtctgtccaggatgcaaacatgtccagtgacactgatatgagtaaggtgtttgaagacagaacgtttgtgtcatctatccttaattcgcttcctggtgttgatcccaatgatccatctgttaaagatttgctggcatcgttgcacagccagggagagcaagagaagaaggaagacacgtcagacaaaacagaagacgataagaactgatatagccatgttcacgcttccatgcgtacaaagaaattaaagaccggtctccattgactgcgtttactctcttggtcgtggagtttgtttatcctcatataacggtgctttgattataacttaccgccgagggaatttgtattatgacactgcaacaatcttctctccatatatgttcaagggattttcgtgtttcaatgctctccatatatgttcaattgatttccgtgttac

SEQ ID NO: 92111 - DNA, 459 bp, Zea Mays
caggtggtaaagaaagcagacaaaaaggaatggggctcgcgtttgggaagctcttcagccgctcttcgccaataaggatatgcagatccttatggtcggcctcgacaccactggtaaaaccaccatcctctataagctcaagcttggtgagatcgtcacattcagaggaacacattggacaaggttctagacactgttgcaaaaggaggacagacctcaagtaaaataggattgtcgtatgcttgagacgataacgatggagatcttttcaaataatggctggtctttttatcatagattgagtgcttgaatttgtgaaacctttgtcgaatgtgagattttcattccagagtggaaccctatgtttgtgagtttgaacagtcacatgtatcaaccaataccgaagctggaatattaataatattcccttttctaaaaaaatatttgtttcttttctat

SEQ ID NO: 92112 - DNA, 3968 bp, Zea Mays
ctcggattcccaccccccgttctgtagctctcctctaatcctgatttttgtatgcgtggtggtcgctcttccgtctctcccagcccagcagccagcagtcgtctccttctctacctccctcgcatatcctgctcctctgtaaccactgtactaaaactagcctgtacctgtactgtgctgacattatatacagccccttctctttgcttcttgctcgtgccaattggcagttgccattgccaatcaccacgtagagctgcattattgcttgcttcgaggccatgggaactgcaagagttcgcttcgtggtccttgttctgatctctacgtttctcagagtcagagaaggcagagccgcgacattcacgttcgtgaaccggtgcacggggacggtgtggccgggcatccagtccaacgccggaagctcgaggctggacacgacgggcttcgtgctgccgccgggcacgtcgcgcgcggtcccggcgccgtcggggtggtccggccgcgtctgggcccgcaccggctgcgggcaggacggcagcggcaaggtggtgtgcgcgacgggcgactgcgggtccgggtccctggagtgcaacgggcagaacgcggcgacgcctgcgacgctggccgagttcacgctggcctccgcgggcggcaacgacttctacgacgtgagcctggtggacggctacaacctgccgatcctggtggagcccgcgggcggcgccgccaccggcgccagtgccacgacgtgcgccgcggccgggtgcacggcggacctcaacgagcggtgccccgcggagctgcgcgccgagggcggcgccgggtgccgcagcgcctgcgacgccttcggcaggcccgagtactgctgcagcggcgcctacgccaaccccaacacctgccgccccaccgcctactcgcagctcttcaagtccgcctgccccaactcgtacagctacgcatacgacgaccccaccagcaccttcacctgcgccggcggccgcgactacaccatcaccttctgccccgtcgccaccccaaggtaccgacatcttcatctcactcagttggagctcatcacccacccatgacccaccctcgtagtagttgactttttttttttttttgcccagccatgcccggttcattttattttacggttgctttggcgtgccgtcttgattaatgattagaacgtggttagtcataaaaagctcgcgagacttgcaagcagagtttggccggccggccggggcaaatgaactggccacggcacaccatgatccatggcccggtacactcgcacggcacctagcaatcgttaccggtagcggttggtgcatgatcaagagcgagcgagcgagtgaacactggtcactgagcgcgccatgtcaccttatctgtgtatatattaaatgcatgcatagaaaacgagtgcaggtatgccaaattgccaattgccatgttcatgtaataaaactctgatgaaatggggtacaagaatgggacagtggtggcgagaggtttggaaggttgcaaggtgattggcctggatcaagtactcagccacgtcaccacgtcggtagcagtaaacaatgaacgcgggaaggggggaaaaggcaaacaattaaggatggctttgctttcattatagattcacgggaccgggcgtttcttctttttcactaattaattgctggtccgcccctcttattattattcttatttccccgacggaacgtgcagcgtgaaatcgtcgagtggccctggagcggcaacaacgacggcggcaccgacaggcccgacgccgacgctgccgggggcgacgccgcggtcggcaggcggcggcccggaggggcagggcgtgatgctgggcgacaactcctggctcgccagcctcgccacgggcgacgcgtcgtccgcgccggcgctccgggccttgcccctcgcgccgctcctgctcgtcggcctgctcctgcttgtgctgctatagcaccaccagcgggaaacccaggcaaccgaccgcgtcacgggcgtgtgaggcgaaagcttttgatctcggacagcctaccgaacgcgcgcgctcctgctacgtttgatgaatcatctcctagtcacggtgcaggcgtgcagtgcggcggatgattttgacggctagccgaatgcgcgcacccccatccccagtcagcagctgaaggaaaaaaagtttaagtggcctactcatggatgaggtggctgcagcatggactagacacaaatactattagtgctgatggtgtatagtaccgctgccgctttaaagtagtgtacagtgcagtgcagctctgatggcgctgtccctcggcacatgggaggagatgtgccatgccatgccatctgatctgtgcttgcggatcaatcaaatactacgtacgtgtctacgtatatagcgtggtggggaggacatgggcgcggtgatgagaattgagatgatgcccgctgatctggtccactgcttttgagttttgagtgaagccaaaggaaggaaggatcggtgccgccaggcgttcatgcctccctataatccctataaccatttctgagctgcgtcgtatcgtatcaccctaggatcgcattccaattaggtcttgttcgtttgtaccggattgatggatcggaacgatttcaagccgaattagttctctaaattatataaactttgattagctggaacgattcctggtgcaatccgacgtaaacgaacaaggccttagtgtaaacgtaatgtcatgtttttaattcgtaaggttggttgatgcgatctgtgactgatcgagcacggtagggtccctagggaccatacatatcagagcttgcttatagattcatccacattctctcgatcactcgaccatgcactgagcttgtcttgctttcttgccgagagaacaactcacctgcagtttggcagttagtacggagtacgcttgcgctgctaccggacttagggatggcaacgggtttaaaacctgcgggtacagagattataaacccgtacccgcgagattaatgttaaatccgtacccgcacctgctactcgtgacgggtagcgtatgttacccaaacccgctacccgcgggtacacccgcgggcacagtcatataataaatatttattaaactgatagcacgtaataataaatatttattaaactgataaaaacatgtaccgatcttagccaaagttctatgagctctctggcgcatgtagtcttcttttatatcatttgattgactccgctcgctcaaagctttcggggtggcactaaattgagatgtatgtgctctacagtctacacagatacacacgcgggtatgcgggcacgggtacaacattttcatacccacgagaaaaaacccgtcgggttgagaatcaaacccgtacccgtacccactgtcggtgttttgggtccgaccgcacacccggggttgcccctcaaggtgtttctaggagtaggacggtatcgacgactgtagcaaaatggttcgtgccgatcgcacgagggacagtggacaagatttacaggttcgggtcgcttagagatgcgtaacaccctacgtcctggtgagtatgtttggtgagcgtggttacaagaggactctctggattgaagacacagagagttgatgtgggtggctaagtaagatagggtcgatcgttctgaaggggtgccccctaggccttatatactcgaccgtggggcagtacacgtggatatgataacaacaagtagctaaaaggtagtgaacctcttgagtttatccctacataaccctcgccgacttatcctcgcatggctccgttgcatgggggcttcagcgcgggaaagtcgggtctctgttgcgatttactcgctcgacgttgtgggccgtccgggtttgcaccaatccggtctcacgtcgctctgctttgttggttgtttctcccca

SEQ ID NO: 92113 - DNA, 3517 bp, Zea Mays
cgttggttcagctatgcctatcgccgctccacaatctcatctcgaataagatactgacgcacccccatgtctccccttccatcaccctggaaactgcagagcagagctacgcgctataccgcatattggtggggaaaagaaaaggattcaatcaggccgtctgaagagagcatgagcatgattataccggggcggaaagcgagcttttagtaaactgcctcacttgcgctataagtctagctgcaggagtgctctcggattcccaccccccgttctgtagctctcctctaatcctgatttttgtatgcgtggtggtcgctcttccgtctctcccagcccagcagccagcagtcgtctccttctctacctccctcgcatatcctgctcctctgtaaccactgtactaaaactagcctgtacctgtactgtgctgacattatatacagccccttctctttgcttcttgctcgtgccaattggcagttgccattgccaatcaccacgtagagctgcattattgcttgcttcgaggccatgggaactgcaagagttcgcttcgtggtccttgttctgatctctacgtttctcagagtcagagaaggcagagccgcgacattcacgttcgtgaaccggtgcacggggacggtgtggccgggcatccagtccaacgccggaagctcgaggctggacacgacgggcttcgtgctgccgccgggcacgtcgcgcgcggtcccggcgccgtcggggtggtccggccgcgtctgggcccgcaccggctgcgggcaggacggcagcggcaaggtggtgtgcgcgacgggcgactgcgggtccgggtccctggagtgcaacgggcagaacgcggcgacgcctgcgacgctggccgagttcacgctggcctccgcgggcggcaacgacttctacgacgtgagcctggtggacggctacaacctgccgatcctggtggagcccgcgggcggcgccgccaccggcgccagtgccacgacgtgcgccgcggccgggtgcacggcggacctcaacgagcggtgccccgcggagctgcgcgccgagggcggcgccgggtgccgcagcgcctgcgacgccttcggcaggcccgagtactgctgcagcggcgcctacgccaaccccaacacctgccgccccaccgcctactcgcagctcttcaagtccgcctgccccaactcgtacagctacgcatacgacgaccccaccagcaccttcacctgcgccggcggccgcgactacaccatcaccttctgccccgtcgccaccccaagcgtgaaatcgtcgagtggccctggagcggcaacaacgacggcggcaccgacaggcccgacgccgacgctgccgggggcgacgccgcggtcggcaggcggcggcccggaggggcagggcgtgatgctgggcgacaactcctggctcgccagcctcgccacgggcgacgcgtcgtccgcgccggcgctccgggccttgcccctcgcgccgctcctgctcgtcggcctgctcctgcttgtgctgctatagcaccaccagcgggaaacccaggcaaccgaccgcgtcacgggcgtgtgaggcgaaagcttttgatctcggacagcctaccgaacgcgcgcgctcctgctacgtttgatgaatcatctcctagtcacggtgcaggcgtgcagtgcggcggatgattttgacggctagccgaatgcgcgcacccccatccccagtcagcagctgaaggaaaaaaagtttaagtggcctactcatggatgaggtggctgcagcatggactagacacaaatactattagtgctgatggtgtatagtaccgctgccgctttaaagtagtgtacagtgcagtgcagctctgatggcgctgtccctcggcacatgggaggagatgtgccatgccatgccatctgatctgtgcttgcggatcaatcaaatactacgtacgtgtctacgtatatagcgtggtggggaggacatgggcgcggtgatgagaattgagatgatgcccgctgatctggtccactgcttttgagttttgagtgaagccaaaggaaggaaggatcggtgccgccaggcgttcatgcctccctataatccctataaccatttctgagctgcgtcgtatcgtatcaccctaggatcgcattccaattaggtcttgttcgtttgtaccggattgatggatcggaacgatttcaagccgaattagttctctaaattatataaactttgattagctggaacgattcctggtgcaatccgacgtaaacgaacaaggccttagtgtaaacgtaatgtcatgtttttaattcgtaaggttggttgatgcgatctgtgactgatcgagcacggtagggtccctagggaccatacatatcagagcttgcttatagattcatccacattctctcgatcactcgaccatgcactgagcttgtcttgctttcttgccgagagaacaactcacctgcagtttggcagttagtacggagtacgcttgcgctgctaccggacttagggatggcaacgggtttaaaacctgcgggtacagagattataaacccgtacccgcgagattaatgttaaatccgtacccgcacctgctactcgtgacgggtagcgtatgttacccaaacccgctacccgcgggtacacccgcgggcacagtcatataataaatatttattaaactgatagcacgtaataataaatatttattaaactgataaaaacatgtaccgatcttagccaaagttctatgagctctctggcgcatgtagtcttcttttatatcatttgattgactccgctcgctcaaagctttcggggtggcactaaattgagatgtatgtgctctacagtctacacagatacacacgcgggtatgcgggcacgggtacaacattttcatacccacgagaaaaaacccgtcgggttgagaatcaaacccgtacccgtacccactgtcggtgttttgggtccgaccgcacacccggggttgcccctcaaggtgtttctaggagtaggacggtatcgacgactgtagcaaaatggttcgtgccgatcgcacgagggacagtggacaagatttacaggttcgggtcgcttagagatgcgtaacaccctacgtcctggtgagtatgtttggtgagcgtggttacaagaggactctctggattgaagacacagagagttgatgtgggtggctaagtaagatagggtcgatcgttctgaaggggtgccccctaggccttatatactcgaccgtggggcagtacacgtggatatgataacaacaagtagctaaaaggtagtgaacctcttgagtttatccctacataaccctcgccgacttatcctcgcatggctccgttgcatgggggcttcagcgcgggaaagtcgggtctctgttgcgatttactcgctcgacgttgtgggccgtccgggtttgcaccaatccggtctcacgtcgctctgctttgttggttgtttctcccca

SEQ ID NO: 92114 - DNA, 1705 bp, Zea Mays
accccccgttctgtagctctcctctaatcctgatttttgtatgcgtggtggtcgctcttccgtctctcccagcccagcagccagcagtcgtctccttctctacctccctcgcatatcctgctcctctgtaaccactgtactaaaactagcctgtacctgtactgtgctgacattatatacagccccttctctttgcttcttgctcgtgccaattggcagttgccattgccaatcaccacgtagagctgcattattgcttgcttcgaggccatgggaactgcaagagttcgcttcgtggtccttgttctgatctctacgtttctcagagtcagagaaggcagagccgcgacattcacgttcgtgaaccggtgcacggggacggtgtggccgggcatccagtccaacgccggaagctcgaggctggacacgacgggcttcgtgctgccgccgggcacgtcgcgcgcggtcccggcgccgtcggggtggtccggccgcgtctgggcccgcaccggctgcgggcaggacggcagcggcaaggtggtgtgcgcgacgggcgactgcgggtccgggtccctggagtgcaacgggcagaacgcggcgacgcctgcgacgctggccgagttcacgctggcctccgcgggcggcaacgacttctacgacgtgagcctggtggacggctacaacctgccgatcctggtggagcccgcgggcggcgccgccaccggcgccagtgccacgacgtgcgccgcggccgggtgcacggcggacctcaacgagcggtgccccgcggagctgcgcgccgagggcggcgccgggtgccgcagcgcctgcgacgccttcggcaggcccgagtactgctgcagcggcgcctacgccaaccccaacacctgccgccccaccgcctactcgcagctcttcaagtccgcctgccccaactcgtacagctacgcatacgacgaccccaccagcaccttcacctgcgccggcggccgcgactacaccatcaccttctgccccgtcgccaccccaagcgtgaaatcgtcgagtggccctggagcggcaacaacgacggcggcaccgacaggcccgacgccgacgctgccgggggcgacgccgcggtcggcaggcggcggcccggaggggcagggcgtgatgctgggcgacaactcctggctcgccagcctcgccacgggcgacgcgtcgtccgcgccggcgctccgggccttgcccctcgcgccgctcctgctcgtcggcctgctcctgcttgtgctgctatagcaccaccagcgggaaacccaggcaaccgaccgcgtcacgggcgtgtgaggcgaaagcttttgatctcggacagcctaccgaacgcgcgcgctcctgctacgtttgatgaatcatctcctagtcacggtgcaggcgtgcagtgcggcggatgattttgacggctagccgaatgcgcgcacccccatccccagtcagcagctgaaggaaaaaaagtttaagtggcctactcatggatgaggtggctgcagcatggactagacacaaatactattagtgctgatggtgtatagtaccgctgccgctttaaagtagtgtacagtgcagtgcagctctgatggcgctgtccctcggcacatgggaggagatgtgccatgccatgccatctgatctgtgcttgcggatcaatcaaatactacgtacgtgtcta

SEQ ID NO: 92115 - DNA, 1321 bp, Zea Mays
ctcggattcccaccccccgttctgtagctctcctctaatcctgatttttgtatgcgtggtggtcgctcttccgtctctcccagcccagcagccagcagtcgtctccttctctacctccctcgcatatcctgctcctctgtaaccactgtactaaaactagcctgtacctgtactgtgctgacattatatacagccccttctctttgcttcttgctcgtgccaattggcagttgccattgccaatcaccacgtagagctgcattattgcttgcttcgaggccatgggaactgcaagagttcgcttcgtggtccttgttctgatctctacgtttctcagagtcagagaaggcagagccgcgacattcacgttcgtgaaccggtgcacggggacggtgtggccgggcatccagtccaacgccggaagctcgaggctggacacgacgggcttcgtgctgccgccgggcacgtcgcgcgcggtcccggcgccgtcggggtggtccggccgcgtctgggcccgcaccggctgcgggcaggacggcagcggcaaggtggtgtgcgcgacgggcgactgcgggtccgggtccctggagtgcaacgggcagaacgcggcgacgcctgcgacgctggccgagttcacgctggcctccgcgggcggcaacgacttctacgacgtgagcctggtggacggctacaacctgccgatcctggtggagcccgcgggcggcgccgccaccggcgccagtgccacgacgtgcgccgcggccgggtgcacggcggacctcaacgagcggtgccccgcggagctgcgcgccgagggcggcgccgggtgccgcagcgcctgcgacgccttcggcaggcccgagtactgctgcagcggcgcctacgccaaccccaacacctgccgccccaccgcctactcgcagctcttcaagtccgcctgccccaactcgtacagctacgcatacgacgaccccaccagcaccttcacctgcgccggcggccgcgactacaccatcaccttctgccccgtcgccaccccaaggtaccgacatcttcatctcactcagttggagctcatcacccacccatgacccaccctcgtagtagttgactttttttttttttttgcccagccatgcccggttcattttattttacggttgctttggcgtgccgtcttgattaatgattagaacgtggttagtcataaaaagctcgcgagacttgcaagcagagtttggccggccggccggggcaaatgaactggccacggcacaccatgatccatggcccggtacactcgcacggcacctagcaatcg

SEQ ID NO: 92116 - DNA, 507 bp, Zea Mays
atgcgagcgagcaagcaagcaaccttaccttgcgcatgcgatgagctggatgaccgagccgaagagcaggaacgtgcagttgaaggccaggccgacgttcctccagtgcctcccgagcagcccgtccagcacctcgaaccactggatgacatggttcctgaagtccgccttctccctctccttcctggcccggtactccacgtagagaacgctgatgaggtacgccgtccagctgcccatcagcccgtacaggagctggaacagtatgccgctcagcatccccagttgcgagaacgagtagggcagggtcaggagcacctgagccacctggttggacgcgcagctgaaccaagcgtcgtaggcggagccgccgtgccagagcaggccggagagccgcgacttggctgcgctcgactcttggtccttctccatttccacgtaccgcccgacgccgaccgtctccgccgctccattctcgtcggcgacgacgacgctgctggcctctga

SEQ ID NO: 92117 - DNA, 499 bp, Zea Mays
tctctctccgtccctctcgtctcgcttcttccccaacctgctcggcttcaccagatcgcgccggacacggtcgttgggccgccaccatgatctcgacgcggctcgctctcggccactcgggttggtggtggtgagaggtccacagccacgtcctaactccaccacttctctcctctacgacgcgagcaagggcggcgccgactgcggcgtcggtgggaactggacctcggcctccccatctctctgatatcagagcagatcagagctggaactgaaggtggcgggagccgagtgatccggcggtgagctgagcggggcgggatggcggcggagcaggggcggtcgctggcggagacgcccacttggtccgtggcaaccgtcaccacgctcatggtcgctgcctgcttcctcgtcgagcgctccctctcgcgcttcgccaagtggctgcgcaagaccaagcggaaggccatgctcgccgcgctcgagaagatccgcgaag

SEQ ID NO: 92118 - DNA, 612 bp, Zea Mays
atgtcgggcatcgtctatggcgtgcgtgcaaattcctgggactcgacaagctgggcagagcagagagccaaccccgtgttgcatcaacagcagcgcgactctagtgagacccgagtccgtatgggccgacagcatggacgagcagacacgacacgaagggtgcgagtccgccaaggatgcgaacttgaaggatggcgcagtttagaacgaaaccttactgagcgaagaacgacgaccgacaaggcgaagctcgatgacgaggtcgagccagggatggccagcgcaaacgcacacaagggcttgccaacaacaccaagacgacagcgtggtgtgcacacgacgcaaagagaaacgaccacaactccacgacagcttcacggacacggcgaggacgcagagcgcggtgactgttcttcaatggctagaatactggaattggaggcaggtggttcgaacagaggagcgcacggcccgggaagtttcgacggcgcggacagcgagggagctcgatgcgcgcagggaaacttcatggcgcggtggagaactcgatggtggcccatgcgcaggaaggagcagaggccgagcaaagagtcggcgtgcgcagaggcttga

SEQ ID NO: 92119 - DNA, 1148 bp, Zea Mays
ccacagacaaagttgacaaagggcgcccaacccacggcggaaagcgacgcgcgccagataaatggcgggggagccagcagcaacctacttcctgcttcctccagaatcggtcagccgcaatccttccaccccgtaccacgcctccccctacccccaccaccaacaagcatgatttccccacgccccgcgctctcccccagcttcctcgccttccggtccggctccccggccgcgtcgccgccgtcctccccgcgcctccacgcgccgccgcccctctccgcctccttctccaccgtcgccaccgcggcaccgggccacgcagctgccagctccttctacgacgtcctcggcctccgccccggggccagcgcgcgggaaatcaaggccgcgtaccgccgcctggcgctcgccgtccacccggacgccgccccgcaccccacatcgtccgccgaggacttcatccgcgtccacgcggcctactccacgctctccgatcccgacaagcgcgccgactacgaccgccgcctcctcctttccggcgccacagtacggcgcaccgtcgctctaggacgctcgccctcgttcccagcgcaccgttcccgccggacatgggagactgaccagtgctggtgatatgtgagaaagatcttcgacttcgacgtctacgactggtgcggtctccgcagtctccgtcgggccgcagaaccttccaatgaatgggaacgcgaagatccccgcaaacctctggactcacacaaagcgtagcgcagccttgcatgcttcgttgcgggcttgcggcctgtaatgtaagaatgttaaaatatatgatgatgtgtaacgtcctctgttttgggtcatggatgtgttgtatgtagtgttagatttagggtctaaagtgctaaactttagtattcaataacagtttagctccttaggtgagctaaatttatcctgcaaaagtttagcacatgagattcaaatagatccttgatatagacataattcatactacctctatctcaaactaaaatttccttttttggtaattaatagaatcatataatacttgatgtatttgttttatatatgtgtctagattcaccatggaccatttgaatatacacataaaaacgaacaactaaaacaaa

SEQ ID NO: 92120 - DNA, 1105 bp, Zea Mays
cagctctcacccatccacgtcttctcattcctcgacaatggagatccaggcacgacagctactggtgtctgtttttggcattctgatagcgataggtttcgccaatgccgcgctgggagagacagcaccgccggttgttgtcggcttggccaagtgctcggactgcgccaggaggaacatgaacgccgaggcagctttcagaggtcttcaggtggccatcaagtgcaagaacagcaagggggcctacgagagcgcagccgtgggacaggtgaacaagtccggggccttcagcgtcccgctggccgccgacgccgtcggcgaggacggggagctcaagtcggaatgcttcgcgcagctcatccacagcgcgtcgagtgcgccgtgccccgggcaggagccctccaggatcgtcgccgcgccacccggccacacggcccacaccaacggcaacgggaagacgttcctcgcgctcggcggcagggtctaccaaccgtcgcccgagtgcgcctcggcgttcctctgccaccctttcttccacagcatgcaccaccatcacgtaggagtccacacgcctgtggttatcccgcacctgcccgttcacggccactccgtgccgcctgtcaccaagccgccgccggtagacgttcctgagcacaaaccggcgccggtgcccgtgccggaccacaagcctccgtcgacgccgccggtagacgctcctgagcacaaaccggcgccggtgcccgagccggagcacaagcctccgtcgacgccggcgaacgctgcaccgtcgacgcccacggagccgtcagcgccggttaattcgccgccgaagccagcccccatctaccacccaccggcaaggcacgacgctgccactggcccgtagctcttcaagaggctgctcccgttcttcaagaagttgcccttctttcctccttctgcgatggagagtcagcactagaatgtttggacagtgtttcttggcttttgcaggttatgcagtttcctcggaataatttgtgacgttgattagttcagcatgaacgttgggtcagtttaagagtgtgtgttctacttccatctaatggaggcaatttcatgtcaa

SEQ ID NO: 92121 - DNA, 2218 bp, Zea Mays
ctggagttgcccgcatgaccaaaccacgtctccggctccggcgtccgcttccaaccaactcacaccaaagtggcgacatcgccttccgccgcctgacacgtctggagttgttgttttagccgccagctcgctcccatctatctccatggagtctgctcccgccgcggtcatggagcgggagcgcctcacagccgagatggccttccgcggcgcggacgaagcgcggcgggacggcggcgagccggcgcccagcatcgtcatcaagatccgccgccggctcccggacttcgcccgcagcatcaagctcaagtacgtcaggctcgggatccgacacggaggcagccccacgtcggtgctgccgatgctctgcgtgccggcggtcgccgccgccgcctactcgttcgtccgcctcgacgtcatctactactccatcgacctgctcacctgcgtcgcctggctcggcaccgcgctgctgctgctcaccgtctactacttcaagcggccccgcccggtgtacctcgtggacttcgcgtgctacaagccggaggagcagctcaagatctccaagtccgccttcctcgagatgaccgagagcacggggtccttcaatgaggcggctctggatttccagaccaagatcaccaaccgctccgcgctcggcgacgagacatacctgccacccggcgtgcaggcgcggccgccgaggctcaacatggcggaggcgcggatggaggccgaggcggtcatgttcgggtgcctggacgcgctgttcgagtccacggggatcgacccgcgccgcgacgtgcgcatcctcatcgtcaactgcagcctcttcaacccgacgccgtcgctggcgtccatgatcatcaaccactacaggatgagggaggacgtcaagtcgttcaacctcggcggcatggggtgcagcgccggtctcatcgccatcgacctcgccaaggacatgctccaggcgaaccccggctcgtacgccgtggtgctcagcaccgagaacatcaccctcaactggtacttcggcaacgaccgctccatgctcctctccaactgcatcttccgcatgggcggcgccgccgcgctgctgtcgaacaggcgcgcggacgccgggcgcgccaagtaccggctgctacacacggtgcgcacccacaagggcgccaccgacgagtgcttcaactgcgtgtaccagcgcgaggacgaggtgggcaaggtgggcgtgtcgctggcgcgggagctcatggccgtggccggcgacgcgctcaagaccaacatcacgacgctgggccccctggtgctgcccctgagcgagcagctcaagttcctcaagtccctgatgatgcgccgcgtgttccgcgtcaagggcgtgcgcccctacatcccggacttccggcgcgcgttcgagcacttctgcgtgcacgccggcggccgcgcggtgctggaggaggtgcagcgcagcctgagcctgcaggacacggacatggagcccagcaagtgctccctccaccggttcggcaacaccagcagcagctcgctgtggtacgagctggcgtacgccgaggccaagggtcgggtgcggcgcggccaccgcgtgtggcagatcggcttcggctcggggttcaagtgcaacagcgccgtgtggcgcgctctccgcgacgtgccgccgctgtcgtcgtcgaccggcgccgcagcggggccgccgggcaggaagggcgcgcagagctgctgcaacccctgggtggacgacgtggacaggtaccctcccaaggcgtacgtctgatgggccacgtcatgcggcataacaattgtatgatctgatacgagttccgtcacgacgaaggaagaagggcgtgtgaggcagaaaattatacttgtatgttttttcatttgttttttttcttcttttgcttcgttttcttttctttttcccagtagattgccgtgagtagacagtgctggcttttggaattcagacgtgtatgtggcgtaaaatgaattccaagagctagcagtgccattctttctcttctcagcctaccctatttgttgtctagtccttttgtcttctctttggcgttctagacgcccgggaagtagaatggacagacgaacaccaccagtgtgcagttcacatgactagagagaactatcgaccaagtgtgaattactgattcaagtacatactctgtcctctcggccaagttttaaa

SEQ ID NO: 92122 - DNA, 740 bp, Zea Mays
cgaggaccgggacgagacctcgcggcgcgctatctcaccattgtcgaacgtacgtgtaccgccggcgggcagcgcccgccggccttgtcatgtgctcgccgcccgcgtgcgcacgccggtcgtctctcttcacagcgcgctcgctgcctgcgcgcaggggcggacccacaggggggttcgggtgggccctggcacaccctaagccaggcccatcggagaccccacccgttcgtccgtcgagcgctgaaggcagtttcaaccaggggcggacccacaggggggtccgggtgggccctggcacaccctaagccaggcccatcggagaccccacccgttcgtccgtcgagcgctgaaggcagtttcaacttcccgatccttcagcttccagttcctagaaccacgagtgcgactgttcctggcggctagcgacctcaaccttcaacctggctactggcttcctggcgagcgcgccgcgcggctggacggctgtcggctggtggcctggcttcttgttcctgacgagcgcctggcttcctgttcctgacgagcgcgcggctggagtgctggacggctggtggcgagcggccgagcggcgagcgcgcggttgttccagtgttcctggtcctggcgcctggcggcctcaagacgctgctgctggtctgccactggtttcaacttcccgatccttcagcttccagttcctagaaccacgagtgcgactgttcctggcggctagcgac

SEQ ID NO: 92123 - DNA, 3040 bp, Zea Mays
tttgaatcagctgtccccaacacttccctcacttctctccctcacgctacctctgaccacactcctcttaaaatcaccatagacacttctattccaaaaaaacattgctttcggtttgagaatgcttggcttcatgatccctccttcctccctgctatagaaccggtctggtctgcggtcactaatcttgcaggtggtgccacaggtgcgttcgttgcaaggctaaagggcacacgtcgtgtcgctaaggcatggtcaaaaaacaaacacacaccattccttattaacaattgcaagtttattattaaactacttgatctgcatgaggagttgcatttcttgaccacaggagagacagtcctccgctctctttgtcgtgagaagctcatacttcagatcagagctcgtgctgcctactggaaacagcgtgggaaattcaaggtgcttaaagaagctgatgaaaatacaagattccatcatgcgcgggcttcacaaaggctacgtcaaaatcagataagggctcttgagctggatggtgtccgctacacaagtcatgcaagtaaagcaatggtactggacaatcatttcactgccctcctcggtgcagcgatggatactgtgtgggactttgatatggcaactctgtaccgtggcctcccaaaggttaatctcgtgcctctgattgaaccgtttactgaagctgaggcctgggcagctatcaaggcaatgaaccataatagtgcccccggtccggatggcttcggtcctagtttttacagagcttcctggcatatagtgaagtccactgtcatgcaattcttagcttccttccaccatggagatgctgatatggaaagaattaatagagcatacattgtgttgatcccaaaaattgttggtgcagttgcgcctggatcctttcgtccgatttcactccaaggttgtccagtaaagattgtgggtaaaattttgacatctcacctccaacagcaagtcacatcgcttgttgatttggaccagactgggttcttgaaaggacgctcaatttctgaaaattttgtctatgctactgagcttgtccaatgctgttacaaaaggaaagctccaactgttgttctgaaacttgactttgccaaagcttttgatagtgtaagctgggatgctctactcactgttctacaggcacgtggcttccctcctctttggtgtgactggattaagctactgcaagtctctgctaagtcggctgtccttttgaatggtgttccgggcagatggatttcttgcaagaaaggccttcgtcaaggtgacccgctgtcaccctacatgttcatactagttgctgatgtcttacaacagctgctggccagagatagcaccattcgacacccccttacagctgaccgttcatgcacaattctccagtatgcagacgatacactgattgtggcaagagctgatgagctggctatgctgcagctaaagtcgattcttcaaagcttcacccatgcaacaggtctggatataaactacaacaaaagtacgctggttccaatgcatgtgcctgctcttgatgtcactcgattcgttaacattcttgggtgtgcagaaggtgcgttcccgcagacctaccttggtctccctctctctaatgagaaattgaaccttgcagcctttgctcccatcattgctagcgctgaccgttatttatctggatggtgggcgagtcttcttaatcaccatggcagacttactcttgttaatgcagtcttggacagcttgcctgtttatgcaatgggggctctcgccctccctccaggcgtgattgaggccatcgactctagacgtcgggctttcctatgggccggggaagaaacagtctctggtgcgaagtgtcttgtgaattgggaacgggcatgtctcccgagaaaagatggcggactgggtgttcgtgatctccgcttgcagaatacctgtctgctactgaagttcctccatcgtgcacacaactcacgtgactcagcttgggcccgctggttagaagtggaatttggaggccccatgtctgctccagacaacacggcagctggtactcattgggctgccctccgacgccttctgcctgactatcgcttacttaccacggtggaggtgggcgatggtcgctctacagccttttggcacgactgctggttgtctacggggcctcttgtggatgccatgccggcgctctactcgcacgcccgacgcaaggaaacctcggtctgcaatgtcctgtctacaacccttcgccttgcatttgtccctcgcctctccaccgtggctgctagagaattggagcagctggaggcgctccttgttggtgtatccttgtctgcgactcctgatctccggttgtgcccgtgggaagacatggcacataaactcaattcatcgactgtctaccaagctgttgtgactaatggccagggatgcgagtactacaagtttatctgggaaaaccgtgctccccctaaagttaagttctttggctggctattggtgcaaaacaggattcaaaccaaagataatcttctcaaaaaacactgcgtggagaatgatatctgtgaactttgcttgtcggccgtggagagctcagtgcatctgatttcgggctgcccttttgctgttggcttctgggcgcgactaggaatatctctcacagacgaagacgcgtcacatctttggtgcgttcggtccccatgtcacttgcctgctgcacactttaatgtttttctcctcttgtgttgctggcgtctctggaagcaccgccacgatgttgtttttcgctctctctctctctccgagctatgagcgtcttatggctggctgtcgtgatgatgcagaattgtggtcttataggctcccctctaatgatcgttatgtaacccttgcatgggtttcgatattctcttcgacaatcccctctgtaacaacttaaccgacatgtaactaactcatgtatgagcctttatgttggcaatgaaaaggtggggtatct

SEQ ID NO: 92124 - DNA, 1838 bp, Zea Mays
atgccagttaaccataaactaacccccttgccccaccgctgccctacgcttctccctcctacgccgcaggtctctctgtcgccgcctcgtatggctgctacagctcctctaacctcccaacaccatgccccaccaccggctccctcccgctcccctacttcgcctcttctccctgcattccctgctttaccaccgcgccacgccccttccaccacctccgcccatcctcctcctgttggtgttacccccatcagttccttgtcggaaactgtcgagtgtgcctccctgactagctcggtccgccagggatccctcgaagtttttctctctctcggccggcacgacgtggccgctgcattcgcatttgttcgtataactccgcaattggcagtgtctgccccggcaccatttattcgggaggcgatccgtgctgctttcccgctcatcaccttcgaggttctcccctcgtcgttcggatcgttgctggtgcgctttcagtcggcaggtgattgtactgctgctgtgagtcgctcccccctattgcatgaggatgtggcgatcttcttcgagcgccacgacgggaggagtgtcaaacagccggttgatgtgcttgcggtcttgtctgttcatgggttccctctgaccttctggcacgaggagttcatccgccaggcgttccaagtattttgctcagtcgtggaagtcgactggcgttgcacctcgggcctcgactactcgtctgttcgggttgtggtccgcgtggaggaagtgacaagcattccagcagacctttgcattcatgattcttcatctggggattccttcgtttgtcaggtgaagctggttgattcgtggccgctgccggtggattacggccagcatggcacgctccgcccctacttcggatggcctccccatcctgtgctgccgccacctgcccccacgccccaccgcacaacgcccctgcagcccctccgccaccacctatctcgcaaccttgcccgccagctcacagtcgtccccctcgccaccctacagcccgatcagtcgcttgtgacgtgcctcgcccgcacactactggctctggtccttaaccagccccaccgccttctgctcccctgcctaccatccttccccatcataatccacaaaaatatcctccccctgcatcctgcacccgccttctcagctccattccctccctttcccctcacatcatgctcgactgttgcgcctgcgatcgctgacgttgaagtgctctccccctcccccctccccccctcctccctgcaacctgacccagaccatgaatcttcagcaagaaaatctcgcgcacgcaccaaacgtactgctgacctcgcagccaaaaacaagaaaatagctccagcttcacgccacagtgtccgtctgcgggataaggaacccgcgaactacgtggacatgtcctctaaggcgaccaatctgaaagctctgaagaacgagctggcaaactgctccaataatctcaaggcaaaggtcaagcgccatggtctgctgcgcaaatgcactctgaatgctgctgacctgagggcgctcgctggcaccatagcgttgccggctctggctactgctgaactggagcaggcgctggaaagttccacatgttagaattcaacttctgtgctatggtgaggctaggctcacatcctcctagcaagttatccccctgtatttcctattatgtttgtttctcctcagacttaatgtatgtcgctcttttacctccagttgctcttcacattcctcttgttatctggatgttctgctggtgttaatcatgagttcaaatcgtcttataa

SEQ ID NO: 92125 - DNA, 2296 bp, Zea Mays
cctcggcgtccgggcatcgccatcgtagacacggcaaaggagacgccggaaggcccggacggaacaagcgagatatttaaggacgcctttttggcgcgaccccacgacatggcggcatatctatctactacacacgcctttaaaacctttcgccctcctccgcgctcccggctcctcccagcaccagcaagcagccttatctatcccctcagctctgcagctcagtgtccaccaccgccgcctccttccagctgggtggaagaaacatgtcgcgaatggcgcccccgtctccgcctcagtccctgaagcccccgacgctgcccttctccccgcccaaaaagccaccgccgatgccggtgtacaaggacctgcacttcaaccgcgacctctccgccaccaagaagctccaggccggagtggacctggtggcacggttgttgggggtcaccctggggcccaaggggaggaacgtggtgcttggcaacaagtatggccctcccaagattgtcaatgacggggagaccgtccttaaggagatcgaattggaagatccattagaaaatcttggagtgaagctggtccgacaggctggagcaaggaccaatgatattgcaggagatggttgtaccacatccataatccttgcccaaggcctcattgctgaagggatgaaggttcttgcagctggaatcaacccagttcaggtcgcacgtggcattgagaagactgctgctgctttggtgtctgagctcagactgatgtcgcgggtgattgaagaccatgaaattgcacatgtggctgcagttagtgcgggaaatgattatgctgttggaaatatgatttatgatgcttttcaaagagtaggtagacaaggaatggtgagaattgaaaatggaagaggcaccgagaacagtctggaggttctggaaggaatgcaatttgaacgcggttacctatctccttactttgttaccgatcgtggtaacatgacggtggagttcactgactgtcagatactattggttgacaagaaaattacggatgctagtgagattataaggatactggacagtgctgtcaaagaaaactatccgttgttaataatcgccgaggatgtggaagaacaggcaatggctgatttgataaaaaacaagctgaaagggacaattaaggttgcagccgttaaggccttctcttttggggaacaaaagactcaatgcttggatgacattgcaatcatgacaggaggtacactagtgagggatgacatggggcatatactggaaaaggcaggaaaagaggttcttggttccgcttctaaggtggtaatcacgaaagattcaacactaattgttactgacggaagcaatcgtcgagcagttgaggaaagggttgctatgataaaaggccaaattgagaattctaaggaaagttacaacaagaagatattgggtgagaggatagcaaggttatgtggtgcaattgcagtgatccaggttggtgctcaaacaatcattgagatgaaagataagaagctgaggattgaagatgcacttaacacaacaagggcagctattgaggaaggtgttgtagttggtggtggatgtagcctactaagactgtcagagaagattgacgcaatcaaggaatcatcgttggataatatagagcaggaggttggtgctgacatcttcaaacaagccttgagttaccctacctcactaatagcaaaaaatgcaggggtgaatggcgactttgtcattaaaaaggtgttactgaatgatgatgcaaattatggttacaatgctgccaagaactgctatgaggacttgatggctgctggaatactggacgcaacaaaggttgtgaggtgttgcattgagcatgctgctgtagttgctaagtcctttctcacctctgatgtggtgattgttgaggcaaaagaaggcaaacctattcgaataagacccccaatgcctcctaggcacttaattcccccaatgcctgcttcaatttcaggtattcgagtgtagcaggcgtcctttccaccaagaatcagcctcaacacaacaagactacgggcccggtacccccaagtttctaagataataaagcaaagaaaacatagtgaaattttgacgtcaaacgtggctttgtatgattgctccaagaagctctatgcacgctatcgcatcatcggagcagcagcaagggtggatgatatgtgttatatagggaatacaaaggtgaacaattcaattttgatgttcaaatgctccttaccgtcataaatata

SEQ ID NO: 92126 - DNA, 1972 bp, Zea Mays
agcgcacggcccgcacatgcattgggcccggccctgccgccagccgatggcccgacagccgcacattttccttctccgggcactgtacgcttctgactgcggctgatcaggccacaggggggctcccacttcttcctcctcgacagtcctcagtcctccgtgcgaaatctgttcgcactcgcagtcgcagtcaccactgttctccagggatggcgccgtgttgcctgctccagatcggttggtgtctcgagcgcccccgtggctttcgcctcgccgcggcgctgtgcgcggctgtggtcgcgctggcgctggcgcccgccttggatgccacgtcggcgtcgcttctgggcatcaactacggccgcgtggggaacaacctcccgccgcctcagtccgtcatgccgctgctcgagggcctcggtattggccgcgtgcggatgtacgacgccgaccccaccgtgctgcgcgcgttcgcccggaccggggtcgagctcatcgtcggcgtgcccgacgagtgcctggccgccgtggccgacccgagcggcgcggcacagtggctcaaggagaacgtcgcgcctttcctgccggacacgaagatctccgtgctcgccgtcggcaacgaggtgctcaccggcgccaacagctccacgctgtcgcgcaccctcctcccggcgatgcagtccctgcacggcgcggtggccgcgctcggcctcgacaagcagatcaccgtcacctcggcgcacaacctcggcgtgctcgggacgtcgtacccgccctcggcgggggccttccgcaaggacctgctcccgtacctctgccccatcctggactaccatgccaggaccggctcgccgttcctcgtgaacgcgtatccctacttcgcctactccagcgaccccaggggggtgcagcttgactacgcgctgctcgacccgggcttcgccggcgtgcaggaccccaactccaggctgcactaccccaacctcctcgtggcgcaggtggacgcggtgtaccacgccatcgcggcggccaataccgcggcgtcgcgggtggtggaggtgcgggtctcggagaccggctggccctccgcgggggccgccaacgagacggccgcgacgccgcagaacgcggcgcgctacaacagcaacgcgatgcgcctggtggcggagggcaagggcacgccgctcaagcccggggcgccgctccgcgcctacgtgttcgcgctcttcaacgagaacctcaagcccgggttggcgtctgagcgctactacggcctcttcaagcccgacggcacgccggcgtacgagctctccttcaagctaccgcgcgacaactccacgtttggtcacggagataccggcaagggcggtggcggaatcggcggtaacggcaatggcaatggcagcagctggaacaatagcggcggcggaaacagcggctactatgacatctcggcttcagcacgtgacactacgggtcactggcggatgtgggcgcaggcggccatggcaggagcagtagccgtcctgacactgtagcgccaagggtaggatcaggaatggagcggagttgccgtcctggggcagcggcctgatttggtgctcctcgtatgctgtagtttctgagaccgacctgtgactgtgagtgaccttgtgcttccggaaatctggtggcatctaaagcactcctagttttaagcagcgctggatcaggtttgcctgcctgcttgaaatgaaaccctttccaaatactggtagcaccctggtaaaaatcctctaaaatagtgctgcgctgcttcgttttagacaacgctgttaattccggtctttaggtcgaatctgcgttttggtaaaactagtagcatcttctagatccgtgagactaacagatcggatttaagattaagtaaagaagtcaaaatgacgatttaatgatgcggttttccgactttattacatcttaattgattgga

SEQ ID NO: 92127 - DNA, 310 bp, Zea Mays
gattctggaacagctaaggacaatagagttttaccactgtggagtggtcgcaggcgtggagcgggcggcaccagcggtcgtcgaccgggtaggggcggctgtgcttaggctgggcactattggcctgtggctagtcgctgcgccgtgccttctaggcctgcacgtaggcgaggaggtcgccgccgccgccgaggctcttgttctacttgcacatctcgtggatcttggagaagtccatggagtagtccagcagtgccctgttcttcgtgttctagtccctgaacgtcggcactgtcatccaggcgttgtc

SEQ ID NO: 92128 - DNA, 1823 bp, Zea Mays
gttttcttctcatttgacactatataaatgatcagaaaaaattgtatttattaatttttaaagcaataaattcgaaatatcaataataattacattgattgttttgttcttgtgtaattgttgtgggtaacgcggcacatagtataatatcgttgccaaaattagttttaaaatggacaagcttgcaccgtaagccagtactcttcttcgagaagccatagccttgcttcccttgcacgacaagtgcacgtcttctatccgaagcgtacttcctctataaataccaagtgacccttccatacttcactcaaccttgcctttacaaactcgagtaccatgaatccctacttagaaaacaattttcttgggggcttgatggaagaaatggaagaggaagaagaagagttgcagttggcgagggcacatggtcaataggaggcgacgtgcacgcaatgagcgtcgtcatggtggttcgattccagggcgtgttaggattcatcgtgatcacatgagcggcgatgcaagaatccgagcggactactttgggagccaaccccgtgtacacggatgctcaatttcgtaggaggttccgcatgcgtcgccatgtctttgagcgccttgttgatgctgtgcaacaagtggatccttattttattcaacgtcctaattgtgcgggtgagatgggtctttctgctctacagaaagttgttgctgctgttcgaatccttgcttacggtattccagctgatgccgttgacgaatacgtgcgtattggcgaatctactgctcatgaggcattgaaacacttttgcacggccgtccaaaccgcgtttgctccgtattatctccgtgcaccaaatgcagaagatatcgcacgccttctccaagttggcgagtcacgtgggtttcctggtatgcttggtagtgttgattgcatgcattgggagtggcgtaactgcccaagttcatggaaggggatgtttacagggcgtggtaaacatcctaccatgatcttggaagctgttgcgtcgtatgacctatggatatggcatgcatattttggtctgccaggtagttgcaacgacataaatgttcttcaccgttcaaaccttttcgaacggcatctgagcggtgacacacctccggtttcattcactgtgaatggtcacacgtacaatatgggatattacctagcagacgggatttaccctgactggcccgcatttgtcaagacaatccgtaacccctacgacgttagaacgcaacactttgcaacgattcaagagtctgctcgaaaagatatagaacgagctttcggtgtactccagaagagatggggtgtggtccgtggacctgcatacggatggagtcctgaacacattggggacatcatgaaaacatgcataatattgcacaacatgatagtagaagacgaaggtccattgtctttgaacacaacctttgaaaacatcggagtggtggcagacacaactcaaggttcactggaagagcgcaacgacttcgtcaatcaaaggtacaaccaactgaaagaccgcaacaaatatactcagcttcagatagatctgatacaccatcactgggcgcgacatggatccggagttgcataggatgcaatgaaacaagttctgtcatggctgttcttatctactgtcaaattgtctttgtttactttacattgttctactgtctgtgttagtgtcatgtttgttcttatcaagtgtgtgtactgtgtgtctgggtgttgaagtgtcgtagtgtctcatgctgctgtttgaattcaataacaaggagtactactgtca

SEQ ID NO: 92129 - DNA, 1337 bp, Zea Mays
ctcccgtcccttccccagttgcccttgccattgtttatcccggcctataactagtacaagaccgagcccgacccccggccactggagctgcagggccgcaggcggcaggcacgcacgcagggagagagatagataaaaggtcgcccccttgaggacagggcagggcagctgagggcaatgagcgctggcggaggcggcggcggcaccagcacgcttggcggcgggggcccgagcggcagcggcagcggaggccctggaggaagcggcggcggcgggccttgcggcgcgtgcaagttcctccggcgcaagtgcgtcagcggctgcatcttcgcgccctacttcgactcggagcagggcgcggcgcacttcgcggccgtgcacaaggtgttcggcgccagcaacgtgtccaagctgctgctccagatcccggcgcacaagcgcctcgacgccgtcgtcaccatctgctacgaggcccaggcgcggctccgcgaccccgtctacggctgcgtcgcccacatcttcgcgctccagcagcaggtggtgaatctccaggccgagctgacctacctgcaagcacacctcgccacgctcgagctgccggccccgcccccgctgccggccccgccgcagatgcccatgccaggcccgttctccatctcggacctgccgttgtcgaccagcgtccccaccaccgtcgacctgtccgcgctcttcgacccgccaccaccgcagtgggcgacggcgcagcagccgcaccaccaccatcaacagccgccgcagcaccaccagctccggcaaccggcgccgtatggcgctggcgcgtccgtcaggcccggcggcggccccggcatggcagagagctcaggcggagacgagctgcagtcgctggcgagggagctcctggaccgccaccggtccggcggcgtgaagctcgagcacccgccgccacactcaagatgagctggatgggggagtagaaggatcaaaaacccgtgcagaacaaggtgagagttggcgcccggcagtatcgagggagataggggtcggtgacgggcgatgtccagcacagcaggagtaggtaagcagcattggccggttttcgcgtacccagcacccctgttgttaatcggctggggtgcaatggcggcgcccacttgcttgatatattctccagtttgatcatatttgctccaagacaaaagaaagagtgctggggatcgacgagagtattactagaattgacatgtattagtaacattattgttacctttgataccgttccattagttgcaagatttttattaagaaaagaatctcaacatggtttctatactgtt

SEQ ID NO: 92130 - DNA, 1126 bp, Zea Mays
aaacaccttccgtcccctggccattctgtcacactactcagccagcccgctctatctctttcctctatccaagccagaaaggtagaaaccccccggaaacaatttccggccatggcgaccgcagcccaccaggttgccgccaccttcctctcgttcctttcctcctccactcaccacctcgccccttcctccgtctccctcgggacaacctctgtcctacccgtctcccttcgggccgctggcacacgtggcccacggctcgcctaccgcctccggggccgccgcgtcggtgccgccgtcgcccagctccccaccacgcatccagaggtagtttctggggagaagaagatcagatggtcatcaagggctgtgcggtcttttgcgatggcagagctggaggcccggaagatgaggtaccctacgacaggcactgaggggctcctcatgggcattcttgttgaaggaactagtggtgcagcaaaacttttgcgggctaatggaatcacacttctcaaagtgcgtgaggaggcagcgaatgtgcttgggaaatcagaaatgttttactttagtcccatgcatccaccattgacagaagctgcacagcgagcccttgattgggctgtcaatgaaaaattgaaatcaggtgaggatggagaagtaaatgccaatcatttgctactggggatatggtcagatgacgagtcagctggtcataaaatcctgtattcgctcggatttgacgatgtgaaagccagtttactggccaaaacggctgacgaggaggctgcaatgagtcctagatagcaaagggagcacctaatctgttattcaacttacaagagatgtgttagggtcaacttacaagcgattgccatgccggtgcctgtaaaaacgttgcggtttgtttgccacggtgaatgcttgtgttcctttctcagctggatttgtgatcagctcatagaaaaagaaaaaaaacttgtagggtccagtgggcctgacgagcccttcaaattttttgttcaatttgcagcctgaatcctaacaggcgagaatttcatgtgaactgtgatattacacagaactcttagtttctagagactaattttagtccttccattttatttca

SEQ ID NO: 92131 - DNA, 737 bp, Zea Mays
atttcggttatatattaaggcatgtaggaacccccaccttgaatagttcattttcatcacattaggctgtaaatactccctctgtcctaaactattagtcgttttagctcttgatttttatgtctatatttaaatagatgatgataaatctagacacatatataaaataaatacattaattattatatgaatcaactaaaaaggtaaaacaaattttattttgagacagatgagtactaaacagggtaaagttaaatttgctccaagggcggggcatgcgcccgagatccactactaaacagctattccatcatggctggtaaaggaggaatgcctctagaacccacatgtggcagcaaagatgggctcaatttcattcctataatttaagtcgtaccacacccatcactgtagcaagccgctcaaaatccgctgcaagttccaaatggtgtcaataagcatagtacaaaaaacaaaacaaagaactacatgccacatgaagctatctccagagtccagacagtgcgtcttaatcccgactctcctcaacaaagtgcttcaatcagttcaggaatgaatgtaaagtatggttatgaatttcctccctaaaaacacagatctagttgaatcctacaagattctgttttttaatgggaattgcataggatcacgagaatgtatcatacttagctgtttaaccagacagcactagttccattgttagccttcgtttgctt

SEQ ID NO: 92132 - DNA, 916 bp, Zea Mays
tagagtttgaatatgagtattgggatgagtaaagtgctggagatagccttatgagtctgcaaaagttacaaaaaaaatttaaatgtaaaaaatacaagttacaaaagaaacctctagttaaattggttagttgatctgagtaaaattggttagttgatctgagtagtattctgtattcctcaggttttgagttttaatcccagtcgaagcgaatttgaggttaaagctctcacgctaaatgcttctgttagcgtgtacttaccttctttgttcatcccgcattcccgcaacacgcgctaaatgcatattaatataataccatgggacagtctttttccaaccagcccgagtttttacagtgacaagttcaagtgttccaaacccaccatttcaaatgtgaatttgctgattatttaaattacttcccagccctaacaggaaaattgggtgatctactgcaatgattgaatgttgcggtcaataattaacttggaagcaaaaggaacagaaatctgtccattccttaaatcacttgagctttataaggccctttcagtgtcagcaaagatcaatgaccgaatcaccatatctccactgacgacaagggaaaaagaacactgcttcagcacagtttaattggatgttcacctcccacaggacatattaggtatatcactgaacattacgtacctactattcaatgaaacaagccaatatttcactgttgtgatcaaccctaagatgtttgtatcagacgaacagcccagtcagagtaatcaatggatgacagtgatctcagaaactaaaaaagattagactaatgtgtaagtagctgagaatagaatacaattctcacccatgattacattccagccagtgttgtttctttaatcaactggtatccaacaaaattctc

SEQ ID NO: 92133 - DNA, 212 bp, Zea Mays
atgataaataaattgctgaagatagtcttagacccaaacatattcacgaggaaatattacagtcacacagatactgctactgggctattggacggccacacatcgacgccacgtgcaggcaacacaggcaacaaaacacacggtaaatacataaacggagaaaccatctcgtgatcaagggcataccaggcttctcacttctaggcttctgg

SEQ ID NO: 92134 - DNA, 3167 bp, Zea Mays
acgatcccccttctcgatccctacacgtctcctgaaacgcacgccctcccttggctgccccccgccccttccctttcgccccctctcgcgcaatttccccagcccggaccccaaccccggcggcgctgcagtccaccgcaagtcacctccacctcacgcgaggcctccagccctcgtcgccccgcgcttctcccccacgacccggccgccttcgcgcttgcgccccgcggatcgccggcgcgaccctcaggtgtgtacgtctggcatggcaagggacctatcaactggccctgctttctcttttcatgaatgatgtccttccgttcgaaggacgcacatgcacaaacaagacttaactggccatggagaagccaatcgccgttatcagcgcagctgcttgttgatattccacctgaaatagagttgtccgactaccggagattgccaagttctcgaagcgagagcccatctggacttctccatgacgaaggcgtcaaggaagaacctatccctgatctggacattttctttgaaaggctttacgaatatttctgcgcaaaagggctcaggtgtatcattaccaaatggataatagagatcctcaatgtactttttatggtatgctgtatcgggttctttttcttatttgttgattgggatactcttattcatttgaaatgcggtgtggaggcacttgagtctggggagaaaccatgtgatcttatgaaggccattaagcatgatccattagttcccttcacattgcccaaaatgataactgttggatcaatggtcataatgacagcttatggacttaccaactttctcaagttctttgtacagttaagaagtacactcaatgttcgtcagttctactatgacagacttaaggtcaatgatcttgagattcaaactatatcatggcccaaaataattgagaaagttgtcctgctccagaaatctcaaaaactatgtgttgttagggatctctcagagcatgatattatcatgagaatcatgaggaaagaaaattatttgattgggatggtcaataaaggcattctttcttttccaattcattcttgtgtgcctggggctggcccaactggatcacatgagcatggcaggagaaactatctgatacttccaaagtcccttgaatggaccttaaactggtgcatctttcaaagtatgttcgatagtaaattttgtgtaaggaaagagtttttgacaagcccagatgtgttgagaaagcgacttatatttgttggcattgcaatgcttatcctatcaccctgccttgtgatatttccattggtgtacgtcattctaaggcatgctgaagaaatttataatcaccctagtacagcatcatctagacggtggtcaaacttatcaaggtggatctttagggaatataacgaggttgatcacttctttagacacagaatgaacaacagcgctgttcattctttaaattacttgaagcaatttccaaccccactggtttccatcatggctaaatttgtatcttttgtttctggtggcttggctggtgctctaataatcattggatttgtgggtgaatctattcttgaaggacatatttttggaagaaatcttctctggtatactattgtttttggaacaatagcagctataagtcgaaaagtagtggccgatgagcttcaagtttttgacccagaaggggccatgtgcctcgctgttcaccaaacacattacatgccaaagcgatggcgtggtaaagagaacagcgaacttgtacgaagagaatttgagacattatttccgtatactataatcatgctacttgaagagatggcctccattttcatcactccttacttgcttatttctgaggtacctaagcgagttgatgacattctgcgcttcatctcagacttcacaatatatgtagacggagtgggagatgtatgcagtctaagcttgtttaacttcaaaaaacatggaaatagaaactatgggtcaccattcaatgctcttaaaggtctcaggagctcccaagggaagatggagaaatcattcttaagtttccagagtgtctatccatcatgtgagccaaatgctgatggcaaacaattcttatctaacctccaaaagttcaaagaaaggcaagtacgtcaacaagctcttgcacaatatcaagcactggaggcttcaggctttgtggcaggcactagaggtcaaagggatgataccttccaacaactccatagcgatattcatggccacgctgaggccaccctgcctcctgtttataacttgagccccttgggattgcttgacacagaccaaagaatgcatccatatatcctggactggtattacacatgtcatccaccacactcggatagagctgagggcccccaatttgaccaagcattccctgagaccggtgtgagcacgagtccaccagcaagggaaacatctgaaattgaagaagtcggagactgggacaacgagttgtatgaaagggttcaaagtcatctgggggcatcaacatcaagtgctttgttctggaacactccagggaaggaccatggtacagaagaaaacactaacagcaattggtgggcacatgcccctgcatatccttctggtccccagggtagcttcatcgagcctccagattttggaaatcgatacatgacaaatcctcattccagtaatcacagtggcggtacatcggagggaagcacgtcggatctagagcagagcaatagcagaagcagaagttcctggaggagccctcaagcgttgtccaagacaagatatatggacgactctgatattgaggaagggctaagcctgcactttgctgatgtccatcagaaggatgaagacgatagacacctggtggtcagggatcatcaagatcccgcaccatctggtcttccagtaagaataatacctagaagcagtgaccctgtgtaagctggttaaacaccacaggattatcacataaaaaaaaactccacaggattagttgatgcatgttaacggttgtattttgttgtttgaaccacatcaaaatcaaatgctgcgtctcgcccgtgaactggcaaaacagtcacagattctttttgtacaggccagtaatgatagaaacattcttttacaagcgt

SEQ ID NO: 92135 - DNA, 1770 bp, Zea Mays
ttactcgtgccgtggagcttgtccggcgtccgcctctacaagaacgagaccacgtcgcatagtaatgcgcacgtgccacagagctcagctcagtagctcaccatggagttcttctacctctacacgctgatatcttccatcctcatcgtctcctccctgtacctccacttcttcttcgcccgcagccgccacaacctgcccccgggcccccgcccgctgcctctcgtcggcaacctcctcgacctcggctcccgcccacaccgctccctcgcgcgactcgcggcccgccacggcccgctcatggcgctgcgtctcggggtggtcaccacggtcgtcgcgtcctccgcggacgccgcgcgcgacgtcctccagcgccacgacgccgtcttctccacgcgctccgtgccggacgccgcccgggcgtgcgcgcacgaccaccgctccatgggctggctcccgccggggagccccctgtggcgcgccctgcgcaaggtgtgctccgcggagctcttcgcgccgcagcgcctcgacgcgcaccaggccctccgccgcgacaaggtgcagcggctcgtgtcgcacgtggccgggctggcgcgcgaaggcgcggccgtcgacgtccgccgcgtggccttcacgacagccctaaacctgctctcctgcaccatcttctccgacgaccttgcggaccttgatgaccgcggcgcgtcgggtgagttcatggcggtgatcgaggaattcccgatggccgtcggggcgcccaacttgtcggacttcttcccggcaatcgcgcccttggacccgcagcggattagggcgcgcctcgtgagggtgttcaagaagctgcacgccattttcgacgagcagattgagcggcgcgtgcaggagcgtgccgccggggatccacccaagaacgactttctggacctgttgcttgactaccgcggcgcggaggatgaccggggcttcgatcggcaaactctgctgtcattgcttacggatttattcactgctgggagtgatacaagcgcagccacaatagaatgggcgatggccgagctactacagagcccctcgtcgatggcgaaggctcgtgacgagctcgtggaagtgatcggctccaaacaagaggtggaggaatccgacgtcgggcagctcaagtggctccaggccgtcgtgaaggagacgttccgcctccaccctccggcgccactgctcctgccccgccaagccgagacgacgacggaggtcagaggatacacggtgccgaagggcacgcgcgtcctggtgaacgtgtgggcgatcggtcaggaccccgcgcggtgggccgagccagagaagttcatgccggagaggttcctggagaaggaggtcgatttccgcggcagggacttcgatctgctcccgtttggggctggccggaggatatgccccggcctgccgctggccgctcgcatggtgcatctgatgctcgcgaccttgctccaccggttcgagtggaggcttccggctgatgttgaaaggaacggggtggacatgtcggagaatcttggggtgacactcggaatgtctacgccgctccaggctatggctatgccgatttgaatcgttgccataggacgcactcgtttggagaaactaaagtagttccaaaatatactagtttatgttttagtttgtagaaactatatttccagtttttaaaaaataagaaactacacttctctagctaaaatcagattttgtttatttaattatatccttggttttatg

SEQ ID NO: 92136 - DNA, 83 bp, Zea Mays
ttgtttttacgccctctcgcggactcgtttatatttctaacgctaacccggcttgtagttgtgattatttttgagaattttag

SEQ ID NO: 92137 - DNA, 458 bp, Zea Mays
acaatagttgacagaagactgaagcgaactagttgccctgacaaactagattactgaaccaaaattttaagttgcgcagcccacagataagacatacagctacaaaaggattataagctaacaataactcgatgtctctcttacaggcacacaaggggagcacaaaaacaaaagcaacacgaatatatagatcgtcattacacgtctgcaacggtcacctcgacctcaacacccggctcaatggtgatagaggtgatctgcttcaccacgtctggggagctgatcaggtcgatcaccctcttatggatgcggaactcaaaccggtcccatgtctcgataccttcaccgcaaggggatttgcgggtggtgatgtggagaaccttagtagggatcctgacaggccccttaaccctcagatgcttatccttggctccctttaccaaatccgcacaaactga

SEQ ID NO: 92138 - DNA, 1734 bp, Zea Mays
aaacgccgaggcgcgattccgcaaagcgaccggccgcgcgacacgactgagcgagctcgctcgaccctcctgccgcggtgctgctacacagctagtactagtaagtaaattactccgccaccggtgcaactttccatacacgccgaggccacttgtgttctctgtatataaagggcgagggggtggtgggcgctatggagaggagcaacagctggttccggtggtggaggaagaaggcgcgcgaggggcaggggcagggcggccgcccccgtcacggcgagaaggtggtggtggacgggtcggagatccgggagctggtggaggaccgggaggcgttcgggatgctcgtggacaccaagttccggcagctcgacgccgacggcgacggcatgctctccgtgggggacctgcgccccgccgtggcagacatcggcgccgcgctcggcctgcccgcggagggggcgtcgcccaacgccgaccatgtctgctcagaggtggtgagcgagttgactcatgggacatcccagggcgaggtgagcaaggccgagttccaggaggccctgtcggacatactcctcggcatggcggcggggctcaagagggaccccctcgtgatactgcgcatggacggcgaggacctcagggacttcgccgccggcagcagatacgagcccacagctgccgccgttttctcgcaggtcgtcgatctcggttccgaagtcgcgtcaccgcgccaatgcgtgttggccgctctacagaagctgtccgtcgaccacggagtgcccccggcttcagatgcctgggtcgcgaagcacatcgtggagccggcgttgcagcagcttcttcctgccgatcagcctgggcagcagccggcctcccgcgatgacctgttccagcagctgaagaagctgctgggcgccgtcgctgatcgactccaggagcagcctgtgatcgtcgcgcacaccgagaaccactatgacgggagtggcgtcaagaggctgctggccaacaaattcgagttggacaagctgctggattctgtctggaaaaatttggcagcagaagataagaacaaggcgtccaaggggtgcctcataaccgcgcttgacaagatggccgatgctgcaagccttccatattacagtgctgtgaaagaggtggatgctgtcgtggaagagtcgatcaagacagcgggcgtcgaagaaggaaaggcagtggatgaagcggagttcaagaagtcgctcacagaaatccttagggctatcatgctgaggctgaacgacagccccgtcttcgtctctaccgacgtcgtcgtgcacgagcctttgtccgggacatcatcgtcggtgaactgaagggaaacgtacgacggaaacgtactgggaaaacggaacgggccagggtcattactgttggtatttgagcagtgcctgcgtagttgctttttgtctgatctcgcacagggactgcttttttgactgatctcacactgtgctctgctagcttgtcgcaagtttgcaacatgacaagatgtcaagatgaaggccatcatctggttttgttaacccgattgacatataagtttggaataaggcgttcaagccatacataattacatatcatcgacggcaacctaatagctattctaaattttgttttgctggagctcggagaaatatgttactcgatgcatgcaaaatacacagtcattcaatcagatgttatacactcgag

SEQ ID NO: 92139 - DNA, 1632 bp, Zea Mays
aaacgccgaggcgcgattccgcaaagcgaccggccgcgcgacacgactgagcgagctcgctcgaccctcctgccgcggtgctgctacacagctagtactagagcaacagctggttccggtggtggaggaagaaggcgcgcgaggggcaggggcagggcggccgcccccgtcacggcgagaaggtggtggtggacgggtcggagatccgggagctggtggaggaccgggaggcgttcgggatgctcgtggacaccaagttccggcagctcgacgccgacggcgacggcatgctctccgtgggggacctgcgccccgccgtggcagacatcggcgccgcgctcggcctgcccgcggagggggcgtcgcccaacgccgaccatgtctgctcagaggtggtgagcgagttgactcatgggacatcccagggcgaggtgagcaaggccgagttccaggaggccctgtcggacatactcctcggcatggcggcggggctcaagagggaccccctcgtgatactgcgcatggacggcgaggacctcagggacttcgccgccggcagcagatacgagcccacagctgccgccgttttctcgcaggtcgtcgatctcggttccgaagtcgcgtcaccgcgccaatgcgtgttggccgctctacagaagctgtccgtcgaccacggagtgcccccggcttcagatgcctgggtcgcgaagcacatcgtggagccggcgttgcagcagcttcttcctgccgatcagcctgggcagcagccggcctcccgcgatgacctgttccagcagctgaagaagctgctgggcgccgtcgctgatcgactccaggagcagcctgtgatcgtcgcgcacaccgagaaccactatgacgggagtggcgtcaagaggctgctggccaacaaattcgagttggacaagctgctggattctgtctggaaaaatttggcagcagaagataagaacaaggcgtccaaggggtgcctcataaccgcgcttgacaagatggccgatgctgcaagccttccatattacagtgctgtgaaagaggtggatgctgtcgtggaagagtcgatcaagacagcgggcgtcgaagaaggaaaggcagtggatgaagcggagttcaagaagtcgctcacagaaatccttagggctatcatgctgaggctgaacgacagccccgtcttcgtctctaccgacgtcgtcgtgcacgagcctttgtccgggacatcatcgtcggtgaactgaagggaaacgtacgacggaaacgtactgggaaaacggaacgggccagggtcattactgttggtatttgagcagtgcctgcgtagttgctttttgtctgatctcgcacagggactgcttttttgactgatctcacactgtgctctgctagcttgtcgcaagtttgcaacatgacaagatgtcaagatgaaggccatcatctggttttgttaacccgattgacatataagtttggaataaggcgttcaagccatacataattacatatcatcgacggcaacctaatagctattctaaattttgttttgctggagctcggagaaatatgttactcgatgcatgcaaaatacacagtcattcaatcagatgttatacactcgag

SEQ ID NO: 92140 - DNA, 729 bp, Zea Mays
ctttttagtctccacgctcggcgcggggacagaccaaacgccgaggcgcgattccgcaaagcgaccggccgcgcgacacgactgagcgagctcgctcgaccctcctgccgcggtgctgctacacagctagtactagtaagtaaattactccgccaccggtgcaactttccatacacgccgaggccacttgtgttctctgtatataaagggcgagggggtggtgggcgctatggagaggagcaacagctggttccggtggtggaggaagaaggcgcgcgaggggcaggggcagggcggccgcccccgtcacggcgagaaggtggtggtggacgggtcggagatccgggagctggtggaggaccgggaggcgttcgggatgctcgtggacaccaagttccggcagctcgacgccgacggcgacggcatgctctccgtgggggacctgcgccccgccgtggcagacatcggcgccgcgctcggcctgcccgcggagggggcgtcgcccaacgccgaccatgtctgctcagaggtacgcacccgatcgaattatgcttccaagacaagaaagctgctagcatggtacggtggctgatgatcgcgctggcggttccaagcattattgttgtactacatacataatagtacatgcttggattggattgtcggtacatcaatacttcaataattgagaattgctaaacaaagggacgtcaaaaaacaaaaacacaa

SEQ ID NO: 92141 - DNA, 1381 bp, Zea Mays
acacccatggttgaacttgaactggagaggcagtagccagagtgtgagctgacggcggacgtgctcgcctctcctctcctcacatttccggctcccctctccgcattccatggcaccgcattaccggtatttttagccgccggaggagacgggttgcgtagagagaggggaaaccagagctcctgactgttcctctctccctcctcacgggcgggctccgtctgttccgtccatccaccgccccggtcgtctcccggccagatccctctcctgcaaggtttctttgcgagtggccggagaagatgatgggcgggttcctctccagggtcctcctgctggcttttggctatgcctatcctgcctatgaatgctacaagaccgttgaactgaacaaaccacagattgagcagctcatattttggtgtcagtattggctaccgttttactcagaagcaaaggtgttgttctttgtatatttgtggtaccctaagacaaagggaactacgtatgtttatggaactttctttaagccatatatttctcagcatgagaatgaaatcgaccgaaatcttcttgagctcagagctcgagccaccgatatggttgtcctttacttccataaggctgcttcggtagggcaaaatactttctttgacgttttaaaatatgttgctgcccagtccccttctcggaaatcaaggctgcaccctcatcaggaaccacagcagcagcaaccacaagtgcaggtggagctgcagcagccgcaaccacaaaaacaagcagcacctgttatgcgcagaggagcatctattgctgctcggcaagcagcaatggcacagcaatctctggagactatacccgttccatcttcacccaagatcaagcgtcaaacatcagggagacctggttcggtggcatccacaaagcctgcagcagctgcatccacaccaaaacctggcggtagcccaaagaaagagggcgcggaagagcttgaccctgcgctcgaggagacgccgatggaggagacgatccgtgtgacgcgcgccaagctaaggaggcgcacggccaccgaggattctgctgggaattagctgcatgccgttgttttccctgcacattgtattgatctttttccgagttttaggctcacatgttgtttgctggaatggagatatgttgttgttcacttggttcttgtgacacagagttaattatcttatttccgtgctttcttagtacctttttgtgtgatttaagttgtaaataacagttcccctccgcatttgtatatagtttagcggcatgggcaacgaatgcctgtaattgcaacattacacgcttcaatctggtcactccttgggtatcttctcaagatgtgtca

SEQ ID NO: 92142 - DNA, 968 bp, Zea Mays
tactaaggcacttatggtcgtttggttccttttcaattgctaacacaagttcatactcaggataaactcagaaatttgttccatgtaggcattccttctgtatgtggtatgccatagggagggatgtaggacaagaaaggtcatctaaatcatgctttaatgccttccaggaaccacagcagcagcaaccacaagtgcaggtggagctgcagcagccgcaaccacaaaaacaagcagcacctgttatgcgcagaggagcatctattgctgctcggcaagcagcaatggcacagcaatctctggagactatacccgttccatcttcacccaagatcaagcgtcaaacatcagggagacctggttcggtggcatccacaaagcctgcagcagctgcatccacaccaaaacctggcggtagcccaaagaaaggtgaggtcaaacctgctgtcgacccagttcaaactccagccacaagtgcagattcaccaaaatccgagcctagtgccccaccactttctgagaccgaagaagtagacaacatggcaatcgatgaggtcagtggtgatgctgcagagggcgcggaagagcttgaccctgcgctcgaggagacgccgatggaggagacgatccgtgtgacgcgcgccaagctaaggaggcgcacggccaccgaggattctgctgggaattagctgcatgccgttgttttccctgcacattgtattgatctttttccgagttttaggctcacatgttgtttgctggaatggagatatgttgttgttcacttggttcttgtgacacagagttaattatcttatttccgtgctttcttagtacctttttgtgtgatttaagttgtaaataacagttcccctccgcatttgtatatagtttagcggcatgggcaacgaatgcctgtaattgcaacattacacgcttcaatctggtcactccttgggtatcttctc

SEQ ID NO: 92143 - DNA, 1559 bp, Zea Mays
gaacttgaactggagaggcagtagccagagtgtgagctgacggcggacgtgctcgcctctcctctcctcacatttccggctcccctctccgcattccatggcaccgcattaccggtatttttagccgccggaggagacgggttgcgtagagagaggggaaaccagagctcctgactgttcctctctccctcctcacgggcgggctccgtctgttccgtccatccaccgccccggtcgtctcccggccagatccctctcctgcaaggtttctttgcgagtggccggagaagatgatgggcgggttcctctccagggtcctcctgctggcttttggctatgcctatcctgcctatgaatgctacaagaccgttgaactgaacaaaccacagattgagcagctcatattttggtgtcagtattggattttagttgccctgttgacagttttggagagatttggagattttacaatatcatggctaccgttttactcagaagcaaaggtgttgttctttgtatatttgtggtaccctaagacaaagggaactacgtatgtttatggaactttctttaagccatatatttctcagcatgagaatgaaatcgaccgaaatcttcttgagctcagagctcgagccaccgatatggttgtcctttacttccataaggctgcttcggtagggcaaaatactttctttgacgttttaaaatatgttgctgcccagtccccttctcggaaatcaaggctgcaccctcatcaggaaccacagcagcagcaaccacaagtgcaggtggagctgcagcagccgcaaccacaaaaacaagcagcacctgttatgcgcagaggagcatctattgctgctcggcaagcagcaatggcacagcaatctctggagactatacccgttccatcttcacccaagatcaagcgtcaaacatcagggagacctggttcggtggcatccacaaagcctgcagcagctgcatccacaccaaaacctggcggtagcccaaagaaaggtgaggtcaaacctgctgtcgacccagttcaaactccagccacaagtgcagattcaccaaaatccgagcctagtgccccaccactttctgagaccgaagaagtagacaacatggcaatcgatgaggtcagtggtgatgctgcagagggcgcggaagagcttgaccctgcgctcgaggagacgccgatggaggagacgatccgtgtgacgcgcgccaagctaaggaggcgcacggccaccgaggattctgctgggaattagctgcatgccgttgttttccctgcacattgtattgatctttttccgagttttaggctcacatgttgtttgctggaatggagatatgttgttgttcacttggttcttgtgacacagagttaattatcttatttccgtgctttcttagtacctttttgtgtgatttaagttgtaaataacagttcccctccgcatttgtatatagtttagcggcatgggcaacgaatgcctgtaattgcaacattacacgcttcaatctggtcactccttgggtatcttctc

SEQ ID NO: 92144 - DNA, 1399 bp, Zea Mays
ggagaggcagtagccagagtgtgagctgacggcggacgtgctcgcctctcctctcctcacatttccggctcccctctccgcattccatggcaccgcattaccggtatttttagccgccggaggagacgggttgcgtagagagaggggaaaccagagctcctgactgttcctctctccctcctcacgggcgggctccgtctgttccgtccatccaccgccccggtcgtctcccggccagatccctctcctgcaaggtttctttgcgagtggccggagaagatgatgggcgggttcctctccagggtcctcctgctggcttttggctatgcctatcctgcctatgaatgctacaagaccgttgaactgaacaaaccacagattgagcagctcatattttggtgtcagtattggattttagttgccctgttgacagttttggagagatttggagattttacaatatcatggctaccgttttactcagaagcaaaggtgttgttctttgtatatttgtggtaccctaagacaaagggaactacgtatgtttatggaactttctttaagccatatatttctcagcatgagaatgaaatcgaccgaaatcttcttgagctcagagctcgagccaccgatatggttgtcctttacttccataaggctgcttcggtagggcaaaatactttctttgacgttttaaaatatgttgctgcccagtccccttctcggaaatcaaggctgcaccctcatcaggaaccacagcagcagcaaccacaagtgcaggtggagctgcagcagccgcaaccacaaaaacaagcagcacctgttatgcgcagaggagcatctattgctgctcggcaagcagcaatggcacagcaatctctggagactatacccgttccatcttcacccaagatcaagcgtcaaacatcagggagacctggttcggtggcatccacaaagcctgcagcagctgcatccacaccaaaacctggcggtagcccaaagaaagagggcgcggaagagcttgaccctgcgctcgaggagacgccgatggaggagacgatccgtgtgacgcgcgccaagctaaggaggcgcacggccaccgaggattctgctgggaattagctgcatgccgttgttttccctgcacattgtattgatctttttccgagttttaggctcacatgttgtttgctggaatggagatatgttgttgttcacttggttcttgtgacacagagttaattatcttatttccgtgctttcttagtacctttttgtgtgatttaagttgtaaataacagttcccctccgcatttgtatatagtttagcggcatgggcaacgaatgcctgtaattgcaacattacacgcttcaatctggtcactccttgggtatc

SEQ ID NO: 92145 - DNA, 908 bp, Zea Mays
gaacttgaactggagaggcagtagccagagtgtgagctgacggcggacgtgctcgcctctcctctcctcacatttccggctcccctctccgcattccatggcaccgcattaccggtatttttagccgccggaggagacgggttgcgtagagagaggggaaaccagagctcctgactgttcctctctccctcctcacgggcgggctccgtctgttccgtccatccaccgccccggtcgtctcccggccagatccctctcctgcaagagtggccggagaagatgatgggcgggttcctctccagggtcctcctgctggcttttggctatgcctatcctgcctatgaatgctacaagaccgttgaactgaacaaaccacagattgagcagctcatattttggtgtcagtattggattttagttgccctgttgacagttttggagagatttggagattttacaatatcatggctaccgttttactcagaagcaaaggtgttgttctttgtatatttgtggtaccctaagacaaagggaactacgtatgtttatggaactttctttaagccatatatttctcagcatgagaatgaaatcgaccgaaatcttcttgagctcagagctcgagccaccgatatggttgtcctttacttccataaggctgcttcggtagggcaaaatactttctttgacgttttaaaatatgttgctgcccagtccccttctcggaaatcaaggctgcaccctcatcaggtttggtcgaatgtattctcttttttgtccaaaaaaaatccattgaataatttgttgttaagtgttcatcatgtttacacagatactcaaaactttttttaatgttcttctctgatgcaatattgatcatgatgttagactaattttagcagctatgt

SEQ ID NO: 92146 - DNA, 597 bp, Zea Mays
cgcatctaaagtgctagtctattgaaggatactttgatactaaaaccatgcagctttagattggcagcttttctttttgtgatttattacagaataaaggaaagaaataaaacaaatagttttcccccctgaaatgccaacttactgtatgagaaagaacaggtttttgtcataatatacaagtgctaacatgccatttatcttccggcatttgatatgccaatttcctgtaggctggcttttggctatgcctatcctgcctatgaatgctacaagaccgttgaactgaacaaaccacagattgagcagctcatattttggtgtcagtattggtaaggtgtttcagtgaattgtctggtcgcaagattgacttccatgaacaatctgtcaaatttagtttcgtttcctgtctctaggattttagttgccctgttgacagttttggagagatttggagattttacaatatcatggtgagactgtgaaagcttgtgattttcttcagttcattgacatactctaacattgtgtgcgctcatgatgaaggctaccgttttactcagaagcaaaggtgttgttctttgtatatttgtggta

SEQ ID NO: 92147 - DNA, 613 bp, Zea Mays
acacccatggttgaacttgaactggagaggcagtagccagagtgtgagctgacggcggacgtgctcgcctctcctctcctcacatttccggctcccctctccgcattccatggcaccgcattaccggtatttttagccgccggaggagacgggttgcgtagagagaggggaaaccagagctcctgactgttcctctctccctcctcacgggcgggctccgtctgttccgtccatccaccgccccggtcgtctcccggccagatccctctcctgcaaggtttctttgcggtatggtcggttctctgtggtttctcttctgaatgtgctggtgcggtgatgttgttttgatttgtgttcgctttggcggatctggtcgcgcacagagtggccggagaagatgatgggcgggttcctctccagggtcctcctgtaagcgctctattgctccgaatcttgtagcatgttgtttgtagattgacatgttgaggttggagccttatcagaggcatgagtttcgggtttgaatttgtttccttgaaatgggattttgtgggtgcccattcagagagttcagtctcttcttggtttaaactcttcattcgttcttaacata

SEQ ID NO: 92148 - DNA, 177 bp, Zea Mays
gcttttgttgttccatccaaacaaacaaaagatatatatcattcacatcacattatatatcaagcacatcacagaatgaacacatttatcatcaacaccatatatatcacaaagtctcacaaaacagatcacactaaagtcaggatcatcacaaaacagatacaagtctgcatcatc

SEQ ID NO: 92149 - DNA, 250 bp, Zea Mays
gtgttctaaacacacggcaaaggctattttacactcggcaaaggctttgccgagtgtaacactcggcaaagaacgctcggcgaactgtacatcggcaacagcttctttgccgagtactttttgtcgggcactcggcaaagtctttgccgagtgccatttggcactcggcaaagaaaagtcaccgtcacggcgccaagtaacggtgacggatcctttaccgagtgcctacggcgacactcggcaaagactg

SEQ ID NO: 92150 - DNA, 2011 bp, Zea Mays
agggccctgcagcggcggcagctggcgggagagaggcttgggactgggccgcccggccgcgaggaataaactcactcctgtcttcatacgtatccatagccggcaggcggcagtacctgtatgtggttttagctatacgcgacctcagttcgggcgcaaggttagtcttcgatttaagcatagattttattttatcttcttggctccaccaaataacactaacaaaatcgctttggcttctatgggttcaaattaagcactggatcgtaccattttcttgttcatttatactttgtcatccaatccacaccgattaatttctcacggtcaacaacgcatgaagttttcatttctgggaagaagcatgtattttttttatctccgactcgatctagtggtgagaggaggaagatgaatagtgcatgcatatgatatctagagaggcaccagatctagtggctccatgttctgttcgcgggctaagaaaaaacataaacaagcaggcgcctgaaaaatagctagtccctaactttttagaccaatctgtatgtttattttgacgatattggtatgaaaaagtctctcaagaacaatatacatatgcagcatgcatgtgcatggtataattataaattattagcagagtttagataagtaggcccccacgtctgcgctccgccacctacagcgagcctccctttcctccctccctgattcgtttgcacttgctgagagctcaacagaatttggtcaccgatttcaattcgcagctactaattctcaccacattgaaattttcgatttgaaacagtacaatttctgaagagaaattgtacgtctgaaacggttgcatgtgtactatgaactgctagccattccctgcatacgtgggacacgctcagatcattcattcgcagcacgtacgtaaccttaatattctactatacatccatgcagctacaaccccgaccaggcgagaagaagcatcgatagtgtgacgagctaacccaccaccagcaacgtaatccaaatccatggacaaccagccgctgccctactccacaggccagccccctgcccccggaggagccccggtggcgggcatgcctggcgcggccggcctcccacccgtgccgcaccaccacctgctccagcagcagcaggcccagctgcaggcgttctgggcgtaccagcgccaggaggcggagcgcgcgtccgcgtcggacttcaagaaccaccagctgcctctggcccggatcaagaagatcatgaaggccgacgaggacgtgcgcatgatctccgccgaggcgcccgtgctgttcgccaaggcctgcgagctcttcatcctcgagctcactatccgctcctggctccacgccgaggagaacaagcgccgcaccctgcagcgcaacgacgtcgccgcggccatcgcgcgcaccgacgtcttcgatttcctcgtcgacatcgtgccccgcgaggaggccaaggaggagcccggcagcgccctcggcttcgcggcgcctgggaccggcgtcgtcggggctggcgccccgggcggggcgccagccgccgggatgccctactactatccgccgatggggcagccggcgccgatgatgccggcctggcatgttccggcctgggacccggcctggcagcaaggggcagcggatgtcgatcagagcggcagcttcagcgaggaaggacaagggtttggagcaggccatggcggcgccgctagcttccctcctgcgcctccgacctccgagtgatcgatcggcgcgtctcttggtcctggcctcctggcttagctacatgtgcatgatgtcaatcgttcaatgtgccatgctgtgtatactctacagcaaacgtggtaatggagctgctatgcatacagaacgaataaggcgtgacgtgtgagaccgtaagagtacgtagtactaatatgtagatgcacgtgacgtgccaattaatcaaagattaacatgcagttaattaattagtcctccta

SEQ ID NO: 92151 - DNA, 1214 bp, Zea Mays
agggccctgcagcggcggcagctggcgggagagaggcttgggactgggccgcccggccgcgaggaataaactcactcctgtcttcatacgtatccatagccggcaggcggcagtacctgtatgtggttttagctatacgcgacctcagttcgggcgcaagctacaaccccgaccaggcgagaagaagcatcgatagtgtgacgagctaacccaccaccagcaacgtaatccaaatccatggacaaccagccgctgccctactccacaggccagccccctgcccccggaggagccccggtggcgggcatgcctggcgcggccggcctcccacccgtgccgcaccaccacctgctccagcagcagcaggcccagctgcaggcgttctgggcgtaccagcgccaggaggcggagcgcgcgtccgcgtcggacttcaagaaccaccagctgcctctggcccggatcaagaagatcatgaaggccgacgaggacgtgcgcatgatctccgccgaggcgcccgtgctgttcgccaaggcctgcgagctcttcatcctcgagctcactatccgctcctggctccacgccgaggagaacaagcgccgcaccctgcagcgcaacgacgtcgccgcggccatcgcgcgcaccgacgtcttcgatttcctcgtcgacatcgtgccccgcgaggaggccaaggaggagcccggcagcgccctcggcttcgcggcgcctgggaccggcgtcgtcggggctggcgccccgggcggggcgccagccgccgggatgccctactactatccgccgatggggcagccggcgccgatgatgccggcctggcatgttccggcctgggacccggcctggcagcaaggggcagcggatgtcgatcagagcggcagcttcagcgaggaaggacaagggtttggagcaggccatggcggcgccgctagcttccctcctgcgcctccgacctccgagtgatcgatcggcgcgtctcttggtcctggcctcctggcttagctacatgtgcatgatgtcaatcgttcaatgtgccatgctgtgtatactctacagcaaacgtggtaatggagctgctatgcatacagaacgaataaggcgtgacgtgtgagaccgtaagagtacgtagtactaatatgtagatgcacgtgacgtgccaattaatcaaagattaacatgcagttaattaattagtcctccta

SEQ ID NO: 92152 - DNA, 328 bp, Zea Mays
accacaagttcacaattcatgatataactagttcacaatataaaagttcaaaaggatcacaaatttataatataaaaagtttacaaagatcacaagttcacaatataacaagttcacagtataacaagttcataaagatcacaagttacagactcaaagttcacaattcacaatatctactcgatctagctgacattacatgcttacttatgaaatattttttcctcacataaagagtttttcacaacctcgcaggaaaaccctaaaacctagtgtgtggaaaagaccaaatcgttaatctcaactgccttccaacaccatctatccc

SEQ ID NO: 92153 - DNA, 434 bp, Zea Mays
gggactttttggtggagtccgaggacgaggcctccctcaataatggtgaggacctcgagctcctcctcggtgtggattgggaggagagcgacgacgatctcttctcttgggacagagccgataagtcctcggagggctaggaaggcgacatgtccttggcggaggagccactctttgttaggttctccaacgacaacgacgatgatgggaacaccggcaaggggtctggcgacccggcaggagcgacgacgatggcgacgaggctgacgcgtcccctccatccaaatgtcacaaggttgagtaacttgttggagtagttagttagcattttggtggtgcctagcccagctgacggatcggctcgtggaagaacttggcctcttatgttaagaactactacttattatatgattaatgctgtttgtgatgttgta

SEQ ID NO: 92154 - DNA, 1639 bp, Zea Mays
gagaaaaaaaagacagaagaaatgggattcatatcgggagtcgtaatggggatgatcgtcggcgtcgccctgatcgcaggctgggcacgcgccatggctcgccgcgccgccaaacgcagcaacaaggctgcggttatcagttcgttgggatctctcaaccgtgaagacgtgaagaaaatatgtggagaaagtcttccccagtggatatcatttccagaatacgaacaggtcaaatggctcaacaaacagttgagcaagctttggcccttcgtggaagcggcagcaaccatggtcatcagggattctgtcgaaccgatactcgatgattatcgaccaccagggatatcctcgctgaagttcagcaggctctcccttgggactgttccaccgaaaatagaaggcattcggattcacagttttaagaaagggcagattacaatggacatggacttccgctggggcggggatccaaatatcattcttgcagtcgagacacttgttgcttcgcttcccattcagtttaagaaccttcaggtgtacaccatcatccgtgttgtcttccagttgtcggacgagataccatgcatatctgctgtcgttgttgctcttctggccgagccaaaaccgaggatcgactacatactgaaagccgtgggaggaagcctgaccgcaatgcctgggctttcagacatgattgacgacacggtggcgtcattgatcactgacatgctccagtggccacacagaatcattgttccactgggtggagtcgacgtagacgtcagtgacctcgagctgaagccgcacgggaagctcactgtcactgtggtccgcgcggaatccctcaagaacaaggaactcatcggcaaatccgacccctacgtggtcttgttcatccgcccaatgttcaaggagaagaccagcgtcattgacgacaacctcaacccccattggaacgaaacgttccatctgatctcggaggacaaggagacgcagtccctaattcttgaggtgttcgatgaggacaagatgaagcaagacaagaggcttggcatcgccaagctgcccctgagcgacctggagatggaaaccgtgcaggaggtgaaactgcagctgctgtcgtcgctggacacgaccaaggtcaaggacaagaaggacaggggcgtgctcagcattaaggcaggatcgatcaacctcgtcctttccgtgttcagttcgcagcggttgtctgacgttcctcttgcaagctgtattgcaggtggcgtaccaccagttcaccaacgcagaggcgcgggaggccctggagctggagaagcagaccgtggatgagcggcggaaggtgaagagcgagacgggggccgtcagcggcgccgcggacgcggcaagcggcatggcgtccacggtcaccaacgtggccggcacgggcatcgcggcggccggcaccgttgccggcacgggtgtcagcgcggccggctccggcgttgggatggttggcacgggcatcggcgccgtcggctccggcattggcgcgttcggtagcggactcagcaaggccggcaagttcgttggccggactgtcacgggacctttcagcagctctaggcgcagcaccagcagcgttcccaacgtcgttgacgac

SEQ ID NO: 92155 - DNA, 2239 bp, Zea Mays
agccgcaaggccagacagacgccgagcccagccagcgccagccgaagacgaccgccgcccgggagccagcccaatcaaacccatcgcccatcggtctcctctctccctctttgtccaccgcgtcgtcgtctcgtctccctccccgcccctcgtatattaacagccccgtcgtgactacactgaccaccgcctcgaatccatcgctccgctactcgaaccagactcattggtgcatactcccgcgtcccgcctggctccggggtccattcgtcgacccatctccggcgaaagcttacctctactaccactgaagcgaaggcgtcacatcggaagaattgtagctgtttgtcctcctcttcccgacagcgcagagcggagatccgaccggacctgggatcgattccttccttttctcgattctgggcgctaacggttcctgagggaagctcctggggacatggacatggcattgcccgttgtgaatgccacagcggcggtgctcgcccgtgtctcggctgcgttcaatgccccacttgcccgtgcagtcgtcttcggggtccatatcgatgggcacttggtcgtggaagggcttcttattgcagtcatcgtgtttcagctctccaggaagagctacaaaccaccaaagaaaccacttactgaaaaggagattgatgagctatgtgatgagtgggagccagagccgctatgccctccagtcaaggagggggctcgaattgatactccaatgttggaaagtgctgctggaccacatacgattgttgatggtaaagaagttgtgaactttgcatcagcaaactacctcggtttaattggcaatgagaagattattgattcttgcattggttcactggagaaatatggtgttgggtcttgtggtccacgtggcttttatggaacaattgatgtccatcttgactgtgagtcaaaaatagctaaattcctgggcactccagactccattctgtattcatatgggatttctacaatattcagtgtgatacctgccttttgtaagaaaggagatatcatagtcgctgatgagggtgttcactgggcagtgcaaaatggtctccatttatcaagaagcactgtggtgtacttcaagcacaatgatatggtttcacttgcaagcactttggaaaaacttacacatggaaataaacgtgctgaaaagattagacgctacattgttgtagaatccatttaccagaattctggccaaattgcccccttggatgaaatcgtcaggttgaaggagaaatatcggttccgtgttattctggaggagagccattcttttggtgtgcttggcaagtctgggcgtggccttgctgaacattatggagttcctattgaaaaaattgatataattactgctggaatgggaaatgcattagctaccgatggtggattttgtacaggaagtgtcagagttgttgatcatcagcgtctaagcagctctggatatgttttctctgcatctctgccaccttatcttgccactgctgctgtttctgctgtcaactacctggagcagaatcccgcagttcttgcaaatctaaggagcaatattgctcttttgcataaagaattatcagatactccagggctagaaattttcagccatgttttgtcacctattgtcttccttaagctgaagaaatcgacaggttctcctaccactgacctagaccttcttgaaactattgctggcagggtcttgaaggaagactcagttctcattgtgacatcaaagaagtcaaatctggataggtgcaaactccccgttggaatccgcctgtttgtatcagctggacatactgaatccgacatctccaggctttcctcatccttgaagcgagtttctgcggcagttctttcagactgcttttgatccacatcggatacccttgaagatgaaagccatccattttctacgcactttgtaccctagaccgtgtgtgtgtgtttggtaaatgtacataacctgtacatttctacatatttatgaattcaccttgttgtcgtttatacccgtagtacatgggattttttttttgtagaacagtgatgttggagaatagtgcgtttgtgctgtacatctcgttgatttccatgtagtgatgttttcccctgtatcctcacccacaagacattggccgtcttatattttcaaacaattgcaacacccacctctgctgtgttgttaattagactc

SEQ ID NO: 92156 - DNA, 2067 bp, Zea Mays
agccgcaaggccagacagacgccgagcccagccagcgccagccgaagacgaccgccgcccgggagccagcccaatcaaacccatcgcccatcggtctcctctctccctctttgtccaccgcgtcgtcgtctcgtctccctccccgcccctcgtatattaacagccccgtcgtgactacactgaccaccgcctcgaatccatcgctccgctactcgaaccagactcattggtgcatactcccgcgtcccgcctggctccggggtccattcgtcgacccatctccggcgaaagcttacctctactaccactgaagcgaaggcgtcacatcggaagaattgtagctgtttgtcctcctcttcccgacagcgcagagcggagatccgaccggacctgggatcgattccttccttttctcgggcacttggtcgtggaagggcttcttattgcagtcatcgtgtttcagctctccaggaagagctacaaaccaccaaagaaaccacttactgaaaaggagattgatgagctatgtgatgagtgggagccagagccgctatgccctccagtcaaggagggggctcgaattgatactccaatgttggaaagtgctgctggaccacatacgattgttgatggtaaagaagttgtgaactttgcatcagcaaactacctcggtttaattggcaatgagaagattattgattcttgcattggttcactggagaaatatggtgttgggtcttgtggtccacgtggcttttatggaacaattgatgtccatcttgactgtgagtcaaaaatagctaaattcctgggcactccagactccattctgtattcatatgggatttctacaatattcagtgtgatacctgccttttgtaagaaaggagatatcatagtcgctgatgagggtgttcactgggcagtgcaaaatggtctccatttatcaagaagcactgtggtgtacttcaagcacaatgatatggtttcacttgcaagcactttggaaaaacttacacatggaaataaacgtgctgaaaagattagacgctacattgttgtagaatccatttaccagaattctggccaaattgcccccttggatgaaatcgtcaggttgaaggagaaatatcggttccgtgttattctggaggagagccattcttttggtgtgcttggcaagtctgggcgtggccttgctgaacattatggagttcctattgaaaaaattgatataattactgctggaatgggaaatgcattagctaccgatggtggattttgtacaggaagtgtcagagttgttgatcatcagcgtctaagcagctctggatatgttttctctgcatctctgccaccttatcttgccactgctgctgtttctgctgtcaactacctggagcagaatcccgcagttcttgcaaatctaaggagcaatattgctcttttgcataaagaattatcagatactccagggctagaaattttcagccatgttttgtcacctattgtcttccttaagctgaagaaatcgacaggttctcctaccactgacctagaccttcttgaaactattgctggcagggtcttgaaggaagactcagttctcattgtgacatcaaagaagtcaaatctggataggtgcaaactccccgttggaatccgcctgtttgtatcagctggacatactgaatccgacatctccaggctttcctcatccttgaagcgagtttctgcggcagttctttcagactgcttttgatccacatcggatacccttgaagatgaaagccatccattttctacgcactttgtaccctagaccgtgtgtgtgtgtttggtaaatgtacataacctgtacatttctacatatttatgaattcaccttgttgtcgtttatacccgtagtacatgggattttttttttgtagaacagtgatgttggagaatagtgcgtttgtgctgtacatctcgttgatttccatgtagtgatgttttcccctgtatcctcacccacaagacattggccgtcttatattttcaaacaattgcaacacccacctctgc

SEQ ID NO: 92157 - DNA, 776 bp, Zea Mays
caaacctaatcagcaggatctactagctagctagctgttgagagcttgacacaaagaagcgaccgagcggtcgagctagcttccaccatgtcttggagccagagcgagaacgcgcggttcgagcgcgcgctggccacctacgaccgggacacgcccaggcggtgggagctcgtggccgccgcggtgggcggcgggaagaccgccgaggacgccaggcggcactacgccgacctcgtcgacgacgtcggcgacatcgagtccggcggctacggcgccaacgaccaaaacgccaacggcggcgccaacggcagcaacgggaacaacaggggcggcagagccaaccggccccagacatgaggggcgcctgccgcgggagaccgcaccagcacgccggccggacgacgttgcgcgcgtgcatgcaatgattgttcgtcgtgtacgtacgtgagtcctgagatatgtatgtatgttcgtgtgcctgtgtgtaactatatatatatatatgtgtatacatatatatcggcatgcatgcatatgcgcaaagtgcgcacaagtatatatgcgctgttgtggcagaagccgtgtctgatcagtgtgaccgagtgcgaggagctagcacgggcgcatagctgcagcctgctagctagctcctgatggatgtgcatgatggtaaagggcggggatgagcatgcagtagttgctcctcgatcgtctctgttgcattgcatattgcagtattgcgctacatatatatatgtgtaaattaaaggctgctc

SEQ ID NO: 92158 - DNA, 2114 bp, Zea Mays
acctgggccgtcagactcgccgcgcggcgcggccccgaccacatcgccgattcctcgtttcctccgcacccgcacgcttcccacccgctgccccgcgcccagccgtcgccgtgatcgccagagcgttcctctgccgagccgttcggccggtccactcccgcgaagcttccagtagaggcgaccttcggatcgagtctcggccgccgaggagtcgaaggccatggaagtggtggcgtcggcgccggggaaggtgctcatcgcgggaggatacctcgtgctggagcgccccaacgccggcctagtcctcagcaccaccgcccgcttctacgccgtcgtccgccccctccgcgacagcctccccgccgacgcttgggcctgggcgtggacggatgtcaaagtgacttcccctcagctctcacgggaggccacatacaagctgtccctaacgaagtcgacgctgcaattgacgtctgcgagggaatctacaaacccttttgtggagcaggccatacaattctcggtagcagctgctaaagcgaccattattgataaggagaggaaggatgtagtagataagttgctgctgcaaggtctgaacattacaattcttggatgcaatgatttctattcttatagaaagcagattgaagcacgcggtctccctcttactccagaggcactgctttcattgcctccattctcttcaatcacatttaactcagaggttgctaatggaacaatgactggagagaaatgtaaacctgaagtagccaaaactggacttgggtcatcagctgccatgaccacatcagttgttgcagctcttcttcactatcttggtgtcgttagcctctcatgtccaggacaatcttctggtgataatacaactacacgagaacttgacttggttcactctattgcccaaagtgcacattgtatagcacaggggaaaattggcagtggttttgatgttagtgctgctgtctatgggagtcaacgctatgtaaggttttctccagaaatactctcgtctcaggctacaggtgggactttcctcccagatgtagtatcagatattgttacacaaaggtgggatcatgagaataaacagttctcattacctcctctgatgacccttctccttggggaacctggaaccggaggatcatctactccatcaatggttggatctgtgaaacggtggcagaagtctgactctgagaaatgcaaagatacatggagtaaactggcctttgccaattcagcgctggagaaccaactgcgaatcttaaaaggactttctgaaaatcaccgagaggcatatgagtcggtagtgctatcctgtagccatctcacttatgagaagtggacagaggtggctactaaccaacatcaagaattaattattaaatcattgttggctgcaagggatgcttgccttgagataaggcttcacatgcgagagatgggcatagcagccggtgttccgattgagccagattcacaaacacggctacttgacgccactatgaatatggagggtgttttacttgctggagttccgggagctggtggcttcgatgcagtattctcagtgactttgggggatgcaagtaatgctgtagcaaatgcttggagctctgctggcgttctgccacttctcgttcgagaagactgccgtggtgtctcattggaagatgctgacccaagaacaagggaggtatcggcagctgtatcgtccattcagattaattgattctactgttaatattctatttatgtattgtgccgaatgctaggaggtacgtggttaaaataagtgctgcacttgcagcaagttagcacgttgtttacaatgactgttcatgagtgtagaaaataaggaattcaatggatttccatggaattagtgcttgtagttatagctatggaatgtacgtgagaaaatgtcaaggtatccaacaaactcatactgtaaaccttgtatttgtaacttttgcggtttgtatgataattcggcatgtgttaatgtttgatatctgaccttatcccatgataggtagtggtcgcggctataagtctgtccgtggtcagtggtcagtagccaactgttt

SEQ ID NO: 92159 - DNA, 2002 bp, Zea Mays
acctgggccgtcagactcgccgcgcggcgcggccccgaccacatcgccgattcctcgtttcctccgcacccgcacgcttcccacccgctgccccgcgcccagccgtcgccgtgatcgccagagcgttcctctgccgagccgttcggccggtccactcccgcgaagcttccagtagaggcgaccttcggatcgagtctcggccgccgaggagtcgaaggccatggaagtggtggcgtcggcgccggggaaggtgctcatcgcgggaggatacctcgtgctggagcgccccaacgccggcctagtcctcagcaccaccgcccgcttctacgccgtcgtccgccccctccgcgacagcctccccgccgacgcttgggcctgggcgtggacggatgtcaaagtgacttcccctcagctctcacgggaggccacatacaagctgtccctaacgaagtcgacgctgcaattgacgtctgcgagggaatctacaaacccttttgtggagcaggccatacaattctcggtagcagctgctaaagcgaccattattgataaggagaggaaggatgtagtagataagttgctgctgcaaggtctgaacattacaattcttggatgcaatgatttctattcttatagaaagcagattgaagcacgcggtctccctcttactccagaggcactgctttcattgcctccattctcttcaatcacatttaactcagaggttgctaatggaacaatgactggagagaaatgtaaacctgaagtagccaaaactggacttgggtcatcagctgccatgaccacatcagttgttgcagctcttcttcactatcttggtgtcgttagcctctcatgtccaggacaatcttctggtgataatacaactacacgagaacttgacttggttcactctattgcccaaagtgcacattgtatagcacaggggaaaattggcagtggttttgatgttagtgctgctgtctatgggagtcaacgctatgtaaggttttctccagaaatactctcgtctcaggctacaggtgggactttcctcccagatgtagtatcagatattgttacacaaaggtgggatcatgagaataaacagttctcattacctcctctgatgacccttctccttggggaacctggaaccggaggatcatctactccatcaatggttggatctgtgaaacggtggcagaagtctgactctgagaaatgcaaagatacatggagtaaactggcctttgccaattcagcgctggagaaccaactgcgaatcttaaaaggactttctgaaaatcaccgagaggcatatgagtcgtggacagaggtggctactaaccaacatcaagaattaattattaaatcattgttggctgcaagggatgcttgccttgagataaggcttcacatgcgagagatgggcatagcagccggtgttccgattgagccagattcacaaacacggctacttgacgccactatgaatatggagggtgttttacttgctggagttccgggagctggtggcttcgatgcagtattctcagtgactttgggggatgcaagtaatgctgtagcaaatgcttggagctctgctggcgttctgccacttctcgttcgagaagactgccgtggtgtctcattggaagatgctgacccaagaacaagggaggtatcggcagctgtatcgtccattcagattaattgattctactgttaatattctatttatgtattgtgccgaatgctaggaggtacgtggttaaaataagtgctgcacttgcagcaagttagcacgttgtttacaatgactgttcatgagtgtagaaaataaggaattcaatggatttccatggaattagtgcttgtagttatagctatggaatgtacgtgagaaaatgtcaaggtatccaacaaactcatactgtaaaccttgtatttgtaacttttgcggtttgtatgataattcggcatgtgttaatgtttgata

SEQ ID NO: 92160 - DNA, 105 bp, Zea Mays
ttcctcctccatggggctgttttgctgattctcaggttgataaggcgtcgccttgctcgccttaggcgtcgcctaggcgtctaggcggtggtccggcgccttatc

SEQ ID NO: 92161 - DNA, 985 bp, Zea Mays
gaaacacatcattactttaagatgggccggctcaggttagtgggcatcaacccatttgcctgcactagtagacagatttctcagaagccgcggccgtcacgcgtcagacccacgcagcgcaccttctcttctccgccgcgtcgccgccgaacatcagcatcggatcgatggagggctgggacaaggggaccaagagcacggtgggcgagatcccgctgctgtcgacgcgcgcgggtccgcgggacggcgaggcgtggcggcagaggctcaaggaggagtaccgcgcgctcatcgcctacacgtcggtgaacaaggccaaggacaacgactggttccgcatcgccgccgccaacccggagggaacccgctgggaggggacctgctggtacgtccacaacctccgccgctatgagttccctctccagttcgacatgcccgtcgcctacccccaggtcgcccccgagatcgagctccccaccctcgacggcaagactcacaagatgtaccgcggtgggaagatctgcctcaccgtgcacttcaagccgctgtgggccaagaactgcccgaggttcggcctggcgcacgcgctgtgcctcggcctcgcgccgtggctcgcggcggaagtcccgattctggtcgactcgggcatggtgaagcacaaggatgacgaggcggctccggctgaggcatctgcctctgctgctcctccttcgtagttgccacttgcaacaactgagtgtccggtgagctaagggcgatatcggaaatcaactcggcggtgaaccgtgaaccgccaaataagagagatacctgcaaatctaaacatcatgtgaaacatgttccatacctgctgattgctgtctgcgtactaatttctatccaacttctaaattgtgttcgcagatttttatggtacacttgactaataccataaggtaacataattgcttaataaaactagtgcagattttctgattggtcggtt

SEQ ID NO: 92162 - DNA, 1660 bp, Zea Mays
ttcaatgtcgccagttaaaccttccctatccagttccaaacttgcaacccctctcccctcccctccctcctcctacaagcaacagcagcagcacaccggcctccaagaggaggagcggagaggaggaaggtgagcggttgcctccgaaagcaagccatcactggcggctaccaaatgcaggcatgcatatagcgaacaggacaagaagcagcagaggaggaggaagaaggacaagtaggggcagagagctcaaggacgtcaagaaacggtcgctcgctgccacccaccatgtcctatgatcaggtgctcttcggtgccgggcgatcggcgtggagagcggctcagcacggcggcggcgacgcggtgacgaggcagatactcaagtgcatgcggtggcagctggaggagaccaccgacttcgtcacctgcccctaccactactactgcgacagctcctacccgggcgactactccgcggccgtcggcgtcctcgtcgctgccttcgccgcgtactgcttcctctccaccctcgcgttcaccgtcctcgacctcgtccgggggagcaacagcgcgccggcgccggcgccgggcgtccgaggcgtcaggaggaagtacctggtcccgtcgggcccgttcctgctcccgctggtgctgcttgcgctcgccagggggcagcgggtgaacgccgtgttcccgctggcgcagctcgggccggcattgctgctgctgctgcaggcgtcggcgctggcgttccggaacgaggccgacggcgacgtccggtacgcggtgctggaggcgtccacggtgtccggcgtgctgcacgccagcctgtacctggacgccgtcgtgctgccctactacacggggctggaggcgctccggtggtcccgcttctccggggagtgcgcgtcgtgcctgtgccggatggagccgctgctcgtgggcggctcggcggtgcggtaccgcggcctctccaagacggcgctggcggtcatcttcgcgctctgctcgcggatggtgtgccgcatctacggcgaggagcgcctcagcgcgtggacgcggtccgcgctggaggccgcgggctgggtgctcgtggccgccgacgccgtgtacctcgtcggctgggtcgccgcggagggcggcggcgtcggcgtcgcggcctacagcctggtcgccgggctcgtgttcctcagcgtcttcggcaaggcgtaccggttcctggcgtgggtggaggccaggcaatcgcagtggaagtccagcctctgccatagcgccgtttgatcgacgacactcgtcgtcacagctaattctcgcagggaaaaaaaatctgtaaaaagaaagaaaggaatcgtcgcttattagttcatcttcttcttggttcttgctgtacaatctacacgatggggggcaaaaaaggtgcgattttttttgttcatgttacttagcttaatttggctgaagccattcaggtttttgttgatgaaacttcagagcttgttcttttggcgttttaaatatggttttgatggctcgttcccaatcccgctgaccagagtgcacatatgatccattgtgattctgatctggttaggctttgaatcagacaactgtactgtagttaccgtgagtttcttaattatcatgattatatgaagctata

SEQ ID NO: 92163 - DNA, 1529 bp, Zea Mays
aaagccgcccgcccgccccgtcgccgcgaccgcgagggcaccagaaagccgagaatccacccaaacaattctctgtttctcctgttcgctgcctcctcattcctgaacccctcccccaagtatacgagtcacatccgcatggcctcccgggtcacgaggctgctcctgcaccgccgcctcaccaccgcagcggaagcctccgcgcgccgcgcgccgcaggctccctgtgccggcgccgctgtctccaaggatgttgttaaggctgaagcttcatctttgaaaaattcaaggtggcacattactaggtcaaacacttcaggtcctttgactactcgttatgagtgccgcaaagtatttccttgttctgtaaggccatctgcatcttactctacacaagcttcagaccagaagggaaaacaggaagggaaagacttgtcaaatgtagaacacccctttgatgatattacctacaatatacctgagaagccagtgacatttactgaaggtgcttcttatagtcttgtaatactcgccgggctcggaattgcaggactggctggatatgctgtgttcaaagagcttatatttgagccaaaagagtacaagatatttgggaaagctctagcaagaattcagagtgatagtcaggtcacgtcaaggattggccaccctattactggatatggccaggaaactagaaaccgtgcagctcggcaaagaattccaaataagatttggacagatgaggatggtgttgaacatgtggaggtgaactttctcatccgtgggccacatggagctggaaaagtgtattcagagatgttcaaagacactgatcggacgtggaagttcacataccttgttgttgatatcgtgtcaccaccacatgcaaaaacacaactgatgttagaatcttacttaccagcataaggatgcaggaaacagaggcagttagcagtgccatgacatctccgagattttggcacaaatgggaagctctgatagaagtggctaaactggggatttgtgaacaagtctaggcaagttgggaatttaggaacaagattgtcataatgtactaccatcaaaccagttttgtggagtaataaacggttcttacattactagaagcatatctgaaaatgtttcgatgtttcttttagttacggggaaaacccctgcatgcctggatgagggtattttttgttagttctcatgagtaccttgtatcgtccaaatacgtgggctaatccagcaagtcatcttttgtaaaatcatagcaactcttattgtatctggatttggtttccaattaactcattttgaaatgctcgacttaagggctaaggcatgggtataatcttggctgttaggaacatctctctctctctctctctctctctctctctctctctcttaaattaaagccttaaaatgtatggtatgaaaatatattttacgttatgtctaactatactaattttatgtcacaaatatgagtctttctatagaatatgtgaaacttaaaa

SEQ ID NO: 92164 - DNA, 1149 bp, Zea Mays
aaagccgcccgcccgccccgtcgccgcgaccgcgagggcaccagaaagccgagaatccacccaaacaattctctgtttctcctgttcgctgcctcctcattcctgaacccctcccccaagtatacgagtcacatccgcatggcctcccgggtcacgaggctgctcctgcaccgccgcctcaccaccgcagcggaagcctccgcgcgccgcgcgccgcaggctccctgtgccggcgccgctgtctccaaggatgttgttaaggctgaagcttcatctttgaaaaattcaaggtggcacattactaggtcaaacacttcaggtcctttgactactcgttatgagtgccgcaaagtatttccttgttctgtaaggccatctgcatcttactctacacaagcttcagaccagaagggaaaacaggaagggaaagacttgtcaaatgtagaacacccctttgatgatattacctacaatatacctgagaagccagtgacatttactgaaggtgcttcttatagtcttgtaatactcgccgggctcggaattgcaggactggctggatatgctgtgttcaaagagcttatatttgagccaaaagagtacaagatatttgggaaagctctagcaagaattcagagtgatagtcaggtcacgtcaaggattggccaccctattactggatatggccaggaaactagaaaccgtgcagctcggcaaagaattccaaataagatttggacagatgaggatggtgttgaacatgtggaggtgaactttctcatccgtgggccacatggagctggaaaagtgtattcagagatgttcaaagacactgatcggacgtggaagttcacataccttgttgttgatatcgtgtcaccaccacatgcaaaaacacaactgatgttagaatcttacttaccagcataaggatgcaggaaacagaggcagttagcagtgccatgacatctccgaggttcatctcctacatatatattatatctattttacttcatatttgtaccattcttgatgtttacattattttgtgtgttgtattttcatttgctcataaaagttttgaattttgatctttcctgaaataatatcaaacagtaggatgactgcttgtttaccattatttatatg

SEQ ID NO: 92165 - DNA, 144 bp, Zea Mays
gtacttttgagtactatttatcaagcagtattaacacttatctgtataccacttgtccctgttgtgtgtggtgttaccgactccttcctgcagtggcggacccagctgctatgtttagggtgtgccaagaaaaaacaaacaaaa

SEQ ID NO: 92166 - DNA, 3238 bp, Zea Mays
ccccaagcgatcttgggttggctacttggctgcagctgcaggttggccggcggagatcgatggagctacagctgtcggccgtgctcggctcgctcgccctcggcggcgcggtgctggtgctgttcttcgttaagtggtggcagccgctggccggcaccgaccggcgcgtcaaggagcttgcagacgcggtggaggccctgctgcggcagcggtacgaggtgctgggccacgacccggcgccgtcgtcggataccgtgcgcgcgtggctgcggcgcgtgcaggaggcgcaggacgagatggcgtccatcaaggcgcggcacgacggcgggcagctatacgtggtccgcctggtgcagtacctcttcctccccacgggcccggtcgcggggctggccgagcagcagctcaaggcagtgcgcgcgctccgagagcagggcgccgcgatcctcgatgccgcactggccacgccgcaggcgccgccgcctcttctctgcgaccccgaagagctggagggtctcccagcggaggcggggcccgcgagggcctacctcaacgaggcgcttcgcttcctcggcgactgcgacgccgcgcttggcgtctggggtgccggcggcgtgggcaagaccacggtgctgaagctggtgcgcgaggtgtgcggccgcgtcgcgcgattcgaccacgtcctactcgtcgcggcctccagggactgcacggtggccaagctccagagggaggtcgtgtccgtgctcgggctgcgcgacgcgcccacggagcaggcgcaggccgccgggatcctgagcttcctgagggacaagagcttcctgctgctgctggacagcgtgtgggaacgtctggacctggagagggtcggcatcccgcagcccctcggcatggctaacggcaaggtgaggaagatcatagtggcgtcgaggagcgaggccttgtgcgccgacatgggctgccgcaacaagatcaagatggagtgcttgaacgaggaggatgcgtggagcctgtttcaagctaatgttggcggcgacatcatccatggccacgctcaaattcctgcacttgctaaacaggtcgctgccgaatgcaagtgcttgcctttggccctcgtcaccgtcggccgcgcaatgtcaaataagcgcacaccagaggagtggtccaacgcactcgacaccctcaaggcatcgctccgctccggcacgcccggcttggacaagagcacgcaggcgctagtgaagttctgctacgacaacctggagagcgacatggtgagggaatgcttcctgacctgtgcgctatggccggaggaccacaacatctccaaggaggagctcgtgcagagctggataggactcggcctgctccccgatctcagcgacatcgaagaggcccacaggttcgggctctcggtgattgccatcatgaaggccgcgtgcctgctggagcccggggacaaccaccgctacaacatgttcccgtcagacactcacgtcaggatgcacgacgtcgtgcgcgacgcggcgctccggttcgcgcccgccaagtggctggtccgcgcaggcgctgggctcagggagcccccgcgcgaggaggcgctgtggcggggcgcgcagcgcgtgtccctgatgcacaacaccatcgaggacgtgccggcgaaggtgggtggcgccctcgcggacgcgcagccggcgtcgctgatgctccagtgcaacaaggccctgccgaagaggatgctccaggcgatccagcatttcaccaagctcacgtacctggacctcgaggacaccggcattcaggacgccttccccatggagatctgctgtttggtcagcttgaagcacctcaacctatccaagaacaagatcctgtcgctgccgatggagctgggcaacctgagccagctcgagtacttctacctgcgcgacaactactacatccagatcaccataccaccggggctgatctcgcggcttgggaagctgcaggtgctggaggttttcaccgcgagcatcgtctccgtcgcggacaactacgtcgcgccagtcattgacgacctcgagagcagcggcgcgcgcatggcgtcgctcggcatctggctcgacaccacccgcgacgtggagcgcctcgcgcggctagcgccgggcgtgcgcgcccggtcgctgcacctgcgcaagttagaagggacgcgcgccctgccgctgctgtccgcggagcacgcgccggagcttgccggcgtgcaggagagcctgcgggagctggtggtctactcctccgatgtcgacgagatcacggccgacgcgcacgtgcccatgctggaggtcatcaagtttgggttccttacgaagctgcgcgtcatggcgtggtcccacgccgccgggtccaacctccgcgaggtcgccatgggcgcgtgccacagtctaactcacttgacgtgggtgcagaacctcccctgcctagaatcgctgaacctcagcgggtgcaacgggctgacgagactgctgggtggcgcggaggacagcggcagcgccacggaggaggtgatcgtgttcccgcgtctgaagctgctggccctgctggggctgccgaagctggaggccgtgcgagtcgagggagagtgcgcgttcccggagctgcggcgcctgcagacgagggggtgcccgcggctgaagaggattcctatgcgcccggcgcgcgggcagcagggtaccgtgcggatcgagtgcgacaagcactggtggaacgctctacagtgggcgggcgaggacgtcaaggcctgctttgtccctgtgctgtgagtgagtcatttcactaggcggacggagctgcaattttggcgccagttgatatgttcgacgaccacggtccacgggttgtaccacggttcaaggcaagatgagcgatgaaatcggaaatatctctcgaacagcgaaaaggcggtttgttttggatttcttctaagaacaattcaaattttggcttaattcccgttatgttgagagctggtgacctggttaaaggcgcttttgtcaggactctggcttcttaaaaacacttccggatctaattcctctagctttttgtctttcctaaagaagttgtagccattttataatttgtttggcaaaacaacttattctatatttatttcgaatgatgtacgatacaactcatgttttttattgctctggctcccgataataaaaaactgcgccaacttagggctcttgaccag

SEQ ID NO: 92167 - DNA, 4236 bp, Zea Mays
tttacagatctgaagctgagtaaaaattatggcaaaatctttacgcggttccgtggagttccgtgccctttcccagttttgaaatttctgctcacaaggctgccatggctttggattttctctctctcttctccgatggaagacatttcttgggaaagcagcgctattagtactaaaccgttctgggcttccgggctcaccatgtcaggcctggacctgcgctagacctcgaagcctcgatcgcaccgcatcttctctctctgctgctggtccgctccgtcgccgccgaccccgccgccagcttccccttccacctaaaaggacgacctctggccgcccttgtcccgccccgacgcctcggtttccactgcataggcgtggtgcggcgatccgtccgggcctagggttgcgagagacactatagggtacgaccctaggagcatccgcctccacgtgggtgaggcggaagagggaggatgacatcgctcagccgtgagctggtcttcctcatcctgcagttcctcgatgaggaaaaattcaaagagacagtccacaagctcgagcaggagtccggattctatttcaacataaagtactttgaggacgaagtcctcaatgggaattgggatgaggtggagcgctaccttggtggattcaccaaggttgacgataaccgctactccatgaagatattctttgagatccggaagcagaagtatctggaggctcttgataagcatgatcggtcaaaggctgttgaaatcttggtcaaggaccttaaggtctttgcatccttcaatgaggagttgttcaaggagatcacacagcttctaaccttggagaattttagggaaaatgagcagctctcgaagtatggtgatacaaaatctgcaagacaaataatgcttgctgagctgaagaagctgattgaagctaatcccttgttccgtgacaaactacaatttcccagcctgaagacttctaggttgcggacacttattaaccagagcttaaactggcagcaccagctttgcaagaaccctagacctaatcctgacatcaagaccctttttgttgatcattcatgtggacaaccgaatggtgcacgtgctccatcaccagcaaacagtccgttacttggatctatgcccaaacctggaggtttccctccattgggtgctcatggaccttttcaacctgcaccaacacctgtcccacctctggctgggtggatgtcaaaccctccagcaataacacatcctgctgtgtctggtggtgccattggatttggcactccaacaaatcctgccgttttgttgaagcatcctagaacacccacaactggtaatcctggtatggattatccatcaggagattctgaccacatttccaagagaactagaccggttggcatgtctgaggagatgaatcttccggtgaacatgctgcctgtgacttatccacagagccataattaccaacaagatgatttccacaaagctgttgcacggaccttgagccaaggatcagcacctatgagcatggatttccatccacttcaacaaactcttcttcttgttggtaccaatgttggcgacattggattgtgggatgttggtaccaaagagagactcgttgtaagaaacttcaaagtctgggaccttggtaaatgtacaatgaccctacaggcagcactggttaaggacccagctgtgtcagttaatcgcataatatggagtcctgatggaaccttgtttggtgttgcttattcaaggcatattgtacagatttattcctataacggtggcgatgatattagacaacacttggagattgatgcacatgttggtggtgtaaatgacatagcatttgctcatccaaataagcagctatgtataattacatgtggagatgataagacaattaaggtatgggaggccactagtggagctaagcaatttacctttgaaggacatgaagctcctgtttattctgtgtgtccacattacaaggaaaatattcagttcatcttctcaactgctttagatgggaagatcaaggcatggctatatgataatttgggatctagagttgactatgatgcaccaggtcattggtgcactacaatggcatatagtgcagatggttcaaggttattttcatgtgggactagcaaggatggtgaatcacatctagtagaatggaatgaaagtgaaggagcagtgaagagaacatatcagggattccgtaagcgatctatgggtgttgtgcaattcgataccacccggaacaggtttttggccgcgggggacgaattcatgattaagatatgggacatggacagcacgggtcttctgactaccattgatgctgatggtggcttaactgcaagtccacggatacgcttcaacaaggagggaactctattggctgtctccactgctgacaatggtatcaagatcttagcaaatgctgatggacttcggttgctgcgcacactggaaaatcgttcttttgatgcttctcgtaatgcatctgaggctgtaacaaagcctctaataaatcccttgactgctgcggcaaatgcagctgcagcaagcagttcaggagctggtgctccgtcagctataactgcaatgaatggtgatagcagaagtttggttgatgtaaaacctagaatagctgatgagtcacttgacaagtcaaaggtatggaagcttatggagataactgagtcaagtcagtgcagatcaatcaaactggcggataacatgagaacaagcaagatttcgagattgatttacacaaactctggtcttgctatcttggctttaacttcaagcgctgttcatctactctggaaatggccacgcagtgatcggaattctggaaaggcaaccgcaagtgtatctcccactctatggcaaccaccaagtggcatcttgatgactaatgacacgactgacaataatcctgaagaagctgttcactgctttgctttgtcgaagaatgattcatatgtcatgtctgcttctggaggaaaaatctctctgttcaacatgatgactttcaagacaatgacaacgtttatgcctgcaccgccggcagcaacttttcttgcatttcatccccaagataacaacataattgcaattggaatggatgactcaaccatccaaatctataatgtccgaattgatgaggtcaaaagcaagctcagaggtcactctaagagaatcacaggtcttgccttttcaaatgtgctaaatgttttagtctcgtcaggagctgatgcccagttatgtgtttggaacacggatggatgggagaagcaaaagaacagatttttgcagataccatcaggtcgccaatccaatatcttggacactcgtgttcagttccaccaagatcaaatgcactttcttgttgtgcatgaaacccagattgccatctatgaaactacaaaactagaaccagtgaagcagtggcctgttcgagagaattcacctccaatcacacatgccacattctcgtgtgatagtcaactgatctatgcaagctttatggatgccactgttggcatatttaatgggtcgagtttgagacttcaatgtcggattcttccagcttcgtatcttcctccaaatatcagtccgagcgttcatcctgttgtggttgcggcacacccttcggaagcaagccagtttgctctagggctgactgatggtggtgtttttgtgttggaacctttggaatcggagagaaaatggggaaatcctccaccagtagagaatgggtctgctagcaacttgtccacaccgcctcctaatggagcttcaagttctgaccaaccagaaagatgattaagaagttggaactggtagatttttcgtggcacgagtctaaccaagaagacagggcttcaaagggtggtgcgactaaccttggcagataggttccaagggagccggacaatgcgctcaataaaaataagttcaacagaagtttgtccgttgcttgtataaatatttgtattgactatcgagtgaggagtcctagtatttcatttttgctttgtttgcggtgctgtgaaaaggatcagtagataagctgtagtacaacaactatcagactggctgtacttacctatatttatgactattagttaatgtatgttgtttcatttgcctttttggctccgttcagccgtttttgctatcataaagtgctgtttct

SEQ ID NO: 92168 - DNA, 4217 bp, Zea Mays
tttacagatctgaagctgagtaaaaattatggcaaaatctttacgcggttccgtggagttccgtgccctttcccagttttgaaatttctgctcacaaggctgccatggctttggattttctctctctcttctccgatggaagacatttcttgggaaagcagcgctattagtactaaaccgttctgggcttccgggctcaccatgtcaggcctggacctgcgctagacctcgaagcctcgatcgcaccgcatcttctctctctgctgctggtccgctccgtcgccgccgaccccgccgccagcttccccttccacctaaaaggacgacctctggccgcccttgtcccgccccgacgcctcggtttccactgcataggcgtggtgcggcgatccgtccgggcctagggttgcgagagacactatagggtacgaccctaggagcatccgcctccacgtgggtgaggcggaagagggaggatgacatcgctcagccgtgagctggtcttcctcatcctgcagttcctcgatgaggaaaaattcaaagagacagtccacaagctcgagcaggagtccggattctatttcaacataaagtactttgaggacgaagtcctcaatgggaattgggatgaggtggagcgctaccttggtggattcaccaaggttgacgataaccgctactccatgaagatattctttgagatccggaagcagaagtatctggaggctcttgataagcatgatcggtcaaaggctgttgaaatcttggtcaaggaccttaaggtctttgcatccttcaatgaggagttgttcaaggagatcacacagcttctaaccttggagaattttagggaaaatgagcagctctcgaagtatggtgatacaaaatctgcaagacaaataatgcttgctgagctgaagaagctgattgaagctaatcccttgttccgtgacaaactacaatttcccagcctgaagacttctaggttgcggacacttattaaccagagcttaaactggcagcaccagctttgcaagaaccctagacctaatcctgacatcaagaccctttttgttgatcattcatgtggacaaccgaatggtgcacgtgctccatcaccagcaaacagtccgttacttggatctatgcccaaacctggaggtttccctccattgggtgctcatggaccttttcaacctgcaccaacacctgtcccacctctggctgggtggatgtcaaaccctccagcaataacacatcctgctgtgtctggtggtgccattggatttggcactccaacaaatcctgccgttttgttgaagcatcctagaacacccacaactggtaatcctggtatggattatccatcaggagattctgaccacatttccaagagaactagaccggttggcatgtctgaggagatgaatcttccggtgaacatgctgcctgtgacttatccacagagccataattaccaacaagatgatttccacaaagctgttgcacggaccttgagccaaggatcagcacctatgagcatggatttccatccacttcaacaaactcttcttcttgttggtaccaatgttggcgacattggattgtgggatgttggtaccaaagagagactcgttgtaagaaacttcaaagtctgggaccttggtaaatgtacaatgaccctacaggcagcactggttaaggacccagctgtgtcagttaatcgcataatatggagtcctgatggaaccttgtttggtgttgcttattcaaggcatattgtacagatttattcctataacggtggcgatgatattagacaacacttggagattgatgcacatgttggtggtgtaaatgacatagcatttgctcatccaaataagcagctatgtataattacatgtggagatgataagacaattaaggtatgggaggccactagtggagctaagcaatttacctttgaaggacatgaagctcctgtttattctgtgtgtccacattacaaggaaaatattcagttcatcttctcaactgctttagatgggaagatcaaggcatggctatatgataatttgggatctagagttgactatgatgcaccaggtcattggtgcactacaatggcatatagtgcagatggttcaaggttattttcatgtgggactagcaaggatggtgaatcacatctagtagaatggaatgaaagtgaaggagcagtgaagagaacatatcagggattccgtaagcgatctatgggtgttgtgcaattcgataccacccggaacaggtttttggccgcgggggacgaattcatgattaagatatgggacatggacagcacgggtcttctgactaccattgatgctgatggtggcttaactgcaagtccacggatacgcttcaacaaggagggaactctattggctgtctccactgctgacaatggtatcaagatcttagcaaatgctgatggacttcggttgctgcgcacactggaaaatcgttcttttgatgcttctcgtaatgcatctgaggctgtaacaaagcctctaataaatcccttgactgctgcggcaaatgcagctgcagcaagcagttcaggagctggtgctccgtcagctataactgcaatgaatggtgatagcagaagtttggttgatgtaaaacctagaatagctgatgagtcacttgacaagtcaaaggtatggaagcttatggagataactgagtcaagtcagtgcagatcaatcaaactggcggataacatgagaacaagcaagatttcgagattgatttacacaaactctggtcttgctatcttggctttaacttcaagcgctgttcatctactctggaaatggccacgcagtgatcggaattctggaaaggcaaccgcaagtgtatctcccactctatggcaaccaccaagtggcatcttgatgactaatgacacgactgacaataatcctgaagaagctgttcactgctttgctttgtcgaagaatgattcatatgtcatgtctgcttctggaggaaaaatctctctgttcaacatgatgactttcaagacaatgacaacgtttatgcctgcaccgccggcagcaacttttcttgcatttcatccccaagataacaacataattgcaattggaatggatgactcaaccatccaaatctataatgtccgaattgatgaggtcaaaagcaagctcagaggtcactctaagagaatcacaggtcttgccttttcaaatgtgctaaatgttttagtctcgtcaggagctgatgcccagttatgtgtttggaacacggatggatgggagaagcaaaagaacagatttttgcagataccatcaggtcgccaatccaatatcttggacactcgtgttcagttccaccaagatcaaatgcactttcttgttgtgcatgaaacccagattgccatctatgaaactacaaaactagaaccagtgaagcagtggcctgttcgagagaattcacctccaatcacacatgccacattctcgtgtgatagtcaactgatctatgcaagctttatggatgccactgttggcatatttaatgggtcgagtttgagacttcaatgtcggattcttccagcttcgtatcttcctccaaatatcagtccgagcgttcatcctgttgtggttgcggcacacccttcggaagcaagccagtttgctctagggctgactgatggtggtgtttttgtgttggaacctttggaatcggagagaaaatggggaaatcctccaccagtagagaatgggtctgctagcaacttgtccacaccgcctcctaatggagcttcaagttctgaccaaccagaaagatgattaagaagttggaactggtagatttttcgtggcacgagtctaaccaagaagggcttcaaagggtggtgcgactaaccttggcagataggttccaagggagccggacaatgcgctcaataaaaataagttcaacagaagtttgtccgttgcttgtataaatatttgtattgactatcgagtgaggagtcctagtatttcatttttgctttgtttgcggtgctgtgaaaaggatcagtagataagctgtagtacaacaactatcagactggctgtacttacctatatttatgactattagttaatgtatgttgtttcatttgcctttttggctccgttcagccgtttttgctatca

SEQ ID NO: 92169 - DNA, 3743 bp, Zea Mays
cgatagtgatttcatcttcctctaccaggcggctccgtggtccgtgctgatcaactgcatcaaggatcgtcgccggcggcgcgctggcagcagttcgcacggcgagatcggattgatcgagatcttctaggcctggacctgcgctagacctcgaagcctcgatcgcaccgcatcttctctctctgctgctggtccgctccgtcgccgccgaccccgccgccagcttccccttccacctaaaaggacgacctctggccgcccttgtcccgccccgacgcctcggtttccactgcataggcgtggtgcggcgatccgtccgggcctagggttgcgagagacactatagggtacgaccctaggagcatccgcctccacgtgggtgaggcggaagagggaggatgacatcgctcagccgtgagctggtcttcctcatcctgcagttcctcgatgaggaaaaattcaaagagacagtccacaagctcgagcaggagtccggattctatttcaacataaagtactttgaggacgaagtcctcaatgggaattgggatgaggtggagcgctaccttggtggattcaccaaggttgacgataaccgctactccatgaagatattctttgagatccggaagcagaagtatctggaggctcttgataagcatgatcggtcaaaggctgttgaaatcttggtcaaggaccttaaggtctttgcatccttcaatgaggagttgttcaaggagatcacacagcttctaaccttggagaattttagggaaaatgagcagctctcgaagtatggtgatacaaaatctgcaagacaaataatgcttgctgagctgaagaagctgattgaagctaatcccttgttccgtgacaaactacaatttcccagcctgaagacttctaggttgcggacacttattaaccagagcttaaactggcagcaccagctttgcaagaaccctagacctaatcctgacatcaagaccctttttgttgatcattcatgtggacaaccgaatggtgcacgtgctccatcaccagcaaacagtccgttacttggatctatgcccaaacctggaggtttccctccattgggtgctcatggaccttttcaacctgcaccaacacctgtcccacctctggctgggtggatgtcaaaccctccagcaataacacatcctgctgtgtctggtggtgccattggatttggcactccaacaaatcctgccgttttgttgaagcatcctagaacacccacaactggtaatcctggtatggattatccatcaggagattctgaccacatttccaagagaactagaccggttggcatgtctgaggagagccataattaccaacaagatgatttccacaaagctgttgcacggaccttgagccaaggatcagcacctatgagcatggatttccatccacttcaacaaactcttcttcttgttggtaccaatgttggcgacattggattgtgggatgttggtaccaaagagagactcgttgtaagaaacttcaaagtctgggaccttggtaaatgtacaatgaccctacaggcagcactggttaaggacccagctgtgtcagttaatcgcataatatggagtcctgatggaaccttgtttggtgttgcttattcaaggcatattgtacagatttattcctataacggtggcgatgatattagacaacacttggagattgatgcacatgttggtggtgtaaatgacatagcatttgctcatccaaataagcagctatgtataattacatgtggagatgataagacaattaaggtatgggaggccactagtggagctaagcaatttacctttgaaggacatgaagctcctgtttattctgtgtgtccacattacaaggaaaatattcagttcatcttctcaactgctttagatgggaagatcaaggcatggctatatgataatttgggatctagagttgactatgatgcaccaggtcattggtgcactacaatggcatatagtgcagatggttcaaggttattttcatgtgggactagcaaggatggtgaatcacatctagtagaatggaatgaaagtgaaggagcagtgaagagaacatatcagggattccgtaagcgatctatgggtgttgtgcaattcgataccacccggaacaggtttttggccgcgggggacgaattcatgattaagatatgggacatggacagcacgggtcttctgactaccattgatgctgatggtggcttaactgcaagtccacggatacgcttcaacaaggagggaactctattggctgtctccactgctgacaatggtatcaagatcttagcaaatgctgatggacttcggttgctgcgcacactggaaaatcgttcttttgatgcttctcgtaatgcatctgaggctgtaacaaagcctctaataaatcccttgactgctgcggcaaatgcagctgcagcaagcagttcaggagctggtgctccgtcagctataactgcaatgaatggtgatagcagaagtttggttgatgtaaaacctagaatagctgatgagtcacttgacaagtcaaaggtatggaagcttatggagataactgagtcaagtcagtgcagatcaatcaaactggcggataacatgagaacaagcaagatttcgagattgatttacacaaactctggtcttgctatcttggctttaacttcaagcgctgttcatctactctggaaatggccacgcagtgatcggaattctggaaaggcaaccgcaagtgtatctcccactctatggcaaccaccaagtggcatcttgatgactaatgacacgactgacaataatcctgaagaagctgttcactgctttgctttgtcgaagaatgattcatatgtcatgtctgcttctggaggaaaaatctctctgttcaacatgatgactttcaagacaatgacaacgtttatgcctgcaccgccggcagcaacttttcttgcatttcatccccaagataacaacataattgcaattggaatggatgactcaaccatccaaatctataatgtccgaattgatgaggtcaaaagcaagctcagaggtcactctaagagaatcacaggtcttgccttttcaaatgtgctaaatgttttagtctcgtcaggagctgatgcccagttatgtgtttggaacacggatggatgggagaagcaaaagaacagatttttgcagataccatcaggtcgccaatccaatatcttggacactcgtgttcagttccaccaagatcaaatgcactttcttgttgtgcatgaaacccagattgccatctatgaaactacaaaactagaaccagtgaagcagtggcctgttcgagagaattcacctccaatcacacatgccacattctcgtgtgatagtcaactgatctatgcaagctttatggatgccactgttggcatatttaatgggtcgagtttgagacttcaatgtcggattcttccagcttcgtatcttcctccaaatatcagtccgagcgttcatcctgttgtggttgcggcacacccttcggaagcaagccagtttgctctagggctgactgatggtggtgtttttgtgttggaacctttggaatcggagagaaaatggggaaatcctccaccagtagagaatgggtctgctagcaacttgtccacaccgcctcctaatggagcttcaagttctgaccaaccagaaagatga

SEQ ID NO: 92170 - DNA, 1410 bp, Zea Mays
atcaaagcacagtagacggtttagtcatgatgcatcgctaccgacaaaagagacagggcggagagaaacaatggaggaaaccgtgggagatggagaaagttgctggggtgtgacgtggtgttccgggagagtgaccatgatgcctcgtcggattgcatcacatgtcttctgcgcctagtcgagcaaaaaggggatggctggtgagcgtgcagttcttcgccgaagcagaagcatcaccactggaccgctgctcgtcgcgagcagcgctgttggcgcccgtggttttggtaagacacccatctcgagtacatgttggctcctgcactattttacactcgcctacaataggagatatggacccaacggccgagcatgtgcttcggcaatggcgggcaccgcgacggtctctcatgccaccgtattcgatgtccagaggagggagatggccgcgggccgttgatcggccagttgatggcccagattggatcgggaggtaccgtttagatcggagtctgtggacctttgatcagagatcgtgcgggtggtacgagttccgcccacataaaatcaacaccgtaaattccggatcctagggctaaaagtgcataccgtttcacgaactgatccgagccctttgatcttagatcacgcggctctggatgcgtcacgtataaacgttggatacacttttaaaacaaagagaccctattggttatgagaaattcagttttaatataaaaagaattccataagcttatttaattcataatttatgcattttagctccgatttgatccactcaaattgcgctagcttcataattaaattgcctacacattaacaacattattttatcatacaacatttttaagaaataactaactaacttgtctaatctatgtttatttaagtaactcccttaatctaagttaatttaatttggtccatttataacttgactaaaatataatctataatcatgttatagcttggattaaagtgaaattagctatgtttctgtaaacttttctcacattgtttatattaatcaacataagaaataattttattagttaatcacctaaaacttcagaaaatcatatctttttaaccgaaactccgaatttagtcgctctccaacctacgctctcgtagcatcgcgtaaaatattcttacgatgtttgttctcatgtttggtgtattgttatttttatgtacttcttatctatttgtatgtattgctacgaatagcggtgaggtcacgagaatccgaagaacaagttggtacctaggaatcttgagtctcaggcaagttgtgcccttgatgacttttctttacgcaataatgttcctgttaatcactgtgacatcctcaggttaatctaatgggacctaataggttttcctaga

SEQ ID NO: 92171 - DNA, 1671 bp, Zea Mays
gccgttctttctccctcagaccctcaccaaccaggcaaccaaaccttctccgatggccgcgcccgtgtcgcagccgccggtgtccgccagggcgtccacacggtttctcccccgcgggataggcgcgctcccggagtccgctcccacgtccctccggttatccgtcggccgccgtcgccgggccgccagcctagaggtgaaggcatcgggaaatgtgttcgggaactacttccaggttgcaacctatggcgaatcccatggagggggtgttggttgcgttatcagtggctgcccacccagaattcctctcactgaggcagacatgcaagtagaactcgatagaagacgtccgggtcaaagtagaattacaaccccaagaaaggagactgatacatgcaaaattctatcagggacacatgatgggatgactactggtacaccaattcacgtctttgtcccaaacacagatcaaaggggtggtgattacagtgaaatgtctaaggcgtacagaccatcccatgcagatgcaacctatgacttcaagtatggagttagagctgtgcagggaggtggaaggtcatcagccagagaaaccattggcagggtggctgcaggagctcttgcaaagaaaattctaaagctcaaatcaggagtggagatcttggcatttgtttctaaagtgcaccaagtcgtacttccagaagatgcagttgattatgagactgtaaccttggaacatatagagagcaacatcgttagatgtcctgatccagaatatgcagagaagatgattgctgccattgatacggtacgagttagaggagattcaattggtggggtcgtcacatgcattgcaagaaatgttcctcgtggtcttggctctcctgtttttgacaaacttgaagctgaactggcaaaagccatgctttctcttcctgcaagcaaggggtttgagattggcagtgggttcgctggtacggactttactggaagtgagcataatgatgagttctatatggatgaggctggaaatgtgaggacacgaactaatcgctcaggcggtgttcagggagggatatcaaatggtgaaattatttacttcaaagtggcttttaagccaacagcaactatcggaaagaagcaaaatactgtgtcaagggagcatgaggatgttgaacttttggcaagggggcgccatgacccctgtgttgtccctcgagctgttcctatggtggaatccatggctgcgctggtcctgatggaccagctcatggcgcatattgcccagtgtgagatgtttccgctgaaccttgccctacaagagcccattggctctgctagcagtgcatctgaactgtcaccaaacctatcataatgtttgtcgtggaacatgtcccagctttccttctatcgaaattctggtctttgctaagcagtttgcaattcggaacccccataaaccctcgactattgtacctagagataaagtgaacggatatcaagatagaaatgcattaatgtttttgtgatgtgtagtataactgatatttaccccttttctttttttgagagaggacgcatgatgtcgtttgagcaataaagtttaatttgggagagataacagtgtcttcatatgatcagcacttgaacggtctatataaaggaattctg

SEQ ID NO: 92172 - DNA, 418 bp, Zea Mays
acttcagttgatggaggaagaaggatttgagccaagccttgttatgctgaattcgttaatcaatgcttttggcactgctggaaggcatttggaggcactagctgtatttcagcatatcaaggatagtggtatgagcccagatgttgtgacatacactacacttatgaagacattcatgagagcaaagaaatttgaaaaggtatctgaagtatacagagaaatggaacgtgctggatgcgctccagatagaaaggctagagaaatgttacatgatgcaactgtagttctagaacaaagaggatgtaagtatttcatttcatatgagttgtgctttaagggcgagtagaatggatgactgatgatgtatgctgaaagggaattaggcttacacctagttcctaaataattttggtggttg

SEQ ID NO: 92173 - DNA, 390 bp, Zea Mays
atggcgtccgatctgcccgcatcccccaaaaccctacccggctcctctcctttccccacaatgtgcgtcgacatctggccattcatggccttctgctgtgtttcttatgaggcatgcaaaggtctcctgaaccaaatccccatcattatcttggtgtttatttccacaatagttggctgggaagtgaaacaagtcaccaatgtcatccaggcggtatctaaatggtgcacactcgacatggccattgctatggcactgagggagagcaagcccgtgtacctcagcattagttgcaacctccctggccaacctcattctacctttagttttatgttcaagtacatgattatcgggagaaaccaagatatgttgcttacactatttctgtaa

SEQ ID NO: 92174 - DNA, 107 bp, Zea Mays
cgaagatgctatttggtccgaagaggtcgattccttttttggagttgatctcaacgaggtcaatagagtgtagtagccacacatgcgcttataaatttatgaactaa

SEQ ID NO: 92175 - DNA, 1333 bp, Zea Mays
atgggcaacgcgggtagcaacggtggaggcgctgccgctggtcaccgccgtcggagctccggccacggccaccaccaccaggcgccgccgcctcaccagccgcaggagactgcggccaaccgctacgtgttcgcggccgccacgccgtacccgccccagtaccctaaccccaacccgccgcagtactacccgcagtacgggaactactacccaccaccaccaccatccgtgccggtgccccttccggcgccgtacgaccaccaccacaggccacccaccgccgcccccggcgagttcccgcccccgcccctcacccacccccaccactaccctggctgggctgggcggtatccctcctacggacaacatctgcctatgcccactccctacgttgagcaccagaaggccgtcactatccgcaacgacgtcaaccttaagaaggagacgcttaggatcgagcctgatgaagagtgccctggccacttcctcgttgccttcacctttgacgccacggtcgctggcagcatgactgtttacttgtttgcaaaggaagagctcaactgcaatctaacagcagtgaaagaagacctaatgaagcccgttactgttagcttcaaagagggtcttggtcaaaaattcaggcaaccttcaggaacaggaattgacttttcagtgtttgaagaatcagatttattaaagcagggggacatggatgtatatccacttgcagttaaagctgaaacaacattgcttgttgatcacccaccagaaggggatgaccaaaagatgaaaactcctaactcacagatcacccaggccgtgtttgaaaagaaagaaaatggggattatcatgtaagagttgtttgccagatcctttgggtcaatggaactaggtatgaactgcaagaaatatatggcatagggaactccgtggaaggtgatgctgatgcaaatgatccagggaaagaatgtgttatttgcctctcagaaccaagggatactactgtcctcccatgtaggcatatgtgcatgtgcagtgagtgcgccaaggtcctgaggtaccaaaccactcggtgccccatctgcaggcagcctgttgagcgtctcctcgagatcaaagtgaacaacaaatctgaagatcagcaacagatgccccaatcgccaccgctcccagcactggatccgcagcaggaagaggtgtagccatgatcaaagttctggcatggctttgccgacctctgctgtatctgcctatctggaggtgggagaccaagatgccaagaagagtgtgtaccatatatacaccatgcatgcgtgtgccatggctacctta

SEQ ID NO: 92176 - DNA, 414 bp, Zea Mays
atgataagacaggttattcgtcatgcacaagataatgggcatccagcttgctacagctgctaaaaaagtaacatgttagaatagagctaccaacagtcaagtttgatctggaatactaaagcctagctgtttagtttgatctgtaaatgaaggatgacctctcctgctctccaaattctgaacataaaggattacagaagtagacaatcaaactaccccacatgcataccacctcccataaaataagcattagtttccatatttggtctcttatttgcatccatcacctgatctcttatatcaagaaattgcttgggatggtaaactgctgggtgtgcatgcatttgcataaaatctgttgcggccatcggcaaagagccgctctctaggttgatacactaccggaatcagctc

SEQ ID NO: 92177 - DNA, 3384 bp, Zea Mays
gcatccacgacccccatctcccacgcccaccgccacaacacgccgcgcggcaaagaaacaacgccagaaagcgatcggatcggatccggatcggcagcagtcagtgcagtgcatccagagcggcagagccccgtcgtcccgtggccgccaggtcgatcccccagcggccggccggccggccagtccaggccctcccgcgcggggagttttcctttttcttaattttccttcccctggcgtgccgcccccaccacgtagcgagcaactcctccccgcgctcatcgctcactccacctccaggctccagctactactaatacccgggcggtgcgaagctttgcctttaggctttagctagtacaccgaacgcgccaagtcccggaggcggaggcggtgatctttgttcgtttcctcgcctctcctcccctcccctctcctctcctttcattccctgtcccgtgggcggcaatggcgggcaccgcgcggattcttcctgccgccgcggcggcgctgctgctgctgctctgcatcgcgggcggcgcgcgggcggccaacgtgacgtacgaccaccgcgcgctggtcatcgacggcgtgcggcgcgtgctcgtctccggctccatccactatccgcggagcacacccgacatgtggccggggctgatccagaaggccaaggacggcggtctggacgtcatcgagacctacgtcttctgggacatccacgagcccgtgaggggacagtacgacttcgagggccgcaaggacctggccgcgttcgtcaagaccgtcgccgacgccggcctgtacgtgcacctccgcatcggaccctacgtctgcgccgagtggaactacggaggcttcccgctgtggctgcacttcatccccggcatcaagttccgcaccgacaacgagcctttcaaggcggagatgcagcgcttcacagccaagatcgagaacgaatacggcaacatcgactcggcgtacggggcgcccggaaaggcgtacatgcggtgggcggccgggatggccgtctcgctcgacaccggcgtgccctgggtcatgtgccagcaggccgacgcgccggaccccctcatcaacacctgcaacggcttctactgcgaccagttcacgcccaactccgccgccaagcccaagatgtggaccgagaactggagcggctggttcctctcgtttggcggcgccgtcccctaccgccccgtcgaggacctggccttcgccgtcgccaggttctaccagcgcggcggcaccttccagaactactacatgtaccatggagggaccaacctcgaccgcagctcgggggggcccttcatcgccaccagttacgactacgatgcccccatcgacgagtacggactagtcaggcagccaaagtggggccacctaagggatgtgcacaaggccataaagctctgcgaaccagcgctcatagcaactgatccgtcatacacttctctaggtccaaatgttgaggcagcagtatacaaagttggttcagtttgcgcagcattccttgccaacatagatggtcaatctgataaaaccgtcaccttcaatgggaagatgtacaggcttcccgcctggtctgtcagcatccttcctgactgcaagaatgtggtacttaatacagctcagatcaattctcaaacgacaggttcagaaatgagatacttggagtcgagcaacgtcgcatcagatggctcatttgtcacgccagaactggcagtatctgactggagctacgccatagagcctgtaggtatcacaaaggacaatgcacttacaaaggctggactgatggagcagataaacaccacagcagatgccagtgatttcctctggtactcaacaagcatcacagttaaaggtgatgaaccctatctaaatggcagccagtctaatctggcagtcaactcacttggacatgttcttcaggtctacatcaatggtaaaattgcaggaagtgcacaaggtagtgcaagcagctcactcatctcatggcagaaaccaattgaacttgtacctgggaagaacaaaatagatcttctaagtgcaacagttgggctgtcgaattatggtgcattctttgacctggtaggtgctggaattactggcccagtaaaactgagtggactaaacggtgcgctcgatctgtcttctgcagaatggacatatcagattggactcagaggagaagatttgcacctatatgatccttcagaagcttcaccagaatgggtctcagccaatgcttatccaatcaatcatccactgatttggtacaagaccaagttcacacctcctgcaggtgatgatcctgtcgcgattgacttcacgggaatggggaaaggtgaagcatgggtgaatggacagagcattggtcgatactggccaacaaatctggctccacagagcggttgcgtcaactcttgcaactatagaggagcctacagttcaagcaaatgcctcaagaagtgtggccagccatcacagactttgtaccatgttccccgttcgtttctccaaccaggcagcaatgatctagtccttttcgagcattttggtggtgacccaagcaagatatcctttgtgatgaggcagacaggaagtgtgtgcgcacaagtatcagaggcacatccagcccaaattgatagttggagttctcaacagccgatgcagagatatggacctgcacttcgcctggaatgcccaaaagaaggccaggtcatcagcagcgtcaagtttgcaagctttgggacaccgagtggcacatgtggaagctacagccatggcgaatgcagcagcactcaggctctctcaattgttcaggaggcttgcatcggagtgagcagctgcagcgtgccagtgtcgtcgaattattttggaaatccatgtacaggggtcacaaaaagccttgcagttgaagctgcatgctcgtgacatgtctgattaatattggttcataggaagcaaatcacctaggacaaggtgaaaccttctctgtaggcaagcaggcaaaaaggaataaatgttcccatcctgatcaaaaggaataaaaatattctgaaaattgccacatccaagctattagatggtatgcttaggaagtattgttattgttaagatataaatccatccatcatgacaaagaaggtgatctttttgtaatccttcttgaaaaaatagaatgatttgaatttcgacaagttaactatacatccttgccaaaaaaaattgaattacacttctcaacgaatggacagttttgtcataccaagagacatctggaatcctgaagagcaagcaacgttgggagtccgcactactttgtaccgcagaaaaaaattaatacctcactaaaac

SEQ ID NO: 92178 - DNA, 3465 bp, Zea Mays
gcatccacgacccccatctcccacgcccaccgccacaacacgccgcgcggcaaagaaacaacgccagaaagcgatcggatcggatccggatcggcagcagtcagtgcagtgcatccagagcggcagagccccgtcgtcccgtggccgccaggtcgatcccccagcggccggccggccggccagtccaggccctcccgcgcggggagttttcctttttcttaattttccttcccctggcgtgccgcccccaccacgtagcgagcaactcctccccgcgctcatcgctcactccacctccaggctccagctactactaatacccgggcggtgcgaagctttgcctttaggctttagctagtacaccgaacgcgccaagtcccggaggcggaggcggtgatctttgttcgtttcctcgcctctcctcccctcccctctcctctcctttcattccctgtcccgtgggcggcaatggcgggcaccgcgcggattcttcctgccgccgcggcggcgctgctgctgctgctctgcatcgcgggcggcgcgcgggcggccaacgtgacgtacgaccaccgcgcgctggtcatcgacggcgtgcggcgcgtgctcgtctccggctccatccactatccgcggagcacacccgacatgtggccggggctgatccagaaggccaaggacggcggtctggacgtcatcgagacctacgtcttctgggacatccacgagcccgtgaggggacagtacgacttcgagggccgcaaggacctggccgcgttcgtcaagaccgtcgccgacgccggcctgtacgtgcacctccgcatcggaccctacgtctgcgccgagtggaactacggaggcttcccgctgtggctgcacttcatccccggcatcaagttccgcaccgacaacgagcctttcaaggcggagatgcagcgcttcacagccaaggtggtggacaccatgaagggggcggggctgtacgcgtcgcagggcgggcccatcatcttgtcccagatcgagaacgaatacggcaacatcgactcggcgtacggggcgcccggaaaggcgtacatgcggtgggcggccgggatggccgtctcgctcgacaccggcgtgccctgggtcatgtgccagcaggccgacgcgccggaccccctcatcaacacctgcaacggcttctactgcgaccagttcacgcccaactccgccgccaagcccaagatgtggaccgagaactggagcggctggttcctctcgtttggcggcgccgtcccctaccgccccgtcgaggacctggccttcgccgtcgccaggttctaccagcgcggcggcaccttccagaactactacatgtaccatggagggaccaacctcgaccgcagctcgggggggcccttcatcgccaccagttacgactacgatgcccccatcgacgagtacggactagtcaggcagccaaagtggggccacctaagggatgtgcacaaggccataaagctctgcgaaccagcgctcatagcaactgatccgtcatacacttctctaggtccaaatgttgaggcagcagtatacaaagttggttcagtttgcgcagcattccttgccaacatagatggtcaatctgataaaaccgtcaccttcaatgggaagatgtacaggcttcccgcctggtctgtcagcatccttcctgactgcaagaatgtggtacttaatacagctcagatcaattctcaaacgacaggttcagaaatgagatacttggagtcgagcaacgtcgcatcagatggctcatttgtcacgccagaactggcagtatctgactggagctacgccatagagcctgtaggtatcacaaaggacaatgcacttacaaaggctggactgatggagcagataaacaccacagcagatgccagtgatttcctctggtactcaacaagcatcacagttaaaggtgatgaaccctatctaaatggcagccagtctaatctggcagtcaactcacttggacatgttcttcaggtctacatcaatggtaaaattgcaggaagtgcacaaggtagtgcaagcagctcactcatctcatggcagaaaccaattgaacttgtacctgggaagaacaaaatagatcttctaagtgcaacagttgggctgtcgaattatggtgcattctttgacctggtaggtgctggaattactggcccagtaaaactgagtggactaaacggtgcgctcgatctgtcttctgcagaatggacatatcagattggactcagaggagaagatttgcacctatatgatccttcagaagcttcaccagaatgggtctcagccaatgcttatccaatcaatcatccactgatttggtacaaggtcagtatggaattcaaatgatcatacattcatagtaccatggaaccaatccatatgagacatttaaacacagccagtatgggcttaaaaaacaagatatatacagtctatttgtttggctaacccatttctcgagttgctgcattgggttgatgtgctaactgtaatttccaaaacagaccaagttcacacctcctgcaggtgatgatcctgtcgcgattgacttcacgggaatggggaaaggtgaagcatgggtgaatggacagagcattggtcgatactggccaacaaatctggctccacagagcggttgcgtcaactcttgcaactatagaggagcctacagttcaagcaaatgcctcaagaagtgtggccagccatcacagactttgtaccatgttccccgttcgtttctccaaccaggcagcaatgatctagtccttttcgagcattttggtggtgacccaagcaagatatcctttgtgatgaggcagacaggaagtgtgtgcgcacaagtatcagaggcacatccagcccaaattgatagttggagttctcaacagccgatgcagagatatggacctgcacttcgcctggaatgcccaaaagaaggccaggtcatcagcagcgtcaagtttgcaagctttgggacaccgagtggcacatgtggaagctacagccatggcgaatgcagcagcactcaggctctctcaattgttcaggaggcttgcatcggagtgagcagctgcagcgtgccagtgtcgtcgaattattttggaaatccatgtacaggggtcacaaaaagccttgcagttgaagctgcatgctcgtgacatgtctgattaatattggttcataggaagcaaatcacctaggacaaggtgaaaccttctctgtaggcaagcaggcaaaaaggaataaatgttcccatcctgatcaaaaggaataaaaatattctgaaaattgccacatccaagctattagatggtatgcttaggaagtattgttattgttaagatataaatccatccatcatgacaaagaaggtgatctttttgtaatccttcttgaaaaaatagaatgatttgaatt

SEQ ID NO: 92179 - DNA, 3286 bp, Zea Mays
gcatccacgacccccatctcccacgcccaccgccacaacacgccgcgcggcaaagaaacaacgccagaaagcgatcggatcggatccggatcggcagcagtcagtgcagtgcatccagagcggcagagccccgtcgtcccgtggccgccaggtcgatcccccagcggccggccggccggccagtccaggccctcccgcgcggggagttttcctttttcttaattttccttcccctggcgtgccgcccccaccacgtagcgagcaactcctccccgcgctcatcgctcactccacctccaggctccagctactactaatacccgggcggtgcgaagctttgcctttaggctttagctagtacaccgaacgcgccaagtcccggaggcggaggcggtgatctttgttcgtttcctcgcctctcctcccctcccctctcctctcctttcattccctgtcccgtgggcggcaatggcgggcaccgcgcggattcttcctgccgccgcggcggcgctgctgctgctgctctgcatcgcgggcggcgcgcgggcggccaacgtgacgtacgaccaccgcgcgctggtcatcgacggcgtgcggcgcgtgctcgtctccggctccatccactatccgcggagcacacccgacatgtggccggggctgatccagaaggccaaggacggcggtctggacgtcatcgagacctacgtcttctgggacatccacgagcccgtgaggggacagtacgacttcgagggccgcaaggacctggccgcgttcgtcaagaccgtcgccgacgccggcctgtacgtgcacctccgcatcggaccctacgtctgcgccgagtggaactacggaggcttcccgctgtggctgcacttcatccccggcatcaagttccgcaccgacaacgagcctttcaaggcggagatgcagcgcttcacagccaaggtggtggacaccatgaagggggcggggctgtacgcgtcgcagggcgggcccatcatcttgtcccagatcgagaacgaatacggcaacatcgactcggcgtacggggcgcccggaaaggcgtacatgcggtgggcggccgggatggccgtctcgctcgacaccggcgtgccctgggtcatgtgccagcaggccgacgcgccggaccccctcatcaacacctgcaacggcttctactgcgaccagttcacgcccaactccgccgccaagcccaagatgtggaccgagaactggagcggctggttcctctcgtttggcggcgccgtcccctaccgccccgtcgaggacctggccttcgccgtcgccaggttctaccagcgcggcggcaccttccagaactactacatgtaccatggagggaccaacctcgaccgcagctcgggggggcccttcatcgccaccagttacgactacgatgcccccatcgacgagtacggactagtcaggcagccaaagtggggccacctaagggatgtgcacaaggccataaagctctgcgaaccagcgctcatagcaactgatccgtcatacacttctctaggtccaaatgttgaggcagcagtatacaaagttggttcagtttgcgcagcattccttgccaacatagatggtcaatctgataaaaccgtcaccttcaatgggaagatgtacaggcttcccgcctggtctgtcagcatccttcctgactgcaagaatgtggtacttaatacagctcagatcaattctcaaacgacaggttcagaaatgagatacttggagtcgagcaacgtcgcatcagatggctcatttgtcacgccagaactggcagtatctgactggagctacgccatagagcctgtaggtatcacaaaggacaatgcacttacaaaggctggactgatggagcagataaacaccacagcagatgccagtgatttcctctggtactcaacaagcatcacagttaaaggtgatgaaccctatctaaatggcagccagtctaatctggcagtcaactcacttggacatgttcttcaggtctacatcaatggtaaaattgcaggaagtgcacaaggtagtgcaagcagctcactcatctcatggcagaaaccaattgaacttgtacctgggaagaacaaaatagatcttctaagtgcaacagttgggctgtcgaattatggtgcattctttgacctggtaggtgctggaattactggcccagtaaaactgagtggactaaacggtgcgctcgatctgtcttctgcagaatggacatatcagattggactcagaggagaagatttgcacctatatgatccttcagaagcttcaccagaatgggtctcagccaatgcttatccaatcaatcatccactgatttggtacaagaccaagttcacacctcctgcaggtgatgatcctgtcgcgattgacttcacgggaatggggaaaggtgaagcatgggtgaatggacagagcattggtcgatactggccaacaaatctggctccacagagcggttgcgtcaactcttgcaactatagaggagcctacagttcaagcaaatgcctcaagaagtgtggccagccatcacagactttgtaccatgttccccgttcgtttctccaaccaggcagcaatgatctagtccttttcgagcattttggtggtgacccaagcaagatatcctttgtgatgaggcagacaggaagtgtgtgcgcacaagtatcagaggcacatccagcccaaattgatagttggagttctcaacagccgatgcagagatatggacctgcacttcgcctggaatgcccaaaagaaggccaggtcatcagcagcgtcaagtttgcaagctttgggacaccgagtggcacatgtggaagctacagccatggcgaatgcagcagcactcaggctctctcaattgttcaggaggcttgcatcggagtgagcagctgcagcgtgccagtgtcgtcgaattattttggaaatccatgtacaggggtcacaaaaagccttgcagttgaagctgcatgctcgtgacatgtctgattaatattggttcataggaagcaaatcacctaggacaaggtgaaaccttctctgtaggcaagcaggcaaaaaggaataaatgttcccatcctgatcaaaaggaataaaaatattctgaaaattgccacatccaagctattagatggtatgcttaggaagtattgttattgttaagatataaatccatccatcatgacaaagaaggtgatctttttgtaatccttcttgaaaaaatagaatgatttgaatt

SEQ ID NO: 92180 - DNA, 138 bp, Zea Mays
atggcggacggcgaggcgaggctcaagacacagcttgctctggcgcgcggtgctttgcaagcgagctcggctcggcgactcacactggcgagggcgatcaacgacgagccaacgtcgaggtggggctacacacgctag

SEQ ID NO: 92181 - DNA, 1424 bp, Zea Mays
gttttctctgttgtgcttctgagaagggatacgggtctttcacgacttctgacgggagggaagggtgtatgatgatgcgtggtaacgtaattctcaacaccgccgagccatagcaatcatcaccgtcgtagtcgccacctcctctcccggcgtggagtggaagagaacccgtctgcactcataggctggttttgttcggtgggagggcaacttgagtctaagatattcaggtattgctagagatgttgggtcatgatctagcaaccgatccctctagtactttgcgtatggttacctcaagggtatcaagtgcaccgttggggcttgtctgttcgttgagttttgacaggggattcaaggaaaagaacaatatcttcatcaacgtggatagatgcatgaagtacagtactttctgttatgcacccagaaatcccaatatcacaccactggcaactgcatcgtttggggacatggctgattcttcaatttttacctttcccagaatccatgtgaaggatccatatcagcgcctcggaatcagcagggaagcatcggaagaagaaattcgggctgctaggatttatctgataagcaagtatggaggccatagtcaagcgctgatgcaattgagtgtgcccatgataggattatcatgcagagtttctttgataggaaaaaaaccaaaaacgaacctcaagaaaaaaattagagaacttagtcagtcacgtgccgtgaaggctattcaaggcagatttcaaacaccacgtagcaaagtcatttggcagacagctattacttttgtcttgcttggagtgcttacccttgctttccctactgaagaagggccaaccctccaggtggccatctcttgtgcagcaaatatctatttcatttatcagagggtcaaaagtggatggcgagcattcttttatgggcttggttctttctttgcttccttgttcctgggcaccttcttgatggtatccctaattcctcctgtactccccggcccaagaaacttggaagtgagcaccgcgtgtgttacttacgtgctccttttcgtatcgccgacattcttgaagtaagagatctccgtgcttccttccatgttagcccaaagtcttgcagaagttataatcatggtatcctgcttcaaatagcttgtacaatccatcagctttttgtttgtttgtttcacgttcgtggagttggaaatggtagcccctcggtgagttgatagtagttttcaggttgccatgtgatatgtagaactttttttttgcccttggaccgtgaggtcttaagcacaaagagtaacacctctctcgtaggagttgtgtggaggcctgtcaacttgcttccgaatagatcatgtatcgtaatatccatgctgaagtcatcggtcgtcttttggatggacatca

SEQ ID NO: 92182 - DNA, 2567 bp, Zea Mays
gccgccgccgttgaatggtcgggtagaggacgtaaccatggttcactgccgggccctttaaaagccgagccgggctcgtcccatccgccccacgaccgcttggcgcttcatcactcgttccctttcgaaagcccgcgcacgcacgtcggtcgtcccgagcaggacctcgatcggccgagatggcgacgccgaacgggcttgcgcggatcgagacgaccgggaagaagaagcaggacaacggcgtgtggtacgacgacagctcggcgccggtgcgcgcgcagaccatcgacgagctgcactcgctgcagcggaagcggtcggcgcccagcacgcccaagcggtcggcgcccaccacgcccatcaagggcggtgcccactcgcccttcgccgtcgcgatctccgaggaggagcgccacacgcagcagatgcagtccatcagtgcgtcgttggcgtctctgacgcgtgaaaccgggccgaaagtggtcaagggcgacccggccgcgaagggcgaggccgccgcgcagggcgcgccatcgacgccgagggcgcaccagcagcaccgccaccccgccgcccccgccatcgccgtcagcgacagctccctcaagttcactcatgtgctcaacaacctctcgcctgctgagctgtacgagcaggccatcaagtacgagaaggggtcgttcatcacgtccaccggcgcgctggcgacgctgtccggtgccaagaccgggcggtctcccagggacaagcgcgtcgtcaaggacgaggtcaccgcgcaggacctgtggtggggcaagggctcgcccaacatcgagatggacgagaagacgttcctgatcaacagggagagggccgtcgactacctcaactccctggagaaggtgttcgtcaacgaccagtacctcaactgggaccccgagaaccggatcaaggtccgcatcatctccgccagggcgtaccactccctcttcatgcacaacatgtgcatccgccccacagacgaggagctggaggacttcggcacgccggacttcaccatctacaacgcagggcagttcccctgcaaccgctacacccactacatgacgtcgtccacgagcatagacctcaacctcgccaggagggagatggtcatcatgggcacgcagtacgccggcgagatgaagaaggggctcttcggcgtcatgcactacctcatgcccaagcgcggcatcctctcgctgcactccggctgcaatatgggcaaggacggcgacgtcgccctcttctttggcctctcaggtaccgggaagacgacgctgtcgacggatcacaacaggcttctgatcggcgacgacgagcactgctggagcgacaatggcgtgtccaacatcgagggcggctgctacgccaagtgcatcgacctggcgcaggagaaagaacctgatatttggaacgccatcaagtttggaactgtgctggagaacgtggtctttgatgagcatactcgtgaagtcgactacgccgacaactctgtcaccgagaacactcgggctgcctacccgatcgagtacatccccaacgccaagataccatgcgtcggcccgcaccccaagaacgtgatcctcctggcgtgcgacgccttcggcgtgctcccgccggtgagcaagctgaacctggcgcagaccatgtaccacttcatcagcggctacaccgctctggtcgccggcacggaggacggcatcaaggagccgcaggccaccttctccgcctgcttcggcgcggccttcatcatgctccacccgaccaagtacgccgccatgctcgccgagaagatgcagaagtacggcgccaccgggtggctcgtcaacaccggctggtcgggtggcaggtacggcgtgggcaagaggatcaggcttccctacaccagaaagatcatcgacgccatccactccggcgagctcctcaccgccaactaccagaagaccgaggtgtttggcctggagatccccactgagatcaacggcgtgccgtcggaaatcctcgacccgatcaacacctggacggacaaggccgcgtacaaggagaatctcctgaggctcggcgggctcttcaagaagaacttcgaggtgttcgccagctacaagatcggggacgacagcagcctgactgacgagatcctcgccgcaggccccaacttctgaactaaagcaatggatccggatgaataaaacgatggcgtgcgtgcgtgggtgcgtgtgaagatgattacgacgacgacgacgaaaaaaaaggtgttggatcgatgagccaacatagtaatagattagctgggtattgtcatgggtgcgtctggtgttgttatctataaggctgtctgcctgtctcaagcagctatcatattctatttcaaattctattctgtaagcgtgtagttcaaaacaatgctttacacaaccatatgcacagtctatctaaggttggtctgttctatcagcttgttgggaaaagtttgcgtgtgcttgtatcttgccccctgtactctctctggtttctgaatttgaatacgaaacagcttgatcgcaatc

SEQ ID NO: 92183 - DNA, 2785 bp, Zea Mays
gccgccgccgttgaatggtcgggtagaggacgtaaccatggttcactgccgggccctttaaaagccgagccgggctcgtcccatccgccccacgaccgcttggcgcttcatcactcgttccctttcgaaagcccgcgcacgcacgtcggtcgtcccgtacgtgtgcccgtctatctatcctcctcgactccgtcgtgtctcttcaactccgtcgtgtcgtgtgcaatcgttgcatgcggcgaacgctatacatggtgctccgagagtgtccgggagcagagagcatcgatcaatggcggggtttggtctggtctggtctggtcccatcccagcagggtcgctaatgcgcgctcgctgctgcttctctctctgcaggagcaggacctcgatcggccgagatggcgacgccgaacgggcttgcgcggatcgagacgaccgggaagaagaagcaggacaacggcgtgtggtacgacgacagctcggcgccggtgcgcgcgcagaccatcgacgagctgcactcgctgcagcggaagcggtcggcgcccagcacgcccaagcggtcggcgcccaccacgcccatcaagggcggtgcccactcgcccttcgccgtcgcgatctccgaggaggagcgccacacgcagcagatgcagtccatcagtgcgtcgttggcgtctctgacgcgtgaaaccgggccgaaagtggtcaagggcgacccggccgcgaagggcgaggccgccgcgcagggcgcgccatcgacgccgagggcgcaccagcagcaccgccaccccgccgcccccgccatcgccgtcagcgacagctccctcaagttcactcatgtgctcaacaacctctcgcctgctgagctgtacgagcaggccatcaagtacgagaaggggtcgttcatcacgtccaccggcgcgctggcgacgctgtccggtgccaagaccgggcggtctcccagggacaagcgcgtcgtcaaggacgaggtcaccgcgcaggacctgtggtggggcaagggctcgcccaacatcgagatggacgagaagacgttcctgatcaacagggagagggccgtcgactacctcaactccctggagaaggtgttcgtcaacgaccagtacctcaactgggaccccgagaaccggatcaaggtccgcatcatctccgccagggcgtaccactccctcttcatgcacaacatgtgcatccgccccacagacgaggagctggaggacttcggcacgccggacttcaccatctacaacgcagggcagttcccctgcaaccgctacacccactacatgacgtcgtccacgagcatagacctcaacctcgccaggagggagatggtcatcatgggcacgcagtacgccggcgagatgaagaaggggctcttcggcgtcatgcactacctcatgcccaagcgcggcatcctctcgctgcactccggctgcaatatgggcaaggacggcgacgtcgccctcttctttggcctctcaggtaccgggaagacgacgctgtcgacggatcacaacaggcttctgatcggcgacgacgagcactgctggagcgacaatggcgtgtccaacatcgagggcggctgctacgccaagtgcatcgacctggcgcaggagaaagaacctgatatttggaacgccatcaagtttggaactgtgctggagaacgtggtctttgatgagcatactcgtgaagtcgactacgccgacaactctgtcaccgagaacactcgggctgcctacccgatcgagtacatccccaacgccaagataccatgcgtcggcccgcaccccaagaacgtgatcctcctggcgtgcgacgccttcggcgtgctcccgccggtgagcaagctgaacctggcgcagaccatgtaccacttcatcagcggctacaccgctctggtcgccggcacggaggacggcatcaaggagccgcaggccaccttctccgcctgcttcggcgcggccttcatcatgctccacccgaccaagtacgccgccatgctcgccgagaagatgcagaagtacggcgccaccgggtggctcgtcaacaccggctggtcgggtggcaggtacggcgtgggcaagaggatcaggcttccctacaccagaaagatcatcgacgccatccactccggcgagctcctcaccgccaactaccagaagaccgaggtgtttggcctggagatccccactgagatcaacggcgtgccgtcggaaatcctcgacccgatcaacacctggacggacaaggccgcgtacaaggagaatctcctgaggctcggcgggctcttcaagaagaacttcgaggtgttcgccagctacaagatcggggacgacagcagcctgactgacgagatcctcgccgcaggccccaacttctgaactaaagcaatggatccggatgaataaaacgatggcgtgcgtgcgtgggtgcgtgtgaagatgattacgacgacgacgacgaaaaaaaaggtgttggatcgatgagccaacatagtaatagattagctgggtattgtcatgggtgcgtctggtgttgttatctataaggctgtctgcctgtctcaagcagctatcatattctatttcaaattctattctgtaagcgtgtagttcaaaacaatgctttacacaaccatatgcacagtctatctaaggttggtctgttctatcagcttgttgggaaaagtttgcgtgtgcttgtatcttgccccctgtactctctctggtttctgaatttgaatacgaaacagcttgatcgcaat

SEQ ID NO: 92184 - DNA, 1011 bp, Zea Mays
atgacgggggcaggggaggcgctgaggacggggaggaagcgaggatgggcggcagacgttcgcggtaggggcgagcggtgggatggtgaactttggcgggcggcatgtgggggcgcgcgggtcgcgcaggtctcctcctggtgggggcgcgttgtagcagtcgcggcaactagtggagggggcaccgacgatgcgcgaggatcgatgtggggcgccgacgacgaaaagggcgcgcagatgtggatcctcatcggatgcgccgatggaaggggatcgatgcggggcgccgaggatggaggggatcgatgcaacataacatttctcacactgcaacaggattatgatgaagatggaactctttccttatcagaattctcagacttgatgaaagcttttggtaataaattagcagttgcaaagattgaagagtttttccgtcaagcagatacaaatagtgatggcatagttgacatagatgaactggcagccctactggctgctcaacaagaagaagaaccacttataagtaactgccctgtctgtggtgaagatcttggaaaatatgataacataaatgatatgatacatatgacactttgcttggatgagggaactggtaatcagattatgactggtggatttctaactgacaaacaggcatcttatgggtggatgttcaagctcagtgaatgggcacatttctccacgtatgatgttggtttgcactctggctctacagcttcacatattctggttttcgaccggcgaacaaagaggatagtcgaagaagttattgacagaaaaattgtattgtccatgagggctttataccaatcaaaagtaggactcgctcttataaatacagatacagtgcaaggcctaaaaatgagaagggagaggtcaggcgaggaggatctgggtggccttcgcgggcaagaacaaggacgacgtaggactcaaccattagattccaatagcctccaccgattgagtggtacaataagcccttaa

SEQ ID NO: 92185 - DNA, 767 bp, Zea Mays
atccctgcagcaaggaaaaccagctcatccaacaaatttgccgttagctcctcgctcgatcgatagcgcccatggaccagcaacagtacccgaccatgtacccaagcgcaccgccgaccccgggcaacatggaggcgggcctcgtcgccacgggcctgcctgtgcggcggcagcagctcggcggggccgcgccggacagggacggcggctgggcgggcaacgaccacagcacgctgatcgtggtggccacgctgatcacggcgctcagcttcctgctcggcctcagcatgcccggcggctactggcagaacgaccagacgttcgtgagcaacggcggggtggtgtaccaccgcgccgccggagaccccatcatgcgcgacctgcaccggccgaggtactgggtgttcaggggggccagctgggtcggggtgacgagctcgatggtgatgacgctcagcctgctcgtgcggatggccgtggactcgcgccacgtgctgtggtccttctcggtggcctactccagcctcatcctcaccttcatcgtgtcgcagtccaggacgcacctgtcgctggacatcatcatctggctggccctcctcgccttcatctggctcgtcatcagcctccacccggaccaccgggcgcgcgtcgtccgggtgctcttctgcttcaaccgcgacaactgaaattaaacaaataaagctgctctttgcctgcttattagtatttcctatcccctttggagttagcagagtggattgaaagtg

SEQ ID NO: 92186 - DNA, 1085 bp, Zea Mays
attcatccaacactactccaagtttaatttcccacaccaaacctcagctcccaccgatcggttccatcaacctaacaatccctcgcttgttagcccgcgcgcgtgtgtcgtgtgcgctgcgtgcgtcccatggctcagcctcgcgtgcacccaaacgcggcggcggcggcgggtgacctggagatgggcggcaacggcggcgtgttcccgccgctgccagttcgcgggcagcccgcctccgtgaaccagcagcagctcggcggcggcccccacacctgggtgggcaacgacgccaacacgctgctggtggtggccacgctgatcaccacgctcacctaccagctcggcaccagcatccccggcggctactggcagcaggacacgacggcggcgtcgagggacggcaaggagcaggtcacgtaccgcgccggcgaccccatcatgcgcgacctgcaccggccaaggtactgggtgttcatgggcgcgagctgggtggggttcgcgagctccatgatgatgacgctgagcctgctggtgcggatgcccgttgactcgcgccacgtgcgctggtccttcgtggtggcctactccagcctggtgctcaccttcgtggtgtcgcagcccaagacgcacctgtcgctggacctcctcatctgggccgccgtcctcgtcttcctctggatcatcgtcagcctccacccggaccgccgcgcgcgcgtcatccaggagctctgctgcggtggccgcgatacctgaagcagagcaaaccccgacgtaccacgaatgattagttgttgcttttttttttggtgacgatggggtaattgactgtcttttctcttatagtcaaccaagatgtaaacaaaatcccactgaacaaggtagccagagcctatgtccttgattgagcgctatagtagtctatattcgtatcaagtagaatctagataggcagatgaacacgctggcatgatttagcgtaatcttttcggcacccgcctacaatttaaaaaactagactagatatttccaagtcaacgtgtaaggaaaaaacaaaaatcaatggccattcgctagttttgtta

SEQ ID NO: 92187 - DNA, 735 bp, Zea Mays
ccttgcattaacagtgggcaatggtccgacgtcatggtgcacatggatagaagatcagccgaggggtacaggtcatgccattcggttgtcgcgaagaatctgtcaatcctagtcatggtagggttagcttgttcatttgaccaggtaaatgctctatcggtgagatctagctctaagaggtgcagatcatcaattgtgttattgaactgcctcatcacccttctgttgattgaccctttgtttttttctctcgcttcgttattattgttgttgtgttttcgatcatataacctgcacaacgtcattactacagtctgttagattctcctacaataatgttttgcttagtctgttgttactctcaatagatcaactcactgcattcattccctatgcagtatgaatagagatagtacaatgtcgtggacctgatatacattgaattgacttccgagcttttactcgtcacaggttcctatactagcagtgaaagagcatctggtcaatgctggtgtggaggtcagggtgtaacagggagatccttcggtttattgaaatattcttgtttgatgtcacaactgctatcagttctgtttctctgatgtcgcaactgctatcagatctgttggtggcagctggcagtgcataggcccctgtcgagaactgcagtttggtaataaattaataatgtgatgcttaacagattaagcatccgcttcttttgcttgtgtttct

SEQ ID NO: 92188 - DNA, 2147 bp, Zea Mays
aagaaaaggcccgctagggcgccgagacagcggaacgttctctgagtttgagcacgatctccccgggccccggcgccgccgtacgtcccccttcggcgtcgccagccgcctcctggctccggctccttcatcgcctgctccagcgtgcctgcgtgacataagcgtcgattgattggcgagaaaggggacgaatgcagccgccgttgcaggcgcagggagcaatggctaacgtcgccgctatcctcaccgtcccctgctccgcgggccgccgcccgaagcggagcagccagccccgcggatgcggctccgtctccgtctccgtctccgtccgtgcgtcctccggcgcaaacacggtgactctgctggactacggcgcggggaacgtacgcagcgtgcgcaacgcaattcgctacctcggcttcgacatccgcgacgtgcagagcccggaggacatcgtcgccgcggaacggctcgtctttcccggtgtcggcgccttcggctccgccatggacgtcctcaacaggacgggcatggccaacgcactccgtgagtacatccaaagggaccgccccttcctaggcatctgcctcggtctccagctgctcttcgattccagcgaggagaacggcccggtgagcggcctcggtgtgataccaggcgtggtcaggcgattcgactcctcaaatggcctcatagttccacatattggctggaacgctctccagatcaccaaggacacaccactgttgcagggagctgatggccagcatgtgtactttgttcactcctaccgcgtactgccttcagatgctaatagaaactggatttcctccatatgcaactatggtgacagctttatatcctccatctcaatgggcaacattcaggcagttcaatttcacccagaaaagagtggagctaccggactttctattctaaaagaatttctcagacctaactctcttgggaccaaggtcccagcacgtaggaaagcatcaaaacttgcgaagagagtgatagcatgccttgatgttcgttcaaatgataaaggagatcttgtggtaacaaaaggcgatcaatatgatgtaagagatcatactagcagcaaagaggtaagaaaccttggcaagccagtcgatttagcaagccagtactacatagacggtgctgatgaggtcagcttcttgaatataactggtttccgtgactttccattgggtgatttgccaatgctagaggtactgcgttgtgcctctgaaaaggtttttgtgccacttacagttggtgggggcatacgagacttcacagatgcaaatggaagatactactcaagtttggaggtagcatcagaatatttcaggtccggtgctgacaaaatttcaattggaagtgatgctgtttatgctgctgaagcctttttacagactggtgtaaagacagggaaaagcagcttggagcaaatctctagagtatatggcaatcaggctgtagttgtcagtattgatcctcgacgggtatatgtcaaaagtcaagaagatgtgccatttaaaactgtaaaggtgtccactaaaggtccatcgggagaagaatatgcatggtaccagtgcacagtgaatggtggacgtgatagccgagctataggagcatatgaactagcgaaagctgtggaagaattgggcgcaggagaaatacttcttaactgcattgattgtgatggccaaggttgtggatttgacatagatttggttaaaatggtttctgatgctgtgacaatccctgtcattgcgagcagtggtgctggagctgttcaacatttttctgaaatttttgagaaaacaaatgcttctgctgcccttgctgctggcattttccaccggaaagaggttcctatactagcagtgaaagagcatctggtcaatgctggtgtggaggtcagggtgtaacagggagatccttcggtttattgaaatattcttgtttgatgtcacaactgctatcagttctgtttctctgatgtcgcaactgctatcagatctgttggtggcagctggcagtgcataggcccctgtcgagaactgcagtttggtaataaattaataatgtgatgcttaacagattaagcatccgcttcttttgcttgtgtttct

SEQ ID NO: 92189 - DNA, 1794 bp, Zea Mays
tcacacaaagctgtaaataggatgtcttcatctgctttggcagcttgcatggcaccgcttcttctccgtcctcttcttcttggtgaatgtgaaattgatagtgaattcagtatggctggggatggttcattccagttgcttcaagctgctgctgctgccaaccatgcccaagctattgttattattatgcttgaggaatatgatcagatatttgatgtacctgcttttccctggacgtgcttttctttgcaagcttgttctatttgaacccatactgtattgttatggattttaatccaacaattacctgtttaggatattgaagacggttcgtactcttcagatgcttataccgagtctgacattgacaaggaatattctacagacaatgacatccctgaagattatgatggctcctctggttctggtgaagatgttgaagaagatttgaatgatgatactgaacactcttatggcatgaaggtcgaatgtgatagtaacattaggattgataatgcaaatgataaggcaagaaaaggcttgccaacagaggaggatggctgttccagtgataacgacaaggctcatattacgaagcttgaaaacaagaagactcatctccaatctaaacttacggaggaggagaaagaaaatacagtcctccaggcaaatttagaaaaacgaaaagaagcattacacaagcgccgtgtagcacttgaaaaagaagtggaaaatttacgagaccagctactgaaggagagaagtttgagggcttctctggagtctgggctaatgaatatgcgaagaggacaagtgtccttcccctcaacgatagacaccaagactaaggctgatcttgaggaagttgctgccgttgaagctgatattatgaacttgaagcaaaaggtttctgatcttcggggacaactcaacaaccaagttcagttgagttccacctcgttatgtgaatcatgcaacaacaagcgatccataaatgcagacaagcttgtcgaaggtgaacaaaacgctgccctttctccacagattgcctcagtcgaagcaccacctattgtagggtcttattctgtacctgacatgttctgggctacaaaccaaatggttcagaagatgttgtattcaaagggtgagattgcgaaggatggccaagacggatcacttacatcaagatggaactttgcacagagaccacactcaaatagtccagtcatgagcagggttcaaggttccgatgcctattcaagtactaaaaccgaggaatctggaggcgcaccttcctctgcattagcgaagctgactacccgactcaactttttgaaagaaagaagggccttgcttgccagtgagatgcaaaacttagatctgggccgctcccaggcccagaggcatacagctcctccgaaagctgagactccaactgagaagtagaatcgttttactgcatcgttgttaggccacaagctcaggtaggattgcaggcagtaacagaaaacttcgattcgacaatgcacagagactatctagctatagagtaacttgatttgtacatcgcacaggcattcatgtcttcaccctgatgattcatatgtcaagttttttagcgacaccgacgaacaacctggtttgtactattttatctccaaataaacaatactcctactctgggacaaagccaaagtgcgtttgcaaattatttgtcggtctgtctggtactctggtttgtacatcaacttcacttacgatcaagctaagtaaaaataccgtaccatgtgtatc

SEQ ID NO: 92190 - DNA, 2002 bp, Zea Mays
atggagttggaatataaggaaattcaatctgttgcagcagagaataagtctgtaattggcagaccagcagaatttgcacttgtcgatgctgatggcactacagcattcctgcagaaggccttaaagttcatcgaagattatggaaagaatgagttctccccagaagaggatgcacatgttatcggtgactgtattaagtgcattcttcgagagatgccatcttctccaattccggcaccatgttgcactgccctggttagagcttaccgaactgacaagacaaaaagactcgatgctatgaatagagtgatatatgaagtattcccagaaccaaatcgtcaattgttgcagaggattctcaaaatgatgcagattgttggatcacacaaagctgtaaataggatgtcttcatctgctttggcagcttgcatggcaccgcttcttctccgtcctcttcttcttggtgaatgtgaaattgatagtgaattcagtatggctggggatggttcattccagttgcttcaagctgctgctgctgccaaccatgcccaagctattgttattattatgcttgaggaatatgatcagatatttgatgtacctgcttttccctggacgtgcttttctttgcaagcttgttctatttgaacccatactgtattgttatggattttaatccaacaattacctgtttaggatattgaagacggttcgtactcttcagatgcttataccgagtctgacattgacaaggaatattctacagacaatgacatccctgaagattatgatggctcctctggttctggtgaagatgttgaagaagatttgaatgatgatactgaacactcttatggcatgaaggtcgaatgtgatagtaacattaggattgataatgcaaatgataaggcaagaaaaggcttgccaacagaggaggatggctgttccagtgataacgacaaggctcatattacgaagcttgaaaacaagaagactcatctccaatctaaacttacggaggaggagaaagaaaatacagtcctccaggcaaatttagaaaaacgaaaagaagcattacacaagcgccgtgtagcacttgaaaaagaagtggaaaatttacgagaccagctactgaaggagagaagtttgagggcttctctggagtctgggctaatgaatatgcgaagaggacaagtgtccttcccctcaacgatagacaccaagactaaggctgatcttgaggaagttgctgccgttgaagctgatattatgaacttgaagcaaaaggtttctgatcttcggggacaactcaacaaccaagttcagttgagttccacctcgttatgtgaatcatgcaacaacaagcgatccataaatgcagacaagcttgtcgaaggtgaacaaaacgctgccctttctccacagattgcctcagtcgaagcaccacctattgtagggtcttattctgtacctgacatgttctgggctacaaaccaaatggttcagaagatgttgtattcaaagggtgagattgcgaaggatggccaagacggatcacttacatcaagatggaactttgcacagagaccacactcaaatagtccagtcatgagcagggttcaaggttccgatgcctattcaagtactaaaaccgaggaatctggaggcgcaccttcctctgcattagcgaagctgactacccgactcaactttttgaaagaaagaagggccttgcttgccagtgagatgcaaaacttagatctgggccgctcccaggcccagaggcatacagctcctccgaaagctgagactccaactgagaagtagaatcgttttactgcatcgttgttaggccacaagctcaggcattcatgtcttcaccctgatgattcatatgtcaagttttttagcgacaccgacgaacaacctggtttgtactattttatctccaaataaacaatactcctactctgggacaaagccaaagtgcgtttgcaaatta

SEQ ID NO: 92191 - DNA, 600 bp, Zea Mays
gtttaaacggtggaataaaaacttaagctcacacttgtggtttatgctgaattcaatccagtgaatccgaagctgaccatgaagaactaaaataagctatatgtttcagtaccttctgatatcatcttgaggtcttcataagtcagcaacctagagcagaaaatgtcagctccggaattcaggacttcttaccagcaagtatcatcttcgcagtcccctgagaatgtcggtcaactcaaggtctgccaatgtgggtcgggcgactccaattttcagatcacaaataaatccgacggtggcgaaaattcaccaacaacttgtccaaactgtcaggtccttaagagtggaaatttactgctttcatctaaagggattggctggacagtatggaaaaagcgttggtttattcttacaaggacatcattagtgttcttcaggagcgatcctaatgttccccctcccagaggaagtgaaccaattgttacacttggtggaattgacttgaataacactgcaagtatgatagtcaaagaagaaaggaaacttataacagtcgtgtttcctgatggccgtgacggacgcactttcacccttaaggtt

SEQ ID NO: 92192 - DNA, 1330 bp, Zea Mays
agatagggctgttttgcagcggtggcccaaaacatgcagaaaggctgcaagggccgaatttttttccaaatcgttccttctacacactgtcgaggagggcagcgggaagggacgagtcgacgccggtgtgcggtggcggcggtcgcgcggtaacgtttcccttcagcttcgatcatgttggtggcggcgccggccacaaaaggctcacccaccaaggatttgacggctgtcgagcccggggacgagggcatgccctgagtcgtgagaggtgacaggaaacttgttcatagtcgttttcgctaccgtaggtggcgcagtcggtgttcgacgcagggggagctatgggttcggtctcggtttgtcaggcgaatggcaaccaccagccgccgccgccgcaggcagaagcggagcaggtcgtcgaggatggcgttgccgtcgacaggatcaatggcaactaccagccgctggagctggtggctgaggcggggcaggtcgtcgaggagggcgatgccggcgtgaccatggaaggcgtcgcttccatcgccttgctgcctaccggtgccatctccggccatttcattcgcctccctgactccatctgctacgggctacacggcaccccaatatcttgcgagagggaatgtagccgaggagaggactaccgccttataaagctcaccatcattgattttaagagcaagagagagaaggtgcttgtggtggaatgcaggggccatgatgctgctcgattacaaaacattgaccatttgcatgggtgggaagatgacattgttggtttggttgagaaggagcacggaaatcagaaagtcttgctctcctttgaatgcgagacgctgaaggctgataaagacgcggaagatcatattgccaaatatatgccaaatctgtgtggactggacgcagttgtaaatatagggaaaatgagcatctcaggcatcaatctcgacgaggacgccgaaccaagaggggacaactgagcgtgtgaacagtggtcattgttcatcagcactggtaaactctgcacgaatcacatcaaacgcttacactgcactacatatggcagtttgatacgtgtctcattaccagtgcctgtacttaaaattctgtggctgtgaatcggattcaaaaccctttatacgtttcaactttcaagttaccacgtcgcttcttgcacgaatcccaagggtcggttgctcctgctgggtgcatttcttgtctgtggcggtactgtttgtcacgctttgtacgtatgactagcattgcttgtctgtttatgagagtggtgctgtgtttcgtctgttctgttgct

SEQ ID NO: 92193 - DNA, 1268 bp, Zea Mays
agatagggctgttttgcagcggtggcccaaaacatgcagaaaggctgcaagggccgaatttttttccaaatcgttccttctacacactgtcgaggagggcagcgggaagggacgagtcgacgccggtgtgcggtggcggcggtcgcgcggtaacgtttcccttcagcttcgatcatgttggtggcggcgccggccacaaaaggctcacccaccaaggatttgacggctgtcgagcccggggacgaggtggcgcagtcggtgttcgacgcagggggagctatgggttcggtctcggtttgtcaggcgaatggcaaccaccagccgccgccgccgcaggcagaagcggagcaggtcgtcgaggatggcgttgccgtcgacaggatcaatggcaactaccagccgctggagctggtggctgaggcggggcaggtcgtcgaggagggcgatgccggcgtgaccatggaaggcgtcgcttccatcgccttgctgcctaccggtgccatctccggccatttcattcgcctccctgactccatctgctacgggctacacggcaccccaatatcttgcgagagggaatgtagccgaggagaggactaccgccttataaagctcaccatcattgattttaagagcaagagagagaaggtgcttgtggtggaatgcaggggccatgatgctgctcgattacaaaacattgaccatttgcatgggtgggaagatgacattgttggtttggttgagaaggagcacggaaatcagaaagtcttgctctcctttgaatgcgagacgctgaaggctgataaagacgcggaagatcatattgccaaatatatgccaaatctgtgtggactggacgcagttgtaaatatagggaaaatgagcatctcaggcatcaatctcgacgaggacgccgaaccaagaggggacaactgagcgtgtgaacagtggtcattgttcatcagcactggtaaactctgcacgaatcacatcaaacgcttacactgcactacatatggcagtttgatacgtgtctcattaccagtgcctgtacttaaaattctgtggctgtgaatcggattcaaaaccctttatacgtttcaactttcaagttaccacgtcgcttcttgcacgaatcccaagggtcggttgctcctgctgggtgcatttcttgtctgtggcggtactgtttgtcacgctttgtacgtatgactagcattgcttgtctgtttatgagagtggtgctgtgtttcgtctgttctgttgct

SEQ ID NO: 92194 - DNA, 1548 bp, Zea Mays
agatagggctgttttgcagcggtggcccaaaacatgcagaaaggctgcaagggccgaatttttttccaaatcgttccttctacacactgtcgaggagggcagcgggaagggacgagtcgacgccggtgtgcggtggcggcggtcgcgcggtaacgtttcccttcagcttcgatcatgttggtggcggcgccggccacaaaaggctcacccaccaaggatttgacggctgtcgagcccggggacgaggtggcgcagtcggtgttcgacgcagggggagctatgggttcggtctcggtttgtcaggcgaatggcaaccaccagccgccgccgccgcaggcagaagcggagcaggtcgtcgaggatggcgttgccgtcgacaggatcaatggcaactaccagccgctggagctggtggctgaggcggggcaggtcgtcgaggagggcgatgccggcgtgaccatggaaggcgtcgcttccatcgccttgctgcctaccggtgccatctccggccatttcattcgcctccctgactccatctgctacgggctacacggcacccatgaatggtaatcttataaatcataagagggtttctcatctgttggaattatgtcacctctctttggcgccaccatcccgagcaataccagtcaccagatcaacatttccattgttatacacagcattttttggaaacaaaatcaatatcttgcgagagggaatgtagccgaggagaggactaccgccttataaagctcaccatcattgattttaagagcaagagagagaaggtgcttgtggtggaatgcaggggccatgatgctgctcgattacaaaacattgaccatttgcatgggtgggaagatgacattgttggtttggttgagaaggagcacggaaatcagaaagtcttgctctcctttgaatgcgagacgctgaaggctgataaagacgcggaagatcatattgccaaatatatgccaaatctgtgtggactggacgcagttggtaacggcaacgtcaatggtatctaaaatcggtgcttactgttacagtgcaaaagataccgccatttgtttgattgggtgtgctaattattttcactcccttaaatcgcctccacccggcaaagggatcggatagagtaaatatagggaaaatgagcatctcaggcatcaatctcgacgaggacgccgaaccaagaggggacaactgagcgtgtgaacagtggtcattgttcatcagcactggtaaactctgcacgaatcacatcaaacgcttacactgcactacatatggcagtttgatacgtgtctcattaccagtgcctgtacttaaaattctgtggctgtgaatcggattcaaaaccctttatacgtttcaactttcaagttaccacgtcgcttcttgcacgaatcccaagggtcggttgctcctgctgggtgcatttcttgtctgtggcggtactgtttgtcacgctttgtacgtatgactagcattgcttgtctgtttatgagagtggtgctgtgtttcgtctgttctgttgct

SEQ ID NO: 92195 - DNA, 881 bp, Zea Mays
agatagggctgttttgcagcggtggcccaaaacatgcagaaaggctgcaagggccgaatttttttccaaatcgttccttctacacactgtcgaggagggcagcgggaagggacgagtcgacgccggtgtgcggtggcggcggtcgcgcggtaacgtttcccttcagcttcgatcatgttggtggcggcgccggccacaaaaggctcacccaccaaggatttgacggctgtcgagcccggggacgagagcaagagagagaaggtgcttgtggtggaatgcaggggccatgatgctgctcgattacaaaacattgaccatttgcatgggtgggaagatgacattgttggtttggttgagaaggagcacggaaatcagaaagtcttgctctcctttgaatgcgagacgctgaaggctgataaagacgcggaagatcatattgccaaatatatgccaaatctgtgtggactggacgcagttgtaaatatagggaaaatgagcatctcaggcatcaatctcgacgaggacgccgaaccaagaggggacaactgagcgtgtgaacagtggtcattgttcatcagcactggtaaactctgcacgaatcacatcaaacgcttacactgcactacatatggcagtttgatacgtgtctcattaccagtgcctgtacttaaaattctgtggctgtgaatcggattcaaaaccctttatacgtttcaactttcaagttaccacgtcgcttcttgcacgaatcccaagggtcggttgctcctgctgggtgcatttcttgtctgtggcggtactgtttgtcacgctttgtacgtatgactagcattgcttgtctgtttatgagagtggtgctgtgtttcgtctgttctgttgct

SEQ ID NO: 92196 - DNA, 693 bp, Zea Mays
agatagggctgttttgcagcggtggcccaaaacatgcagaaaggctgcaagggccgaatttttttccaaatcgttccttctacacactgtcgaggagggcagcgggaagggacgagtcgacgccggtgtgcggtggcggcggtcgcgcggtaacgtttcccttcagcttcgatcatgttggtggcggcgccggccacaaaaggctcacccaccaaggatttgacggctgtcgagcccggggacgagggcatgccctgagtcgtgagaggtgacaggaaacttgttcatagtcgttttcgctaccgtaggtggcgcagtcggtgttcgacgcagggggagctatgggttcggtctcggtttgtcaggcgaatggcaaccaccagccgccgccgccgcaggcagaagcggagcaggtcgtcgaggatggcgttgccgtcgacaggatcaatggcaactaccagccgctggagctggtggctgaggcggggcaggtcgtcgaggagggcgatgccggcgtgaccatggaaggcgtcgcttccatcgccttgctgcctaccggtgccatctccggccatttcattcgcctccctgactccatctgctacgggctacacggcacccgtattcatctctccccattccccttacagcagttgttggttccttccaagtttcacgcttgggaaaaatatt

SEQ ID NO: 92197 - DNA, 1208 bp, Zea Mays
acttcaccagttcacccactaggactaggagcaggagaggggagagaaaacctcgccgtcaatgtcagcgttcgttcccaagggcgctagggtttaaccccccaactgttcggtctctctctctccccgaatccaattcagcgtcatctagtccgggagcctgcgacatggggtacctccaggaggcccgggagaatcacgtcaagaagaaggtcgaggaagctttgcggagcaaaatgaaacaaaaggctcttcaggaatgtgatttctattgttcaaaatatgctgagtgtgcacggggaagaacattttctgtggtatggcaatgccgcaaacaagcaaaagagttgaatgagtgccttcatcaatacacaaatgatgcaatcctggaagaaatgaagaaggcttatatgattgagcaaaagagcaaggagataaatcaataagcaaaaatccaatgcgcaatgtgcatcacaatcaccctgcttgtatgtatactgttgcctttgatagatactattcatgggtagtgttgcaaacattgttctccccacatgcataacctgatactagtattgggtggcaaactggcaatcttgctgtttctgtcgaacatgcgatataagttgttttcttctgctgcaattttcatcccaaatagattttgtttggatgcagataacacaattgtatttttgttgcactgctaccattagctctagttccaccaagattacatattttgtttcataacaaatcacgtgtgcatatttatatttgagtttatgggagtaaatgagtaatacaaagctaagcagtggacaggtttacattttccggtccaagttaagctactgataaaaaaactggatacactactggccaagactgaaccgacaggaaatcaagttagcatcatcgtcctcctgagaggtcagatccaggaccaatgcttgtcgcaagtgatgacgcatccaacatggcatatgagtcgaagccctcgctttgcagaaacatcatggtgccatagtccaggttcattattgccatctccgggactgtcagtgcaccatcgaggtactgcaatacttgccgcatgccaggccgtgcattaggcattggctgcaagcataggagccccagcttcagaaccaagctcgcctcttctgcactgtactgaccactcaaccgtgcatccactacatcaa

SEQ ID NO: 92198 - DNA, 599 bp, Zea Mays
ttttagtttttggttttttatataatagcaataaaatttagtaatttattgcacagtaagaagctatatcatgacaatcatccagcaaacgtgataatgcaacagtttatagtttcatcgtcacagaaaagaaacgaattcggaaaggaaaacgatgaggaagaaaagggcgcagcacctcgtccatcactgcaccttcaactccatcacgctcttggccttgggggcgtagattgagtaaatcaccgcttgtcgcttcgcaacctctagctgctgcttccccaccgcaaacaaggcggcggcggacggcgcgtcggagagggcgctgttttcgcggaaggcgtccgcggcgcgtcggcgtgtgtactcgcggatgttgtagtccgagaactgcttcgccgtgcggagtaaggaccggaaaagcgacagcacctctgccctcgtcggggccgccgctgccatcgtaccgaactacggtgccgaaagcgctcgaggaggggagagccggaggcggagaggccggctgcgagcctgcgagttggtctctatagttttagcgaattcgctcttgtcacgtttttttcgacgactaatctaac

SEQ ID NO: 92199 - DNA, 1340 bp, Zea Mays
gcaagccatcttcttcttccccggcctctcaaccaagcaaaggaccaacgggacaactaggcttggcatttagtacataacagggtaacgaaggcagcaccaggaagacctccaaactccggcaacagtcgaccaacaatgggcttcatccacagggggacctccaagcagatcagcaaggttaagacccttctagggcttgccttgtcccgccttaccgctgcccgccgtccccgcctcgctcgcaggtcgatttcccgcagcgatgtgggacagctgctagggctcagccacctcgatcgcgctctccaccgtgcagagcagctcatagaggaggataacatgctggaggcattcaacataatagagctacactgcaattgcctcatcgagcacgcaaagcagttagacaagcccaatgaatgcggcgaggacattcgggaggcagccgccgggatcatatttgcagccgggaggtgcagcgatcttccagagctgctgtttgcacgcactatactggcaaataagtttggagacgacttcgcaacgatggcaaaggagggcactggcgtcgtcgaccccatgttggtctggaagctatctggcaacaaaacaaacatggaggtcaagaaaaaggtggtgaaagagattgctgccgagaacaatgtgtcggtggacttctctgagctccaagaagtggttgagcaggatggcagcggcaacgatccgcaccatcattagctcaaccacgaagctataaaccaaactgacatgaatggaagttcagagtcaaactcttggcattctacctctcacatgtttccaactcggatgaagcaaacaatggccatccgaaacaaaagaacatggaagtgcgcacaagaagatgaactttcagagcatccagctcagatgcaacaagccagaatgaggaaatgctacgtttagcttccacacttaccaagttatgggtgtgcacacagcacacgttaaatctgtaactgtaaagcaactaacaatgtccaattacttgagtcagcaaaaccttccatttcttcatgaacagatacagaagtagccatcagtgatataatctacattatactgacccttcttctccaatccatcaagtctctaaaaagagaagtccactttgccacagaatttacatacaacctaatacaggatcttgattgtagcacctgttaaaatacgtgaaagatctccacttcatggggtgttttgtgttttgaagagtcttcgtggatacatatttgtaaaatctacttatgatgtacatgcactgcacttgatgggttaatatgagatcactggaaatg

SEQ ID NO: 92200 - DNA, 526 bp, Zea Mays
gcaaatacaaaaggagtacgttcaaaccgaactgacagcagatacaccaaaattggagtccccagacaggaagaacggcactagaaaacctttgcccctccgacaaacttcctcaccagtccgcaagcaagccatcttcttcttccccggcctctcaaccaagcaaaggaccaacgggacaactaggcttggcatttagtacataacagggtaacgaaggcagcaccaggaagacctccaaactccggcaacagtcgaccaacaatgggcttcatccacagggggacctccaagcagatcagcaaggttaagacccttctagggcttgccttgtcccgccttaccgctgcccgccgtccccgcctcgctcgcaggtcgatttcccgcagcgatgtgggacagctgctagggctcagccacctcgatcgcgctctccaccgtgtatggccaggctatcatccctaacatcctggtagatgaagcttcatactcttcaagtgcaggcttaccaatgctgcaccctctc

SEQ ID NO: 92201 - DNA, 2312 bp, Zea Mays
gcaagtcacgtttcttctgcacaggcacagagcacagagcaccaatccggtgaccaatataagaagcaggccgccagcagttcaccgccacagcaccaaccccgacaccaccgttggcaaccgcaacccgcaaccagagccatgggcctcttcggcaagagcacctccaagcagaccgccaagctcaagtccctggtcaagctcgccgcggcgcgcctcgccgtcgtccgccggccgcgcctcggccgccggtccatcgcccgtagcgacgtcgggcagctcctctctatcggccatctcgaccgcgcgctcgtccgcgcggagcaggtgatcgaggaggacaacatgctggaggcgctggacgtcatcgagctctactgcaaaatcctcgtcgagcagaccgcgcagctggagaaacccaaggaatgcagcgaggagatcaaggaggcggctgcggggctgatgttcgcgtccgcgcggtgcggcgagctgccggagcttctggacgcgcgcgccatccttgcagacaagttcggccgagacttcgccagggcggccaaggagggcgcccacggcgtcgtcgaccccacgttggtgcggaagttgtccggcgagagggcgagcgtggagcagacgaggaggttggcgaaggagatcgccgccgagaacgacatcttgctggagttccctgagagcccagtagggattcacaaagatggtcgcacgacctcgcaggtcaacagtcagagagcaggagaggaaactaagaatgcaccggccagaacatttgtcgaggagagtgcagtcaagacgggtcgccgtgagggggagcggaattctgttaacggcaaggtgaacccgagccttgctcagctgagcctggatgagaaggtgttgagggagtccaagaagtaccccgacgcaaggatggcggcggaggcagccttcgcgtccgcgaagttcgccgcgatggccgcccgggctgccgtcgagctgtctcggtcggagtcccatgggaagggatcgacgggcggtggctacgacaaggtgccctccgtgcggacgaccgcggcaacggagcaggggacggcgccgccgctgtcgagaccgcacaagtcgccgtcgccgtcgccctcgtggagcgacaggagcacggcgacctcggtcgggtcggacgctgcacacaaggggaaggaggtcgtgttcgaccagagcgacgaggagctggatgacgtcgtctggcctccgccgcagcgccggccatcctaccggaggacggcctccacggtgggcacagtacatgcgtcggcccgtgacacgggcacgccggctgcacagctggcgcgcccgcagcacaggcgtcacgccacggagttatccgccggtaacgctcatgcgcccggcctccacgacgccctggcaggccagcgcaggcagcacgtgaccccgccgtacaggagggcctcaacggccagcacgggcagaaacagcgacgctgcggcgctggacgacggcggcgcgtacgagagctcgccgtacgtgcagccgccgtactcgaggatggcgtcggcgctggagcgcagcaacgggcacatcgcgcggcacgaggaggtgcgcaggatgggcacggacgcgcgggcgctccaggagcgggtgtacggcgcggcggcgccagggcaggggcacggcccgctggacccggagaggaggaccacctcggtgcgcacgcggagatgagcgttttcgtggcctggctggctagtggctactcgcctactcgtcattcgtcagttcagtgttcagcattgcaggagatcgggtccgttgcttcccgagcagagtggcggtttttggtgcggggtcgatggagatttcctgcctctggaaattaaatgcacatggggaaatgcacatgggtagaatcaaacagaagtatattttgctagaaattcaggattgttcatggagctgaatatggatggatacatgcatactggtgggtaggtggcccttttgtattgtactccctccgtctcaggatataaggcgtaaccactttttattcttgtcccacaatataaggcgtgctctctctatgcatacgcatatcgatgcagtggtatagagacaattaaatgcatttcttggtctttgaaccagaggtggttacgccttatatactgggacggagggagtacagaggaaggatcgagtattaattaattaagttgtactgtaattagctgcgagctgtgttttgtttcctgtagaaactgaggagttttgcttcatggtaggtgttcctaacctgc

SEQ ID NO: 92202 - DNA, 348 bp, Zea Mays
atgacggctagcaacgccatgtccatcaccggcgccgccacgcacggcacgacggggtccaatgggggcatggtggtgaggtcgagggggagccagcagattgggctccggtacggcgacggctaccggcagtcgcagactcacgcgcatgaagcgtcgtgggagggggtgtcgcgcgggggaggggtggtgggggcggacaacggttgtctcgcgaagtcgcgggcatcgcgtgggggtgacaggatggacgacgtgcggggcgaggcggggcacggtattgcacctgcttgccggccatggccgtcgtcgaggtcgtgggatcggaggtttcgtgcggtgcggtga

SEQ ID NO: 92203 - DNA, 168 bp, Zea Mays
atgggagcagatgagcagcttcaacctcgtaggagtagaaggaaccggcctagagatttacatgaagagtgggaatctgaagccgaagacactgactatgaggaagagcagattcctattgaggatgatgaagatgaaatactaggagcaaattcctttgaggattga

SEQ ID NO: 92204 - DNA, 201 bp, Zea Mays
gtacaacattgttgccatatggaggttcctcttaagaccaatgcctttctggaacagtttcgccacctgataaatagcttttggttgcccagcattaactgcatgaagcaagagattgcatgctctaattacatccctcttcacaccaatacccttaagatacaacacaccaaggttataatgtcccccagcttccttatt

SEQ ID NO: 92205 - DNA, 1022 bp, Zea Mays
tgaagagtcttaagagcattcccaatgtcgtatccgtgggaagcccaaatccatattcaacaagggtgttaccagtgggtggccaatcgccaggaaatggaatgaatgggacacctgggaaactcaagcttgagaaacttgcaatcaataagttctctccaactagcctattgaattccatcaaattgagaagagaaggtcctctttctctcatgacagagcacaaagaagcattatggagcacgtattcaccaaccacaaagcccgatacttctgttctaaataggctcattgacgctggtgtgtcaccaaggattgaggagtccatgtcagtagtcaacaatgagatattgcggcggcacttcttggagttgacgaccaacttccttgcgccttttgggccgtatctgagaactacaacaccatcagaagggacttcaccttttgttgacccaccattgctaccaccgtttcatgcagatgagttcatcaatggtttggcagctagaggtccagggaagtttttgtccaaaaggatgaggtccaattggttggacctatataggagatttctcgaaggccccaattttatgccttggttccggcaaaggcgtgctgctgcggagcaagaacagcagaggctctggaggcaggctcgcatgaatgttgacattgaaaagctaatgtcaaatatgtccgaaatagagaggattgattcttttgatgctgttgagcgttatcttctcagagagatggagaaccctggaaaaggaagtgctgattcaataggggcatgccaaaaattgaaggtagacctccaagcagcattcaatgtactgccgaaggacttgcagcaactcctgctctccaaccctaaaagagctgttcttcttcaaggtagtcaagagaaggccctgggtgccaatggcattggcacccagacaagtttgtagcagccccctctgtaacattaccattgtcactattttttgcacacataatacaaagttacacatttatat

SEQ ID NO: 92206 - DNA, 1037 bp, Zea Mays
gcaacgctcacacccacacccaccacgccggctgcaggcacgcaccacggtaccagccgccagcgcacgcccgccaagccgccagcgagaaaacaccgaaccattcgccctcccggccgacatcacgaccgcccgatccggccggagcctctccctaccccttccgcgcctccgcgctgacgaccgtcgcggcgtccgcccctcgagtccaaccccaattctgccgtggccgcggctctctgaatccccaattttttcacttcccccaagggccgcggggatgaaccggatcccgtccgtctcgctgcggggcggcggggcgaacgaggacgccgcggcggcgtcgccgccccccgatcccgcggcgctgtcgcggtgggtgcgggccttctgtgtcatccggttcgacctggagcgcgggcagctggtggaggcctgcttccctcccgacgcgctgacggcgcccggcagcggcctcgaccgcctcgtcgccttctcgtccttcccggactccatgtctcaccacctcccgcgccaccgctcctccgtccacgactcgctcttctccttccgcatccccgacccgtcctccccacgccgcgccttcctctacggcttcgttttcaaccgccagcgccaggacgagcgcctcccccgcggcggcgagcagaagtccgtagtcatcctctcccacgccccctactcctcgctcttccgcctgctgctgcagatcctcggcccgctctgctttgacgtcggcccttccgcactggccatggtggcgtcgcacgttgccgtgtggccggcgccggcgccagggcacccaatggagcttccaattggcagtgccgcgctgcgcgtgcacctcccgcctgcggctgacgatcctggcccaccgcctgcgctgctgcccgccaacccctcggtgccgtacggactcttccatgatgctgatctgtttgccgcattccgtggcttactcctccacctatggaccctctgggagctcatggtggttggtgagcccattctggttg

SEQ ID NO: 92207 - DNA, 781 bp, Zea Mays
atggagggagttttgatggagctagccgtattgaaccatgaaagagttgcattggacaagaaaaacaggatgcctatgttgttcgacgactatagtgatgaagatttttatggggtacaacggaagtatagtattgtccctcgagttgaagttaaattcctgactaaaccacgttatcgtgataggcaacattacattttgtttgacatcaatggagccaagatcgaggccattgcaactcggtatgagatagtcaaatacttcaacaatttgctccatgaaaagcatgtctacaagatgcacaatgtatggtttggtcttaatctgggtgcatttaattttcgacatctaaatggtaccatggagttgtatttcacccaacaaactgtcgtagagccatacgctgtcccagttcaaataccgccatttccaaaacatatattcttgaaccttgatgatattgccgagctgccaaacaagactttagttgacattatggctattgtagtccacttggatacaatccatcgcacaatgtggggtacattcagaaagattgttataatggatgctagcaattcaaaaggctttggtggcgcggaacgatcgtcagtttgccgttagatatcttgacgaccaaaggtgtagatagagtctgtaacttttgcaaatctcaattttatgatggaataaatgtaatgttattggtgcaacttacatgtgtcaagatttgtaaaacattttgttctactgggaaatatcaatgaataagtggaacatc

SEQ ID NO: 92208 - DNA, 387 bp, Zea Mays
cgtggcgggagtccggtggcgtgcgggatggtcgggccgtggctgctcatctccgtcctcgtccactcctccttcctcggctccactgtcttcacggccgtcgacgccgcccgcacgtcggcgttcgtggtgacgacggccccgctgccgatggctccagcgccatcacttaccgatagcgtgctcggggacagcaagaggaaagtgcccaccggcattcatggaggtttatgggtctcagtggcattgcagaaatgcagagaccccgaccttcttttccgtgaagatgacggaacactcttgtctggatatgagtgcctgcgaagcccgctcgttgcagcgcaccgccatccaaaacagtccaaagacatgttacagctacaataa

SEQ ID NO: 92209 - DNA, 129 bp, Zea Mays
atgtattttaaaacttataaatgttttatacattcaaattgtaatattttggaatcaatttcttttgtaataaactccgatgatatatattgtaatcttgttataacttgtaaaagttgtaacttgtaa

SEQ ID NO: 92210 - DNA, 1976 bp, Zea Mays
atcgtgtgacctcccccgatctggagctgaagtgcttgacgccttccgcttccacttccacggcagcacgagccttcttctccttctcgcttagcggctatagcgccagccaaaggagaagtctgcgggcgagtgcgatagatagacacagagaaaccgatagatcatcaaaaaacgagcgaaaaaatcggtccaaaccccaggccggacgcgcgttagagtctccaaagcttatccttccatccactccccgcagccagcttctcttctcgttcccggttatattaataacgcggcggcgtgctctgcttcctccggtttgctctgccctgcttcctaaacacaaacgcgctctgcaccaagaactatatacaacgtagaaactagccgcgccgtcactcccttttgtggcaacctgcagcacgcacttgctgagacaggggtagccttgctataggctagctagtgtcacttgccgaggacaagcaagcaggccggggagacatggcactgacagtgttcgagaccaccgagcagcagctcctcccgtgccagcaggccgtcgagcagggcgctgggcgatggcggggccgccgctgcgggcgccgagaaggctaccgtcacgctgaaggagacggaccgcggcggcgacgacgaccggccggagagggacgacatatggaacatgattcaggcgcagaagccgccgccgcccgccgcgcccaggcaggcgccgtacgtgcacccgctcgtgcgccgctcgtccagcctgctcacccagaagagcctggagatctgcaccgagagcctgggctcggagaccggctcggacggcttctccgacgccgacggctccgcgaccgagcactcgtgccagggctccgacgacgagcgcggggagggggaggaggaggaggaggaggtggtggcccaacgcgcggccccgcccagggcgttcccgccgccgctgccgtccctggcgcggcgcaaggtggagtctaccatggagatgaggcagaagcgccaggacggccgcctgctcgtcaaggtcgtgcccgtggcgtcgtccaccctgttccgcgcgcagcgccgcggcggccgccttctcctgtcgttcgcggacacggccgcccccgcgcccgcgcccgcctcggatgagccggagaccgagcagcaggccgacgaggaggacgacgaggaggacgaggtcgaggtcgtggacaggggcaccgtggtggaggtgaaggtgagcgcgcagccgcaggcgcgcagcgggaggggcccgcgggtgcaccgctccgcgctcgtcatcaacaagttcgtgggcgccgagccggtcacctcctgcgagatcgacggcgacggcgacggcgccacggctccgcagcacccggtggccaggcgctccactgggtccaccaccacagcggtcgcggccctggcagcggcctcggcgctgagcgcggccgcagcgccgccggacagtggcgacgacgccgtccccggcgccacgtgcggcgagaacaagctcctgatgacggcgaagcggcacagcagcaaggaggagctgatgaagcacatgcgccggtgcagcggccagctcagcccgtcgcttttcgtctgggaggggtgcatcgcaacctcctcctgaacgccgcaccgcagcccagtccacgcgcccgccatcgcccatccgttccgttccatgcatgctttcgacctgctgctgtttgtttgctctgttggttttgtaacgttcgtaacgtagtgctgtcgttgttgctcgcaagtgatgatcgtcacgtcacgtgattggcttagctgtgtgtgtgagagaggtgagggagggacagagagctagcactattggtttggcatgccaccttgtgcgtgccctgcttattgcatctactactctaccaccattttacatttgcatttgcacgctgctgctgctgctgcttctagtgaccgtt

SEQ ID NO: 92211 - DNA, 3064 bp, Zea Mays
tttttttttgtttgatgattgttcttgcagaatatactatttgacacattgccactggctaatgttgtgaacttgtgaccatatgtgtgtacattccgtaggtaaaaatgtttcgggattttgttcccagtatcttgaatatatcaagacagtgtcttgctaatggagaagaagatgttgcttccattgcgtttgaaatttttgacgaactaattgaatctcctgcaccacttcttggagactctgtgaggtcaattgtgcaattctcgctggaagtttctgcaaaccaggatttggaaataaatataaggcaacaggctatccagataatttcatggctggtaaaatttaaagcatctttcttgaaaaagcacaagctggttgtacctatcctgcaagttatgtgcccattgcttacggaaacagctaatgaagatgaagattctgatctagcagcagatcgttctgctgccgaggtcattgatacaatggctatcaacttaccaaggcacgttcttgcaccagttcttgagtttgcttctctgagctttcatcacattaatccaaagtatcgtgaggctgctgtgacgtcacttggtgttatctccgagggttgttgtgaacatttgaaagataagttggaggattgtctgaaaattgttttggaagctttaaaagaccaagaacaaatggttagaggtgctgcatcttttgcacttggtcagtttgctgaacacttgcaaccagaaattttatctcattatgcgagtgtacttccatgcattctaaatgctcttgaagacccatcagatgaagttaaggagaagtcatattatgctcttgcagcattctgtgaggacatgggtgaagatatcctaccgtatctagagcccttgatatgcagattggttatgtctttgcagagcagtcctcggaacttgcaggagacatgcatgtctgcaattggttcagtggctgctgctgcggagcaggcttttaccccatatgccgaaaaagtccttgagatgatgaaaggttttatggtgctaattaatgacgaagatctgtgtgcacgtgctagggctactgaagttgttgggatagtagcaatggcagttggcagagcaagaattgaagcaatattgcctccttttattgaggcttctatttctggttttggattggattacagtgaactcagagagtacactcatggtttctttagtaacgttgctgaaattttgggtgatagttttacacagtatcttcctcatgttgtccctctcgtattttcttcctgcaacttggatgatggttctgctgtggacattgatgatgccgatagcattgaaaatggatttggcggtgtttcatctgatgacgatgttaatgatgaaccaagagttagaaatatcagtgtgaggactggagtattagatgagaaagctgctgcaacacaggctattggttttttcgcactacacacgaagagtgcctatgctccgtatctggaggagtcactgaagattttgatccggcacagtggttatttccatgaagatgtcaggctgcaggcagtcatatctttgaaacatattctaactgcagttagggcaatacctcctgcacatgctgatgtactagagaaacagaaggatgtccttgatactgttctgaacatctacatcaagactatgacagaggatgacgataaagaggtagttgcacaagcttgcatgagtgtagcagacattgtgaaggactgtggttttgctgcaattgagccttacatgctgaggcttgctgaggtaacactggtccttttacgccaagaatcaagctgtcagcaagtagagtcagatggtgaggatgatggcgacattgaccatgatgaagtcctcatggatgcagtttcagatcttttgcctgcttttgcaaaagtgatgggatcttattttgatcccatatttgcaaaattatttgatccgttgatgaaatttgctaaatctccccatcctccccaagataagactatggttgttgcaaccttagctgaggttgctcaggaaatgggtgctccaatatctgcttatgttgataagataatgcctttggtgttgaaagagcttgcatcatctgatgctactaataggagaaatgctgctttctgtgctggcgagatatgcaagaatgggggtgctgcagcactgaaatactatggtgatatacttcgttctctgcataatttgtttagtaactcagaatcagatgatgcagtaagagataacgctgctggtgctattgctaggatgataatggtgcagcctcagtcgattcctctcaaccaggttcttccagtttttatcaaagctttgccactaaaagaagatcatgaagaatcaatgactgtctatggttgcgtctgcggtttattattatcatcacatccccagatcctccctctggtgcctgacgtcatacatgtctttgcccaagtggtggtatccccagatgagagcgatgaagtgaaaacaaatattggcaaggctatttctcacttgatatctgtctatggccagcaaatgcagccaatactgagtgcccttccaccagcccatgcaaacgcgctggcttcatttgcgagtagaagatgaccttggaggaccagcttttctttggttccttgttctgcttgattttgttttggttttgtcgacgattgccattttctgaggatctggtcacatggatcaggccagatgggagtgcttgcattgcacattggcaagggcgagcggagttgtcaggttggcgcatgattgattatatggtgagcttggtttctctttgagatacatagttgtgcttgctttggagccctgtacggttatgagtgcctgcctgtattcaggttccggatttggttatttatgctcttgttttttatatttttttgcctgtatttgcaattcattgattgctgttgtatatagaagagagttttaaatagagagaatgtacgactctgcaactggcaaattttgtatacatactgctcatacca

SEQ ID NO: 92212 - DNA, 3394 bp, Zea Mays
tttttttttgtttgatgattgttcttgcagaatatactatttgacacattgccactggctaatgttgtgaacttgtgaccatatgtgtgtacattccgtaggtaaaaatgtttcgggattttgttcccagtatcttgaatatatcaagacagtgtcttgctaatggagaagaagatgttgcttccattgcgtttgaaatttttgacgaactaattgaatctcctgcaccacttcttggagactctgtgaggtcaattgtgcaattctcgctggaagtttctgcaaaccaggatttggaaataaatataaggcaacaggctatccagataatttcatggctggtaaaatttaaagcatctttcttgaaaaagcacaagctggttgtacctatcctgcaagttatgtgcccattgcttacggaaacagctaatgaagatgaagattctgatctagcagcagatcgttctgctgccgaggtcattgatacaatggctatcaacttaccaaggcacgttcttgcaccagttcttgagtttgcttctctgagctttcatcacattaatccaaagtatcgtgaggctgctgtgacgtcacttggtgttatctccgagggttgttgtgaacatttgaaagataagttggaggattgtctgaaaattgttttggaagctttaaaagaccaagaacaaatggttagaggtgctgcatcttttgcacttggtcagtttgctgaacacttgcaaccagaaattttatctcattatgcgagtgtacttccatgcattctaaatgctcttgaagacccatcagatgaagttaaggagaagtcatattatgctcttgcagcattctgtgaggacatgggtgaagatatcctaccgtatctagagcccttgatatgcagattggttatgtctttgcagagcagtcctcggaacttgcaggagacatgcatgtctgcaattggttcagtggctgctgctgcggagcaggcttttaccccatatgccgaaaaagtccttgagatgatgaaaggttttatggtgctaattaatgacgaagatctgtgtgcacgtgctagggctactgaagttgttgggatagtagcaatggcagttggcagagcaagaattgaagcaatattgcctccttttattgaggcttctatttctggttttggattggattacagtgaactcagagagtacactcatggtttctttagtaacgttgctgaaattttgggtgatagttttacacagtatcttcctcatgttgtccctctcgtattttcttcctgcaacttggatgatggttctgctgtggacattgatgatgccgatagcattgaaaatggatttggcggtgtttcatctgatgacgatgttaatgatgaaccaagagttagaaatatcagtgtgaggactggagtattagatgagaaagctgctgcaacacaggctattggttttttcgcactacacacgaagagtgcctatgctccgtatcctttagggcgtctccagcagttcatccatatggtcatcgaaaacactgttttgcactgttcgtagagtaaagtttaaatatgaggatgagtaagctgctggagagtttaagaaatgctaagctgctctagtcacagtttcacctttccaaatttccttgactgacactaggtatctggaggagtcactgaagattttgatccggcacagtggttatttccatgaagatgtcaggctgcaggcagtcatatctttgaaacatattctaactgcagttagggcaatacctcctgcacatgctgatgtactagagaaacagaaggatgtccttgatactgttctgaacatctacatcaagactatgacagaggatgacgataaagaggtagttgcacaagcttgcatgagtgtagcagacattgtgaaggactgtggttttgctgcaattgagccttacatgctgaggcttgctgaggtaacactggtccttttacgccaagaatcaagctgtcagcaagtagagtcagatggtgaggatgatggcgacattgaccatgatgaagtcctcatggatgcagtttcagatcttttgcctgcttttgcaaaagtgatgggatcttattttgatcccatatttgcaaaattatttgatccgttgatgaaatttgctgtatgttaccctcttaccctatctctttgcacatattccatagtcctgtttgctcgacacctattggttaattaattcaataaaagttctatattttttaaacacatggttgtcttgtgttttgcttttgaaactacttcctggaataaatgcagaaatctccccatcctccccaagataagactatggttgttgcaaccttagctgaggttgctcaggaaatgggtgctccaatatctgcttatgttgataagataatgcctttggtgttgaaagagcttgcatcatctgatgctactaataggagaaatgctgctttctgtgctggcgagatatgcaagaatgggggtgctgcagcactgaaatactatggtgatatacttcgttctctgcataatttgtttagtaactcagaatcagatgatgcagtaagagataacgctgctggtgctattgctaggatgataatggtgcagcctcagtcgattcctctcaaccaggttcttccagtttttatcaaagctttgccactaaaagaagatcatgaagaatcaatgactgtctatggttgcgtctgcggtttattattatcatcacatccccagatcctccctctggtgcctgacgtcatacatgtctttgcccaagtggtggtatccccagatgagagcgatgaagtgaaaacaaatattggcaaggctatttctcacttgatatctgtctatggccagcaaatgcagccaatactgagtgcccttccaccagcccatgcaaacgcgctggcttcatttgcgagtagaagatgaccttggaggaccagcttttctttggttccttgttctgcttgattttgttttggttttgtcgacgattgccattttctgaggatctggtcacatggatcaggccagatgggagtgcttgcattgcacattggcaagggcgagcggagttgtcaggttggcgcatgattgattatatggtgagcttggtttctctttgagatacatagttgtgcttgctttggagccctgtacggttatgagtgcctgcctgtattcaggttccggatttggttatttatgctcttgttttttatatttttttgcctgtatttgcaattcattgattgctgttgtatatagaagagagttttaaatagagagaatgtacgactctgcaactggcaaattttgtatacatactgctcatacca

SEQ ID NO: 92213 - DNA, 3667 bp, Zea Mays
cgccgccaccagagccccgagccacgacgcctccaaatcgatagggttttcgctgccccgctagcccgccgcctcctcctccgccagcgcgcccggtcgcagtaaaaggaggccaccaggcggcgaccagaataagcttcaggcgggaggaatggcgcagtcgctggagctgctgctgatccagtttttgatgccggataacgacgcacgtcggcaggcggaggagcagatccggcggctggcccgtgacccgcaggtggtccccgcgctcgtccaccatctccgtacggccaagacccccaacgtccgccagctcgccgcggtgctactccgcaagaagatcacctcccactggcccaagcttcccgcggactccaaggcatcgcttaaacaagccctcatcgattcaatcacactcgaccacagtcatcctgtaaggcgagctagtgcaaatgtcgtcagcattatagctaagtatgctatccctgcaggagagtggccagagctgttacctttccttttccaatgcagccaaagtccacaagaagatcatagagaagtggctttgattcttttcagctcccttactgaaactattggagctacttttcagtctcatctgaacaatttgcaacctattttactgaaatgtctgcaagacgaaactagctctcgagtcagaattgcagccctaaaggctgttggatcattcatagaatatgtcaatgatggaggtgacattccctatcaagcaaaggaacccttagatcgtgatatgacgagtaggttaaaaggtcttcaatttgtgcctctctgcaactacttttggagtcttgtaaagcatactctgaatgcttttgagtttgaggttttggtggagcagacaccaacaaaaaggtgttccaaccctgcacatacacccattcaccacataaaacatcaagtaaagcagcaacaaaccaacaaatgtgactgtagcggggtaagcgagggagcaacaaagttcaccttcagaggaggaggaactcgtcttcaagaggcccacggatcggaggtctggagcagctgccggactggattggaggaggggcgaagtggaagagtcagaggcagactagaggaggctcgtcgtaagggaaaggagggacaagaggaggtaaaaatgtttcgggattttgttcccagtatcttgaatatatcaagacagtgtcttgctaatggagaagaagatgttgcttccattgcgtttgaaatttttgacgaactaattgaatctcctgcaccacttcttggagactctgtgaggtcaattgtgcaattctcgctggaagtttctgcaaaccaggatttggaaataaatataaggcaacaggctatccagataatttcatggctggtaaaatttaaagcatctttcttgaaaaagcacaagctggttgtacctatcctgcaagttatgtgcccattgcttacggaaacagctaatgaagatgaagattctgatctagcagcagatcgttctgctgccgaggtcattgatacaatggctatcaacttaccaaggcacgttcttgcaccagttcttgagtttgcttctctgagctttcatcacattaatccaaagtatcgtgaggctgctgtgacgtcacttggtgttatctccgagggttgttgtgaacatttgaaagataagttggaggattgtctgaaaattgttttggaagctttaaaagaccaagaacaaatggttagaggtgctgcatcttttgcacttggtcagtttgctgaacacttgcaaccagaaattttatctcattatgcgagtgtacttccatgcattctaaatgctcttgaagacccatcagatgaagttaaggagaagtcatattatgctcttgcagcattctgtgaggacatgggtgaagatatcctaccgtatctagagcccttgatatgcagattggttatgtctttgcagagcagtcctcggaacttgcaggagacatgcatgtctgcaattggttcagtggctgctgctgcggagcaggcttttaccccatatgccgaaaaagtccttgagatgatgaaaggttttatggtgctaattaatgacgaagatctgtgtgcacgtgctagggctactgaagttgttgggatagtagcaatggcagttggcagagcaagaattgaagcaatattgcctccttttattgaggcttctatttctggttttggattggattacagtgaactcagagagtacactcatggtttctttagtaacgttgctgaaattttgggtgatagttttacacagtatcttcctcatgttgtccctctcgtattttcttcctgcaacttggatgatggttctgctgtggacattgatgatgccgatagcattgaaaatggatttggcggtgtttcatctgatgacgatgttaatgatgaaccaagagttagaaatatcagtgtgaggactggagtattagatgagaaagctgctgcaacacaggctattggttttttcgcactacacacgaagagtgcctatgctccgtatcctttagggcgtctccagcagttcatccatatggaaaacaatagaagtgctactccaacaatattttgcataaaatccagaatggatgtactagagaaacagaaggatgtccttgatactgttctgaacatctacatcaagactatgacagaggatgacgataaagaggtagttgcacaagcttgcatgagtgtagcagacattgtgaaggactgtggttttgctgcaattgagccttacatgctgaggcttgctgaggtaacactggtccttttacgccaagaatcaagctgtcagcaagtagagtcagatggtgaggatgatggcgacattgaccatgatgaagtcctcatggatgcagtttcagatcttttgcctgcttttgcaaaagtgatgggatcttattttgatcccatatttgcaaaattatttgatccgttgatgaaatttgctaaatctccccatcctccccaagataagactatggttgttgcaaccttagctgaggttgctcaggaaatgggtgctccaatatctgcttatgttgataagataatgcctttggtgttgaaagagcttgcatcatctgatgctactaataggagaaatgctgctttctgtgctggcgagatatgcaagaatgggggtgctgcagcactgaaatactatggtgatatacttcgttctctgcataatttgtttagtaactcagaatcagatgatgcagtaagagataacgctgctggtgctattgctaggatgataatggtgcagcctcagtcgattcctctcaaccaggttcttccagtttttatcaaagctttgccactaaaagaagatcatgaagaatcaatgactgtctatggttgcgtctgcggtttattattatcatcacatccccagatcctccctctggtgcctgacgtcatacatgtctttgcccaagtggtggtatccccagatgagagcgatgaagtgaaaacaaatattggcaaggctatttctcacttgatatctgtctatggccagcaaatgcagccaatactgagtgcccttccaccagcccatgcaaacgcgctggcttcatttgcgagtagaagatga

SEQ ID NO: 92214 - DNA, 2327 bp, Zea Mays
ccacctcacccaccgaaaaacccaaaagcctcagccgcggccacttacaaaaaaaaaaacttccccccgcttgccgcttgccgtctccccgcgtccccaagccgagctctcggcctctcgctttcggtgttctcccctcgatcctcgcccctgcgttctccagggcgcccatgagctgaggccgccaccgatgggcccgcccttctcagcgcaggaccccgcgccgtcgccgtcgggcggctccggctccggatcatccaggcgccgcctccgccggctcgaccgccgcaacgcgtccaagaacatcagctacaacgccaccaactactgccagtacccgccgtccccgcaggtcgcctccgcgccggggtccgggcgggcctcgctcgccggctcccttgcctgctccatcgacgtcgtcaacagctttcgcatcggcggcaacggcgacgggggcagggaccttcgcttcctgtgcgaaagtctcggcctctccggacccgacgacttcgccatcccgctggccgactgggaggcgcacaaggccgttcgatcctccacctccgcttcgggctcccccaactccgcacgcaccaaccacgactcccctcagcgggactcgcctttctgtcaggtgggtgccgaggagcccgcccaggctgcggacgccgacccggagctactggccggaacgggaagggacggcccaatcgaagctccggagcggccggcacgcctggatccgccgcccgagtccacctttcccgatgtgaggagggcagttggggagggaggaatcaagggggtgcgcccgccgccggtgctcaagccgccgccttcgatggcgctaccagctgtctgcggcgtgggatccacgtgggatatcttgcggtccttcgcgccggatgagaaagaggacgctcccgcgagcagaactgtccgtcgttttggacaccgggctgcagaggagaaggatgacgacgaggatggggcggtattgttaatgttggacgatctcaggctggaggagtcgtccgagggctttactggcacttcttcactatcaacaaccaacgatgacgagacctcaagcaccaccactgaatccatgttctatatctcaccgaacgggaggtttaggaggaggatccggtcatggaaccgagggatgctcctgggtagtggctcgtttgggacagtctacgagggcatcagcgatgagggtgtcttctttgctgtcaaagaagtgaacttatttgataaagggagcaatgcgaagcagtgtatctttcagcttgagcaggaaattgcacttctgagccagtttgagcatgagaatatagtgcagtactatggaacagacaaagaagattcaaaactttacatcttccttgaattactgacccaaggatcccttgcattactgtatcagaggtatcgcctgcgagatactcatgtctctgcatatacaagacagatccttaatgggttgatttacctccatgaaaagaacattgttcatagagacattaaatgcgcaaatattctggtgcatgccaatggatctgtgaaacttgcagattttggactcgctaaggagatcaccaaattcaatgcagttaaatcatgcaaaggaactgtttattggatggcacctgaggttgtcaatccaaagaagacgtatggacctgcagctgacatatggagtcttggttgcactgtcctagagatgttgacgcgccaaataccctatcctggcctcgaatggacacaagctctatacaggattggtaagggggaatcgccagcaattccaagttctctttcgaaggatgctcgtgattttataagtcagtgcgtaaaacccaatccagaagacagaccatcagcaatcaaactgttggagcatccatttgtaaacaagccaataagatcagtatggtctttgaggacatcttcacgctcgaattcatctacacgtggcatcaattaatgggtcgttgatcatctattggacattggaagaatgatgttggtccgcgcaaatcatgcggacctggccgaaagggagggttgttttgcccggagctagtattgtcaacgctcagcagcattgtcgtcaacctcttagtgtttcattagttgattctttggcatacgttcgcgaggaagatgtcctcgttgagccgccggctaatattcatattcttctgcctggatagggaatagtgaacgtgcatttgagtgcatgagttgtagagtgagaacgggctgtgtaaaacagactgtcctgatgccaatgatatggaaaaaagaaagaaagaaag

SEQ ID NO: 92215 - DNA, 2262 bp, Zea Mays
ccacctcacccaccgaaaaacccaaaagcctcagccgcggccacttacaaaaaaaaaaacttccccccgcttgccgcttgccgtctccccgcgtccccaagccgagctctcggcctctcgctttcggtgttctcccctcgatcctcgcccctgcgttctccagggcgcccatgagctgaggccgccaccgatgggcccgcccttctcagcgcaggaccccgcgccgtcgccgtcgggcggctccggctccggatcatccaggcgccgcctccgccggctcgaccgccgcaacgcgtccaagaacatcagctacaacgccaccaactactgccagtacccgccgtccccgcaggtcgcctccgcgccggggtccgggcgggcctcgctcgccggctcccttgcctgctccatcgacgtcgtcaacagctttcgcatcggcggcaacggcgacgggggcagggaccttcgcttcctgtgcgaaagtctcggcctctccggacccgacgacttcgccatcccgctggccgactgggaggcgcacaaggccgttcgatcctccacctccgcttcgggctcccccaactccgcacgcaccaaccacgactcccctcagcgggactcgcctttctgtcaggtgggtgccgaggagcccgcccaggctgcggacgccgacccggagctactggccggaacgggaagggacggcccaatcgaagctccggagcggccggcacgcctggatccgccgcccgagtccacctttcccgatgtgaggagggcagttggggagggaggaatcaagggggtgcgcccgccgccggtgctcaagccgccgccttcgatggcgctaccagctgtctgcggcgtgggatccacgtgggatatcttgcggtccttcgcgccggatgagaaagaggacgctcccgcgagcagaactgtccgtcgttttggacaccgggctgcagaggagaaggatgacgacgaggatggggcggtattgttaatgttggacgatctcaggctggaggagtcgtccgagggctttactggcacttcttcactatcaacaaccaacgatgacgagacctcaagcaccaccactgaatccatgttctatatctcaccgaacgggaggtttaggaggaggatccggtcatggaaccgagggatgctcctgggtagtggctcgtttgggacagtctacgagggcatcagcgatgagggtgtcttctttgctgtcaaagaagtgaacttatttgataaagggagcaatgcgaagcagtgtatctttcagcttgagcaggaaattgcacttctgagccagtttgagcatgagaatatagtgcagtactatggaacagacaaagaagattcaaaactttacatcttccttgaattactgacccaaggatcccttgcattactgtatcagaggtatcgcctgcgagatactcatgtctctgcatatacaagacagatccttaatgggttgatttacctccatgaaacttgcagattttggactcgctaaggagatcaccaaattcaatgcagttaaatcatgcaaaggaactgtttattggatggcacctgaggttgtcaatccaaagaagacgtatggacctgcagctgacatatggagtcttggttgcactgtcctagagatgttgacgcgccaaataccctatcctggcctcgaatggacacaagctctatacaggattggtaagggggaatcgccagcaattccaagttctctttcgaaggatgctcgtgattttataagtcagtgcgtaaaacccaatccagaagacagaccatcagcaatcaaactgttggagcatccatttgtaaacaagccaataagatcagtatggtctttgaggacatcttcacgctcgaattcatctacacgtggcatcaattaatgggtcgttgatcatctattggacattggaagaatgatgttggtccgcgcaaatcatgcggacctggccgaaagggagggttgttttgcccggagctagtattgtcaacgctcagcagcattgtcgtcaacctcttagtgtttcattagttgattctttggcatacgttcgcgaggaagatgtcctcgttgagccgccggctaatattcatattcttctgcctggatagggaatagtgaacgtgcatttgagtgcatgagttgtagagtgagaacgggctgtgtaaaacagactgtcctgatgccaatgatatggaaaaaagaaagaaagaaag

SEQ ID NO: 92216 - DNA, 993 bp, Zea Mays
cttacactctccttttgtcaccttctcttcgttcccctcctcggctcctcgcgatccttctttactgcccgagagttctgactagccacatccagtcaagcagtaaaggcgcaccatggaggcggcggcggagaataaggaggccgagcaggagcagcagcagctaccgcacgcgcggaaggataacgcgcccgccgccgccgaggaagacgaagcggattcggaggagaccgagcgccgcaaccgcgacctcaagtccggccttcacccccttaggcacaaactcgtgctctggtacactcgccggacgcctggagcgaggtcgcagtcgtacgaggacaacatcaagaagatcatcgatttcagcacagtcgaatcgttctgggtttgctactgccaccttgcgcgcccttcttccctgccgagccccactgaccttcatctcttcaaggatggcatccgtcccctctgggaggatcctgcaaaccagaatggtggcaagtggataattagattcaaaaaggcagtttcaggtcgattttgggaggatttggtgctagtggtagtaggcgaccaacttgagtatagcgatgatgtctgtggtgttgtgcttagtgtccgtttcaatgaagacattctgagcgtctggaaccggaacgcatcagaccatcaggctgtgatggcattgagggattctataaagaggcacctcaagctgccacacagctatctgatggagtacaaaccccatgatgcttcgcggcgtgacaactcgtcctacaggaacacatggctgagaggatagataagccctatgatactcgccagcttcactgcgatggttctgaagcaaagagactcgtttatgtaccaagaacgcagactattatgcaatgtactactactcaaaagcccctacaatgtgacgcgcaacaattttactatctaatgtgtttttttttttgcaaaagcattgaaacaaagaatgaaaaa

SEQ ID NO: 92217 - DNA, 1097 bp, Zea Mays
cttacactctccttttgtcaccttctcttcgttcccctcctcggctcctcgcgatccttctttactgcccgagagttctgactagccacatccagtcaagcagtaaaggcgcaccatggaggcggcggcggagaataaggaggccgagcaggagcagcagcagctaccgcacgcgcggaaggataacgcgcccgccgccgccgaggaagacgaagcggattcggaggagaccgagcgccgcaaccgcgacctcaagtccggccttcacccccttaggcacaaactcgtgctctggtacactcgccggacgcctggagcgaggtcgcagtcgtacgaggacaacatcaagaagatcatcgatttcagcacagtcgaatcgttctgggtttgctactgccaccttgcgcgcccttcttccctgccgagccccactgaccttcatctcttcaaggatggcatccgtcccctctgggaggatcctgcaaaccagaatggtggcaagtggataattagattcaaaaaggcagtttcaggtcgattttgggaggatttggtgctagtggtagtaggcgaccaacttgagtatagcgatgatgtctgtggtgttgtgcttagtgtccgtttcaatgaagacattctgagcgtctggaaccggaacgcatcagaccatcaggctgtgatggcattgagggattctataaagaggcacctcaagctgccacacagctatctgatggagtacaaaccccatgatgcttcgcggcgtgacaactcgtcctacaggaacacatggctgagaggatagataagccctatgatactcgccagcttcactgcgatggttctgaagcaaagagactcgtttatgtaccaagaacgcagactattatgcaatgtactactactcaaaagcccctacaatgtgacgcgcaacaattttactatctaatgtgtttttttttttgcaaaagcattgaagtggatatttagggtttccgtctgtctttggtaaccaggatattacgttgatctcgttggaagcgagttcagtttgaagcgagtgagatgacgttggcctgtatgagcagtatattggt

SEQ ID NO: 92218 - DNA, 465 bp, Zea Mays
atgaacaaaaagcagaacaacaaactaaggagtatgaaaaaccatgctcagatttattttgagctttctacaagctatagcaacggtcgctacactgatttagagacatttgtcgaatcaaattcagcagcatttcaatctgacaacaacctagggttggtgaagcaagtgctctcatcgatgtacaaacggaacatccaaaggctgacccagacttacttaactctttcacttgaagatattgctaggtctgttcaacttgaaacatcaggggatgttgaaatgcatgtacttcgcatgagcaatagggcgtgcaccatcaagtggttcagcatcaagggcaacggcagctgcaacgtgtgcagccaagaggcggtggctctggcacaggcgcagggcactcaagctgacagtggtggtggcgatcctaccgccctgtcggaggaggatagatcgccacactga

SEQ ID NO: 92219 - DNA, 107 bp, Zea Mays
gcgagaaactctcactccccttctctcgcattattaaaaggagaaactctcactccccttctctcacattaaaaggagaaagtagctgttttgtcaaatgatttatt

SEQ ID NO: 92220 - DNA, 1317 bp, Zea Mays
cacccaccgcccccaccgcctatttccccccactcgtggcaacctctgctctggccccccaaaccccacacacttcgcctcgccaaactttcccctcggcctccgcccgcacttccaccaccgctgcaccgcaccacacctcgcagatgccccagtaggctccaaaaatccaaagccatctctccccaggcggcctcccatccatctccgggagatggcggccggcaccgtgacggcccgatccaacggcgagggccacggccacggcggcgcggggtcctggtacccgcagcgccgcccgcactacgggtacggcggggggtccgcctccttccgcggctgctgctgctgcctcttcctgctgctcaccttcctggcgctcctcgccctggccatcgcgctcgtcgtcgtgctcgtggtgaagccccgcaagccgcagttcgacctcgaccaggtgtccgtgcagtacctcctcgtggcctcgccgacgtccccggccggcctgccccccgcgaccccgggcgccgcctacatctccctcaacatcacgctgctcttcaccgcccagaaccccaacaaggtgggcatccggtacggcgccaccaagttcgacgtcatgtaccacggggtgccgctcggggtggcggcggtgcccgggttcgagcagcccgcgcacagcacccgcctgctccagacccgcgtcattgtcgaccgcttcaacgtgctccaggccgacgcgcaggacctcatccgcgacgccgcgatcaacgaccgcgtcgagctccgcatcaccggcgacgtcggcgcgaagatcctcgtgctcggcttctcctccccaaaagtgcaggtgtcggtggattgcgcaatcgccatcagcccgaggagccagtcgctgaaatacaagcagtgtggcgtggacgggataagcgtgtagtgtaggaaccccaagccgccgccgccgccgcagaagctgtattgcagtggagaagtgggtggatctgtgcgtcgattctaatttccctaatttgtggggtttgatttccttcttgtgcttaggtggtaaattttgagcacttacttttggaggaggccactgattctgtgaattattgctgcttgcaatcagcaatcagtaggtatcagtatgaccacggttatacatccatcgatcgccgtgaacaattgcttaggagctaagggaagtggtgggcgtcggttcgtctgtggttgtcttgtttcgtttcgtttcggagttgtgggtctgcgctgtctgccatgtccttgtctggcggctaatcttgttcacttcatcagttc

SEQ ID NO: 92221 - DNA, 1355 bp, Zea Mays
cacccaccgcccccaccgcctatttccccccactcgtggcaacctctgctctggccccccaaaccccacacacttcgcctcgccaaactttcccctcggcctccgcccgcacttccaccaccgctgcaccgcaccacacctcgcagatgccccagtaggctccaaaaatccaaagccatctctccccaggcggcctcccatccatctccgggagatggcggccggcaccgtgacggcccgatccaacggcgagggccacggccacggcggcgcggggtcctggtacccgcagcgccgcccgcactacgggtacggcggggggtccgcctccttccgcggctgctgctgctgcctcttcctgctgctcaccttcctggcgctcctcgccctggccatcgcgctcgtcgtcgtgctcgtggtgaagccccgcaagccgcagttcgacctcgaccaggtgtccgtgcagtacctcctcgtggcctcgccgacgtccccggccggcctgccccccgcgaccccgggcgccgcctacatctccctcaacatcacgctgctcttcaccgcccagaaccccaacaaggtgggcatccggtacggcgccaccaagttcgacgtcatgtaccacggggtgccgctcggggtggcggcggtgcccgggttcgagcagcccgcgcacagcacccgcctgctccagacccgcgtcattgtcgaccgcttcaacgtgctccaggccgacgcgcaggacctcatccgcgacgccgcgatcaacgaccgcgtcgagctccgcatcaccggcgacgtcggcgcgaagatcctcgtgctcggcttctcctccccaaaagtgcaggtacgaatcgacacgccacccgcaacggggaccaacaacatccgttcgcttccgccgcaagtgtttttgccctacactaaaaacactcttccgcgggcgaaactgacgtaatgtgtgaacgagccccaatctgcaggtgtcggtggattgcgcaatcgccatcagcccgaggagccagtcgctgaaatacaagcagtgtggcgtggacgggataagcgtgtagtgtaggaaccccaagccgccgccgccgccgcagaagctgtattgcagtggagaagtgggtggatctgtgcgtcgattctaatttccctaatttgtggggtttgatttccttcttgtgcttaggtggtaaattttgagcacttacttttggaggaggccactgattctgtgaattattgctgcttgcaatcagcaatcagtaggtatcagtatgaccacggttatacatccatcgatcgccgtgaacaattgcttaggagctaagggaagtggtgggcgtcggttc

SEQ ID NO: 92222 - DNA, 1005 bp, Zea Mays
atggacgtttcgtgctcctctctctcctacgccgccggctcactgccgcctcttctcactcccacgtcatgcccactgccgcacacctgcctcctccagatctcgccgcgacctacatccccggcgtcgcggccggctccactagcccaggccttcgaccatcgtcttcctccgccgcgcactccatctcgccatgtcgcccgtatgggcgtatggaccgagcactttcttttcctcctgtctccgctcggccaccttcgccgctgcttcgctccatccgcgccaaccccagaaccacccctcgcgtgcctggccttctgcactgctctgtccaccgacccaccaccacctcctcctactaaggttagggcactcgtcgcaggccccgttgcgctcggctcagtgcggaggccgtcgcgggccgtcgttatgtgccttcgccgccgcgcgatccaaatgctcctggacgtctccttcgcctacgcgctggatgtattgttcctcgaatcgccctcgttaagtccgggaaggccgaggtggatcccacggttgagcctcgccgatgcgcaggtagccgatgtggttcatggggaactaggtcttaattttgtgctggaacagaatacccttaagtccatagagatagagctaacagaagagatggcgcctaacttgctgcagaccgatatggttatgcagtttggtctgctagtattccaggtgttgaattttggagatcagggcaaaattcaggaagccatggttcaaatgcatataagagaagaagagactgtgatctgtatctatggacagaaccttgatttcgtgttggtggaagttagtcttaacaatatggtaccagagacttcgacaaactatgatttgttaaatcacatactgaatgaacttagagtccctcttatcgcaatatgttcttatgacgatgaagttgcgctttctaaatatatgaacctggccacctgggtgcatgcttccatgtgctga

SEQ ID NO: 92223 - DNA, 1333 bp, Zea Mays
tttagaaagactgataataaaaaagctcaaccaaagggcctttattgttgtgggcgtacgcgaccagtgaggtgcggttggccagccagcggcgagccaaaccgagcgtacgccatggatcgcgagtggggctccaagcccggcagcggcggtgccgcctccgcccagaatgaggctattgaccggcgggagcgtctccgccgcctggccctcgagaccatcgacctcgccaaggatccctatttcatgcgcaaccacctcggcagctatgagtgcaagctgtgcctgacgctgcacaacaacgaggggaactacctagcccacacgcaagggaagaggcaccagaccaacctcgccaagcgcgccgcccgagaggccaaggatgcgcccgcgcagccccagcccaacaagcgcaagcttgccccccgcaagtctgttaagattggcagacccgggtataaagtaaccaaacaatatgatcctgagacgaagcaacactcgtttctctttgagattggttaccctgaaattgaagataattgcaagccaaggcaccgcttcatgtcatcatatgaacagaaagtccaaagttgggataagaggtatcaatacctactttttgctgcagacccctatgaaatcattgcattcaagataccaagtacagagattgacaaatcagcgagcaaattcttctcttactgggatcctgacaagaaggaatacctgctgcaattgtacttcaagccaaggccgccagaaggtagtaaaccaccaccagctcctcctggaactttgcctaatgggactggggctcctggtgctccaccaaggccaccggggcaagctcccccaccacccccgccacaaattccaccgccccctcctgcacctatgggaatgccccctaggattcctccaccacctattggggctgttcaacctccgccacctccagcacgagtggcaaatggtctgcggccaatgattccaccgccacctaacttcactcccggagcacccccaccgcgccctccaatgcaaggctttcctgggcaacagcagtagttgactgcttagcaggcaatgttccagtaattggcagtcagtaaaagtttcaagcttgtgttgactattgtttttcggcttaaaactttgtatgttgtctgggactatactcaaacggcagcttgttggatttttttgtatccacatttattcaagtgcttgtttaaaaatagctagtttgcgtgtattcggcttcacaaacatatgataccgttgattttttttcgaaaactttgatccctaatcttattcaaagtatttattc

SEQ ID NO: 92224 - DNA, 1504 bp, Zea Mays
tttagaaagactgataataaaaaagctcaaccaaagggcctttattgttgtgggcgtacgcgaccagtgaggtgcggttggccagccagcggcgagccaaaccgagcgtacgccatggatcgcgagtggggctccaagcccggcagcggcggtgccgcctccgcccagaatgaggctattgaccggcgggagcgtctccgccgcctggccctcgagaccatcgacctcgccaaggatccctatttcatgcgcaaccacctcggcagctatgagtgcaagctgtgcctgacgctgcacaacaacgaggggaactacctagcccacacgcaagggaagaggcaccagaccaacctcgccaagcgcgccgcccgagaggccaaggatgcgcccgcgcagccccagcccaacaagcgcaagcttgccccccgcaagtctgttaagattggcagacccgggtataaagtaaccaaacaatatgatcctgagacgaagcaacactcgtttctctttgagttgacaggttctctaaattataatatgcaactaattgcctatattttctcaaccctaatgctccgtttggatgtcgatattggaggacaaggaattgaattggcttgaagccttgaataccaaattagccgaagtttggaattgggtggcctaattccacgcaatacatagattggttaccctgaaattgaagataattgcaagccaaggcaccgcttcatgtcatcatatgaacagaaagtccaaagttgggataagaggtatcaatacctactttttgctgcagacccctatgaaatcattgcattcaagataccaagtacagagattgacaaatcagcgagcaaattcttctcttactgggatcctgacaagaaggaatacctgctgcaattgtacttcaagccaaggccgccagaaggtagtaaaccaccaccagctcctcctggaactttgcctaatgggactggggctcctggtgctccaccaaggccaccggggcaagctcccccaccacccccgccacaaattccaccgccccctcctgcacctatgggaatgccccctaggattcctccaccacctattggggctgttcaacctccgccacctccagcacgagtggcaaatggtctgcggccaatgattccaccgccacctaacttcactcccggagcacccccaccgcgccctccaatgcaaggctttcctgggcaacagcagtagttgactgcttagcaggcaatgttccagtaattggcagtcagtaaaagtttcaagcttgtgttgactattgtttttcggcttaaaactttgtatgttgtctgggactatactcaaacggcagcttgttggatttttttgtatccacatttattcaagtgcttgtttaaaaatagctagtttgcgtgtattcggcttcacaaacatatgataccgttgattttttttcgaaaactttgatccctaatcttattcaaagtatttattc

SEQ ID NO: 92225 - DNA, 298 bp, Zea Mays
cgacgacgcatcgagaaggagccaacgattgatccatcgccagatcccctttcgtttttccttcacccaaggcttacacagacctgttttaacaagagccgggcagcgatgcttccatttcggaccacgacctagctaaaggctaatggttccaagtgtctgaagtaccgaaaacagggctagctcctcgttttttgtcatgtcaaaaaaatcgtgtatgattgcaacaatattggcaaaatatcggtgtactttatattttgatatactgtgaacaaatcaagtgctctctgagacc

SEQ ID NO: 92226 - DNA, 1541 bp, Zea Mays
atgcatgatccagatgcagatggcggtcaacttcttgaactcggtgatggggtttaccacaatgaccctatacaaagcgctggcacagaaggacatgccgttgcatttctggtgcctcaaggatgccaatgtgtcgcagctgaaaaacatgtgcaagctgctgggcgagaaggatgccaacagcctggcaccatctcagacctcaccaagggtgatatcccacggctgcacgtcaccaaccagagcctccagcagcagcgcaccatccaccacatgcatgagcatgatggagcaggaggcctggcatccccagcactgcctgtcggccggatgcacgggatttgcctcgtcattgtaatatgtgcgcaagtgggcatcctcgacgtaaaattagtaattgcattgacaggccctgcaggctatggtggaggtgcatggtgggcattgaccggccctccaggtggtgcatgcggcagtgccatggcggctgggagctagtgtctgggccagagcacggctatggcacatgtgggagatgaggtcctggggccagaaaagtcgctggtgccgagattcgatgcctgaaggttcatctgcaaggttgatccaatcgtgtggaccacggagggtgacgaatgacaaaggcatgcaaacaactaatgtcgttcccatctgcatcagcgtgttcatttgggcagacatgaccgctgacatgcagctttgtttaacgtattttaatgccacttacagattagtagtttttagtcataagtgcaagttttaggcataagtacaactatggtttatgcattgacgatacttttctaattaatttttgcactcgaatactctttaaataattaaccttttgttgtcctaccagtttagcaagaatgcacaaccatattataacatgattatccatcacaaagccctatatatttaacttcatggaatctcatcctaaaaatctatacttctataggattctcacagcaaaatgagccatatgatctagttatatatgaacttaagaaacccaatgcgcatgcaagatgtcttgcattaataagaaaatatttatatatcaataataatacaaccatatcaggcataaggcctaaaaatacatgatggcacagataagactttttatagttattaggtaagtacaaatatcttgctctttcggttggatcacggagggtatgaaaaacctcatgtatctcttctcaacaaaatgacacagcattattccgtcttatacttgaaactgcaaaatatacagccatatgttgcatttatagatagtgttatcaaattgcacacttagggaagccccccaaggcaggcatgggccaaccgggctccgataccagatgtcagcgtccaatccccggcccagcccacactcgacagcttcaggcgttcatgcgctcgtgggctggctcagccaagagagtccaccactcacatcccaaaagccaggctgatgggaggagggggactctcccttttaagctgcccacggcccccttggc

SEQ ID NO: 92227 - DNA, 498 bp, Zea Mays
atgcatgatccagatgcagatggcggtcaacttcttgaactcggtgatggggtttaccacaatgaccctatacaaagcgctggcacagaaggacatgccgttgcatttctggtgcctcaaggatgccaatgtgtcgcagctgaaaaacatgtgcaagctgctgggcgagaaggatgccaacagcctggcaccatctcagacctcaccaagggtgatatcccacggctgcacgtcaccaaccagagcctccagcagcagcgcaccatccaccacatgcatgagcatgatggagcaggaggcctggcatccccagcactgcctgtcggccggatgcacgggatttgcctcgtcattgtaatatgtgcgcaagtgggcatcctcgacgtaaaattagtaattgcattgacaggccctgcaggctatggtggaggtgcatggtgggcattgaccggccctccaggtggtgcatgcggcagtgccatggcggctgggagctag

SEQ ID NO: 92228 - DNA, 1841 bp, Zea Mays
cgatccaaaacgaggaaacgcaacggaagccggggccccgggccgccggggagagacgacaggggtgtgctgtgtctgtgtctgtgtctgtgtgtgagaggtccaaatccccatcccgcaaccacgctcacgctcacgcacatcatcgtcgtcccccagcccccatcgcggcatcgcctagcgcgtgcgtgcgtgtgcgtcccctgccccatctcctcctgcctgcgcgatccactagtagaaataggcgcgcgtgccgcctctctcgctcgctcctccggttaatcccccatcgccaggagcccaggactcgcagccagcccttcacattattcgcgcgcgcgcgaacggccgtagcgtgtgggtggcgtcgccgtgcggtctcttggtgccggtgcgggccgcgtgacggtgtgtgagtgtgtgacgcccacgcggaggaggtcgttctgttggttggttggtccgcggccatgatggcggtacgcggcggagaggcggtctccgtagcgctcctcttctccctcgttttcttctgcgcccgcttcctgctcgacctcctcgtctacaagccattggcagtctaccttttcaacactaaagcttctaagttgatgagtgatgaggccaggcaagcaaagattgtcaaattctcggagtccatttggaaacttacatactatgcttctgttcaagcatgggtcctcatgataataaagcaagaaccatggtcgttggatatggtgcagtactttgatggctggccaaatcaacccatcgtgtcctcgttgatgcttttctatatgtgccagtgtggattttatatctacagcattggtgctcttgttgcttgggaaacccgcagaaaagattttgctgtaatgatgtctcatcatgtaataacatctactcttattggagtttcatatctgacaggattttttcgaattgggaccatcgttcttgctcttcatgatacaagtgatgtgtttcttgagactgccaaattgtgcaagtacacagaaaaggagttgggggctagcttgtttttcggtctcttcgctatctcctggcttctattgcgtttgatttacttcccgttttggataatcaaagcctctagctatcattccatcacattctggaggaagctggatgaattccctacagctttgtactatatcttcaatacaatgcttctcacattgcttgtattccatatgtactggtggaaactcatatgtttgatgataatgagacaattgaataataaaggacaggttacagatgatgttcgatctgattctgaggatgacgagtaatgggggagattcattctttgacatctgcaatgtgtcatttcttcgccaatacttatctacgcctgcttccagaattgattgttttgatcgtggcaagtctcgggcatggataggaaagtttatcctctgtatattgccttgtgatatcaaacatggctagaacgagaatggagcaggtcctatacattacgggtatagctagcaagcttacttgaaggttccttcaaaaaattttggttcaccttttctgatatatggggaaagatatgagagggcgtacagcttttttcctgaaacttacagaacccctctgtaccatgttcagtatacttcactcgtgagtagatttagttctaattgacggtaataaactgattctttttgactgggagtaaatctcacctgtatcttaatgatctcatgtgatgcgcattgagcttcatgcagctatattttttttaatagtgttatccctattctacacaatatgatggatatagttgagatccaatttggtta

SEQ ID NO: 92229 - DNA, 1303 bp, Zea Mays
attcgcgccgggttccgcgagatctctggtgccccccggtttcgctcccgcgccccaatgctccctgtcgcgagtcgtggtctccgccgctcgttgcatcttcgttaccgatcagttgatcccgctcatccggcgggggatcatccgaccattggcagtctaccttttcaacactaaagcttctaagttgatgagtgatgaggccaggcaagcaaagattgtcaaattctcggagtccatttggaaacttacatactatgcttctgttcaagcatgggtcctcatgataataaagcaagaaccatggtcgttggatatggtgcagtactttgatggctggccaaatcaacccatcgtgtcctcgttgatgcttttctatatgtgccagtgtggattttatatctacagcattggtgctcttgttgcttgggaaacccgcagaaaagattttgctgtaatgatgtctcatcatgtaataacatctactcttattggagtttcatatctgacaggattttttcgaattgggaccatcgttcttgctcttcatgatacaagtgatgtgtttcttgagactgccaaattgtgcaagtacacagaaaaggagttgggggctagcttgtttttcggtctcttcgctatctcctggcttctattgcgtttgatttacttcccgttttggataatcaaagcctctagctatcattccatcacattctggaggaagctggatgaattccctacagctttgtactatatcttcaatacaatgcttctcacattgcttgtattccatatgtactggtggaaactcatatgtttgatgataatgagacaattgaataataaaggacaggttacagatgatgttcgatctgattctgaggatgacgagtaatgggggagattcattctttgacatctgcaatgtgtcatttcttcgccaatacttatctacgcctgcttccagaattgattgttttgatcgtggcaagtctcgggcatggataggaaagtttatcctctgtatattgccttgtgatatcaaacatggctagaacgagaatggagcaggtcctatacattacgggtatagctagcaagcttacttgaaggttccttcaaaaaattttggttcaccttttctgatatatggggaaagatatgagagggcgtacagcttttttcctgaaacttacagaacccctctgtaccatgttcagtatacttcactcgtgagtagatttagttctaattgacggtaataaactgattctttttgactgggagtaaatctcacctg

SEQ ID NO: 92230 - DNA, 870 bp, Zea Mays
gatattgctctccaatggtggctgtattggatgtttttctgatgactgcggcttgataggtatccaaaccaggatcagtgaaggtggagaagttgatgaacattgagagatactcccatgttatgcacatcagctcaacggttagtggacagttggatgatcatctccagagttgggatgccttgagagctgccttgcccgttggaacagtcagtggtgcaccaaaggtgaaggccatggagttgattgataagttggaagttacgaggcgaggaccatatagtggtggtctaggaggaatatcgtttgatggtgacatgcaaattgcactttctctccgcaccatcgtattctcaacagcgccgagccacaacacgatgtactcatacaaagacgcagataggcgtcgggagtgggtcgctcatcttcaggctggtgcaggcattgttgccgacagtagcccagatgacgaacaacgtgaatgcgagaataaggctgctgcactagctcgggccatcgatcttgcagagtcagcttttgtagacaaagaatagtgtgctatggttatcgtttagttcttgttcatgtttcttttacccactttccgttaaaaaaagatgtcattagtgggtggagaaaagcaataagactgttctctagagaaccgaagaaatatggaaattgaggttatggcttatgactgtcgtttgttcagtatgaaactagatttccaactgtgccttagaagtttgcaaatgtcttgttatataagggccggctcagtagactagtcatgtcttttaatacaactcatgtggtcctctttgttgcatattatattgcatagttatatgttagtgatactcctct

SEQ ID NO: 92231 - DNA, 2450 bp, Zea Mays
catcatcaatcaggcaagcgacggtggcttcttcctcccccttcaccgtaccgagacccaaaccaagccgcctcgccagcacccagcagcccgcatcactcgtctccattaaaatcggttttctccttggaaatctgctggcgagtcccaggacccgaatgccccactcttattacctgctaattttgaatttcctaatcgggttgcagctgcttatataagctcactaaccccgcattcgcttttccgactcccacctccagccaaatcgggctatagatcaaacgctgcactgtagggagcgtgaagccagcggcgaatggaatccctagccgccacctccgtgttcgcgccctcccgcgtcgccgtcccggcggcgcgggccctggttagggcggggacggtggtaccaaccaggcggacgagcagccggagcggaaccagcggggtgaaatgctctgctgccgtgacgccgcaggcgagcccagtgattagcaggagcgctgcggcggcgaaggcggcggaggaggacaagaggcggttcttcgaggcggcggcgcgggggagcgggaaggggaacctggtgcccatgtgggagtgcatcgtgtcggaccatctcacccccgtgctcgcctaccgctgcctcgtccccgaggacaacgtcgacgcccccagcttcctcttcgagtccgtcgagcaggggccccagggcaccaccaacgtcggccgctacagcatggtgggagcccacccagtgatggagattgtggccaaagaccacaaggttacgatcatggaccacgagaagagccaagtgacagagcaggtagtggacgacccgatgcagatcccgaggaccatgatggagggatggcacccacagcagatcgacgagctccctgaatccttctccggtggatgggttgggttcttttcctatgatacggttaggtatgttgagaagaagaagctaccgttctccagtgctcctcaggacgataggaaccttcctgatgtgcacttgggactctatgatgatgttctagtcttcgataatgttgagaagaaagtatatgttatccattgggtcaatgtggaccggcatgcatctgttgaggaagcataccaagatggcaggtcccgactaaacatgttgctatctaaagtgcacaattccaatgtccccacactctctcctggatttgtgaagctgcacacacgcaagtttggtacacctttgaacaagtcgaccatgacaagtgatgagtataagaatgctgttctgcaggctaaggaacatattatggctggggatatcttccagattgttttaagccagaggttcgagagacgaacatatgccaacccatttgaggtttatcgagcattacggattgtgaatcctagcccatacatggcgtatgtacaggcaagaggctgtgtattggttgcgtctagtcctgaaattcttacacgagtcagtaaggggaagattattaatcgaccacttgctggaactgttcgaaggggcaagacagagaaggaagatcaaatgcaagagcaacaactgttaagtgatgaaaaacagtgtgccgagcacataatgcttgtggacttgggaaggaatgatgttggcaaggtatccaaaccaggatcagtgaaggtggagaagttgatgaacattgagagatactcccatgttatgcacatcagctcaacggttagtggacagttggatgatcatctccagagttgggatgccttgagagctgccttgcccgttggaacagtcagtggtgcaccaaaggtgaaggccatggagttgattgataagttggaagttacgaggcgaggaccatatagtggtggtctaggaggaatatcgtttgatggtgacatgcaaattgcactttctctccgcaccatcgtattctcaacagcgccgagccacaacacgatgtactcatacaaagacgcagataggcgtcgggagtgggtcgctcatcttcaggctggtgcaggcattgttgccgacagtagcccagatgacgaacaacgtgaatgcgagaataaggctgctgcactagctcgggccatcgatcttgcagagtcagcttttgtagacaaagaatagtgtgctatggttatcgtttagttcttgttcatgtttcttttacccactttccgttaaaaaaagatgtcattagtgggtggagaaaagcaataagactgttctctagagaaccgaagaaatatggaaattgaggttatggcttatgactgtcgtttgttcagtatgaaactagatttccaactgtgccttagaagtttgcaaatgtcttgttatataagggccggctcagtagactagtcatgtcttttaatacaactcatgtggtcctctttgttgcatattatattgcatagttatatgttagtgatactcctct

SEQ ID NO: 92232 - DNA, 2722 bp, Zea Mays
catcatcaatcaggcaagcgacggtggcttcttcctcccccttcaccgtaccgagacccaaaccaagccgcctcgccagcacccagcagcccgcatcactcgtctccattaaaatcggttttctccttggaaatctgctggcgagtcccaggacccgaatgccccactcttattacctgctaattttgaatttcctaatcgggttgcagctgcttatataagctcactaaccccgcattcgcttttccgactcccacctccagccaaatcgggctatagatcaaacgctgcactgtagggagcgtgaagccagcggcgaatggaatccctagccgccacctccgtgttcgcgccctcccgcgtcgccgtcccggcggcgcgggccctggttagggcggggacggtggtaccaaccaggcggacgagcagccggagcggaaccagcggggtgaaatgctctgctgccgtgacgccgcaggcgagcccagtgattagcaggagcgctgcggcggcgaaggcggcggaggaggacaagaggcggttcttcgaggcggcggcgcgggggagcgggaaggggaacctggtgcccatgtgggagtgcatcgtgtcggaccatctcacccccgtgctcgcctaccgctgcctcgtccccgaggacaacgtcgacgcccccagcttcctcttcgagtccgtcgagcaggggccccagggcaccaccaacgtcggccgctacagcatggtgggagcccacccagtgatggagattgtggccaaagaccacaaggttacgatcatggaccacgagaagagccaagtgacagagcaggtagtggacgacccgatgcagatcccgaggaccatgatggagggatggcacccacagcagatcgacgagctccctgaatccttctccggtggatgggttgggttcttttcctatgatacggttaggtatgttgagaagaagaagctaccgttctccagtgctcctcaggacgataggaaccttcctgatgtgcacttgggactctatgatgatgttctagtcttcgataatgttgagaaggtactattcaagaatttctgttctcgttcgtaactaactcatgatgttctctgtgtttcagagtattgtcctacagttgcagttatgattaagtattaatcactttgccttggagcaccaattttttggaggctgaataagatagctagtagtttgatataggaagttaactatactaattctaaagattatgcatgtagtttgtcagtgtttcatcctatttttttttcacatctacaacagacagaaactacaccggttggtgcatttagaaagtatatgttatccattgggtcaatgtggaccggcatgcatctgttgaggaagcataccaagatggcaggtcccgactaaacatgttgctatctaaagtgcacaattccaatgtccccacactctctcctggatttgtgaagctgcacacacgcaagtttggtacacctttgaacaagtcgaccatgacaagtgatgagtataagaatgctgttctgcaggctaaggaacatattatggctggggatatcttccagattgttttaagccagaggttcgagagacgaacatatgccaacccatttgaggtttatcgagcattacggattgtgaatcctagcccatacatggcgtatgtacaggcaagaggctgtgtattggttgcgtctagtcctgaaattcttacacgagtcagtaaggggaagattattaatcgaccacttgctggaactgttcgaaggggcaagacagagaaggaagatcaaatgcaagagcaacaactgttaagtgatgaaaaacagtgtgccgagcacataatgcttgtggacttgggaaggaatgatgttggcaaggtatccaaaccaggatcagtgaaggtggagaagttgatgaacattgagagatactcccatgttatgcacatcagctcaacggttagtggacagttggatgatcatctccagagttgggatgccttgagagctgccttgcccgttggaacagtcagtggtgcaccaaaggtgaaggccatggagttgattgataagttggaagttacgaggcgaggaccatatagtggtggtctaggaggaatatcgtttgatggtgacatgcaaattgcactttctctccgcaccatcgtattctcaacagcgccgagccacaacacgatgtactcatacaaagacgcagataggcgtcgggagtgggtcgctcatcttcaggctggtgcaggcattgttgccgacagtagcccagatgacgaacaacgtgaatgcgagaataaggctgctgcactagctcgggccatcgatcttgcagagtcagcttttgtagacaaagaatagtgtgctatggttatcgtttagttcttgttcatgtttcttttacccactttccgttaaaaaaagatgtcattagtgggtggagaaaagcaataagactgttctctagagaaccgaagaaatatggaaattgaggttatggcttatgactgtcgtttgttcagtatgaaactagatttccaactgtgccttagaagtttgcaaatgtcttgttatataagggccggctcagtagactagtcatgtcttttaatacaactcatgtggtcctctttgttgcatattatattgcatagttatatgttagtgatactcctct

SEQ ID NO: 92233 - DNA, 107 bp, Zea Mays
tattttttgttcgcgagtatggatttgggcaagtaatacccagcgggtttttaccaattgccatctctacctagaacatgctcacgatggaggtgaaatccatcacc

SEQ ID NO: 92234 - DNA, 2095 bp, Zea Mays
ctgcgctttccacctccgtcattccatcacttcccggccggctccagctttgcttcctccgctcgcctgtcagaggattcctcgctttacgcttctcgacttctcgccgcgccgcgcagacgtgatctgagttgagtccgtgacgatcgacgctgaggccggtaaagatcgaacggagatggcagcgggcagtggtggtggtggtggtggctcgctgctgctgcgcggcttcctgtccctcttcttcctcctgttcctccacattggccacggcggcagctgctgcttctcgcccggcgctgccgcgcgggcgcagcaggaggaggacgaagcagcggaagccgacggcaaggtagtaggaggcggcggtgggagcaacaagaggaggaagatatcgccgttgatcttctccccggcagcgtcgtccactgccgttacagccagcgacgatagcgccggagccccgcgcaggcacgtgtcgtctctcgccgccagcctccgtctctacctccaccgcatcttccgctccgggtcgaccgggaccaagaatggcggcaccgtcgtcgcgggaagggacggagaggaggaggcggtggccaccaccgtgtcttcgccgattgcccagtcgctgccgcatcagccttcgtcgacgtccgtggtgctgtccacgccgtcgtcgccgtgcgcgtggtcgtcgccgttgatgatgtcgccgctctcggtgcgctccctcagcgccaccccgttcccgtcgtcgccgcagcagaagctgctgcaggcgagcaggcagtcgttccggtcgttcgccgcccgcggcgacgtgttcccttgcaaggtgtgcggcgaggtgctgggcaggccgcagctgctggagctccaccaggcgatgaagcactccctgtcggagctcacccacctggactccagcctcaacatcatccgcatgatcttcctcgccgggtggaggcccgcggcgtccggtgccggtgccggtgccggtgccggcgaggcccccgcggtccgccgcgtcctcaggatccaccacaacccgcgcgcgctggcccgcttcgaggagtaccgcgacctggtccgcgcccgggccgcccggcgctgcggcggcgagggcgccgtggtggaggagcgctgcatcgcggacggcaacgagcgcctgcgcttccactgctccaccatgctctgctccctgggcggcggcgtgtgcgggagcccctactgctgcgtgtgcagcaccctgcggcacgggttcgcgggcaagcaggccgacgtggacggcatcgccacctacgcctccgcgtggaccgcgcacgcgtccctgcccgccgacgtggagcgcgagttcgccttcctccaggtgcgccgcgccatgctggtgtgccgcgtcgtggcgggacgcgtcgcccggggccccgcggacgacaaggtggcctacgactccatggtccccgtgcgtggcggtgtcgggggcggcaccggcgacgacgtcgagctgctggtgtacaaccccagagcagtgctcccgtgcttcgtcatcctctacagcagcagctagtcggtggcatgacacgaggcggccagcctgcacgcagtactagtgtatagcctttccactgttccttgcccccacccccatcccccgtttggtggctgcgccagcgccgctccgctgctgtggtcaccggttacgcaccgtggcacgctgcaatcaccagtgggcgataatttgccggatccgatcgaaagcttgaccaagtgctgtgaatcgtgatgatgcggagttgagcttgagcctaccatatgcgagtgggacgcgccagaaccataatgtcagtgttgtggttggcatgtttctttagttgtcactgtttgttggtcccctgttacattacattgcacaattatcctccttacttctcatttgctgttgatctatgttcatttttgcatctgtcactactcattagaacagtggaaagctacaaatcgtttcggccctgtacctgctttccagttgtgatagtacagaggcacatagtaactctgttctaaattatgaatcgttctgattatttataagtac

SEQ ID NO: 92235 - DNA, 1362 bp, Zea Mays
ccagctttgcttcctccgctcgcctgtcagaggattcctcgctttacgcttctcgacttctcgccgcatcagccttcgtcgacgtccgtggtgctgtccacgccgtcgtcgccgtgcgcgtggtcgtcgccgttgatgatgtcgccgctctcggtgcgctccctcagcgccaccccgttcccgtcgtcgccgcagcagaagctgctgcaggcgagcaggcagtcgttccggtcgttcgccgcccgcggcgacgtgttcccttgcaaggtgtgcggcgaggtgctgggcaggccgcagctgctggagctccaccaggcgatgaagcactccctgtcggagctcacccacctggactccagcctcaacatcatccgcatgatcttcctcgccgggtggaggcccgcggcgtccggtgccggtgccggtgccggtgccggcgaggcccccgcggtccgccgcgtcctcaggatccaccacaacccgcgcgcgctggcccgcttcgaggagtaccgcgacctggtccgcgcccgggccgcccggcgctgcggcggcgagggcgccgtggtggaggagcgctgcatcgcggacggcaacgagcgcctgcgcttccactgctccaccatgctctgctccctgggcggcggcgtgtgcgggagcccctactgctgcgtgtgcagcaccctgcggcacgggttcgcgggcaagcaggccgacgtggacggcatcgccacctacgcctccgcgtggaccgcgcacgcgtccctgcccgccgacgtggagcgcgagttcgccttcctccaggtgcgccgcgccatgctggtgtgccgcgtcgtggcgggacgcgtcgcccggggccccgcggacgacaaggtggcctacgactccatggtccccgtgcgtggcggtgtcgggggcggcaccggcgacgacgtcgagctgctggtgtacaaccccagagcagtgctcccgtgcttcgtcatcctctacagcagcagctagtcggtggcatgacacgaggcggccagcctgcacgcagtactagtgtatagcctttccactgttccttgcccccacccccatcccccgtttggtggctgcgccagcgccgctccgctgctgtggtcaccggttacgcaccgtggcacgctgcaatcaccagtgggcgataatttgccggatccgatcgaaagcttgaccaagtgctgtgaatcgtgatgatgcggagttgagcttgagcctaccatatgcgagtgggacgcgccagaaccataatgtcagtgttgtggttggcatgtttctttagttgtcactgtttgttggtcccctgttacattacattgcacaattatcctccttacttct

SEQ ID NO: 92236 - DNA, 831 bp, Zea Mays
tttttatttgtacgctcccaagtaaatgttgtcagtatgtttttatttctaaacttgcaggttagctgtattaaggaacgtgagcagaatgtagctaacgaagtgctagactaactttattgtgtaaacttgatttgcgggaatttactattcaatgtcattatgtctaatcaatgtttcagtcatttgatgcttgattttttttgccgagatgtctttgtgtataccagtgtcctgtaattactgtctttggactaagatttcccaaaactcatgactacatttgtactcattttcttttgccattatctcatggtgactaccatgtgcagggtttcacaaatgctgtgaaaagaccagtgagagttagggatcttctgctcagctaggcccgcttggtacctgcacttctgtaaagttatctttgtgtttatgaattttcatttactgtatattgattgtatcatgaatattgtatcatgtggttgtgattggttgcctggccggatccctggctaggtcgaactcagcaacccgccctgctgtttgattgtctgtatcttccgttgccgttgagctaggacgacctcatgcaaatagtggtctggagccaggctcaggagggaagactattttggccgtatgaactcagcctggctggacacagaaaccaagatatagttttaattagttttcttgttacatctcttgattaatgcatcaaattaagaaactgattttacttttgtgtttctgatatttgtatgaacaaaactagatctcacttctctacagcaacaacagctgctctggatcaagagtgagtaaaca

SEQ ID NO: 92237 - DNA, 3334 bp, Zea Mays
tcggccacttcccgccatcgactcttcgcgtctccgccgccgccaggctaccgctgcgccggcgggtcggcgatggacatggacatggagatgccagatcccgacgagctcgagtggatggagagccacggcctagtccctgaggaagaggacgcctacttcgacgaccccgacgagggcttcgtcctggcccccggcgattcggatcaaccgtgcaattccccgcagccgcaggagtccgccgcgccaagagcaaatgaagcgccgggcggtttgaagcggcctccgccaccgccaccgccggagcaggatgaggaagaggagaggagcaagcggagaaacgttgagcaggaggacgaggattggctgcgctactcgccgcctcccgcccctgagattgtcgtcgccgagaagacaatctcgcggttcgcgtcggagatccatggagactctgtgcccgtaactgctcccaatggtgagagagtttatgccaagcttgcaatggaggggttggtcggtcgaggaattagcggaactaggcaaggggttcagttctccaacccaaacagcaatcacaagggcctgctctcagaatcctttgactcactaacaaggcgtgctgagcaggaggctttagcaaaggcattgcaagaaagtacagactcaatagaccgtgtggcttgttcagcgactccactagtcacagaaaaactttgggtggaaaagtatgcaccgaattctttcacagagctattgagtgatgagcacacaaaccgagaggtacttctatggctaaaacaatgggactccattgtttttggatcccatattcgggctacaggtgatgatgtcttgtctgccttacgtcgacactcttcaaccatccaaaagaatgcaagtaacagaaatttcttttccaagagtaaggggggtcctgttgcaagtcaagatggcacacctctgaatgcacaaagcagcaatccagaaggtttaggtggctccttcagcaaaaagtcatcagttgataatgcaccagaacaaaaggtgttgctattatgcggtccacctgggctcggaaagaccacactcgctcatgttgcagtcagacattgtggctaccatgttgtggagattaatgccagtgacgatcgttccgcttcatccattgaaacaaaaattcttgatgtagttcagatgaactcgatcatgtcggattcaaagcccaagtgtctggtaattgatgaaattgatggagcactcggtgatggaaaaggtgcagtggaggtcatcttgaagatgatcaatgctgaaaagagtaataattccgacaagagcactaatggtgaggaaactcaagcccgaaagacatctaggaaaagtcatagaacagcaaaactactgaggcctgtaatttgtatatgcaatgacatttatgctccagccctgagacaactgcgccaagtagccaaggttcatgtgtttgtgcagccgacaattagccgtgtggtgaacaggctcaagtatatatgcaaaaatgaaggtttcaaggctagttcaatcgcgctttctgcattagcggagtacactgaatgtgacatccgttcatgcctaaacacacttcagtttttgaacaagaaaagagtggccctaaacattacagcgattgattcacaagtaattggacagaaagataagtcaaaaagcatcctcgatgtttggaagcaggttttgcaaaagaaaagactcaagcgggctggaaaggctgaaagccttttcaatgaagacaaggacatagactttcttttcacgctcatatctaaccgtggcgattatgaagttactatggacgggatccatgaaaatttcttgagattatcgtatcatgacccgatgttgcaaaaaactgtaaaatgtctcgatatacttggagtttcagattccttgacccaatatgtttaccggactcagcagatgccacttcatgcatatcaacctccaattgctatcactataagccgcatggttgctcaagttgagaagcctaatattaattggccaaaagctttgcagaggtctcgagcattgcttttagaaaagaaagacatgttgaaaacctggcaaaaccaaatgtcaccatttgtttcaaggcacctctcagtagaatcattcgttgaagacactgcttctccccttttacatattctctctccactgagtttgagacctgtagcactgaatttgctgtcagagagagaaaaggatgaacttgtgcaattagttgatactatggtctcctattcagttacatacagaaacacaaagtttgtccctcaagaaaaggcaaacctatctgtagtgccgcatgaagtttcatcactctctctttatcctccaattaatgatgtcataaattttgagggctatcaatcagagcacattggactgtctttagccatgaaacaggttttggtgcatgaggtggagaagcaaaagatcattaaagatagcgctggcaaattgttgaaccaatctaatgatggaaatatgaagagcgaagctttatcaactataaggaagaaaacagtagctaattccatccgtccagctttacattcttccaaggatagttccaagtgcaattcatctacacttgaaatgcagtcaaactcagcctctattgtgaatgataacgattctatatctgccaaaaaacactccagccgtgcagcaaatttctttgacagatttaggaaggaaagaccagtagacgcaaaaactcatagtgatgtggggctgcaaagagcaacacttcagagggattcacgccctctgatcttcaaatataatgagggtttcacaaatgctgtgaaaagaccagtgagagttagggatcttctgctcagctaggcccgcttggtacctgcacttctgtaaagttatctttgtgtttatgaattttcatttactgtatattgattgtatcatgaatattgtatcatgtggttgtgattggttgcctggccggatccctggctaggtcgaactcagcaacccgccctgctgtttgattgtctgtatcttccgttgccgttgagctaggacgacctcatgcaaatagtggtctggagccaggctcaggagggaagactattttggccgtatgaactcagcctggctggacacagaaaccaagatatagttttaattagttttcttgttacatctcttgattaatgcatcaaattaagaaactgattttacttttgtgtttctgatatttgtatgaacaaaactagatctcacttctctacagcaacaacagctgctctggatc

SEQ ID NO: 92238 - DNA, 3112 bp, Zea Mays
tcggccacttcccgccatcgactcttcgcgtctccgccgccgccaggctaccgctgcgccggcgggtcggcgatggacatggacatggagatgccagatcccgacgagctcgagtggatggagagccacggcctagtccctgaggaagaggacgcctacttcgacgaccccgacgagggcttcgtcctggcccccggcgattcggatcaaccgtgcaattccccgcagccgcaggagtccgccgcgccaagagcaaatgaagcgccgggcggtttgaagcggcctccgccaccgccaccgccggagcaggatgaggaagaggagaggagcaagcggagaaacgttgagcaggaggacgaggattggctgcgctactcgccgcctcccgcccctgagattgtcgtcgccgagaagacaatctcgcggttcgcgtcggagatccatggagactctgtgcccgtaactgctcccaatggtgagagagtttatgccaagcttgcaatggaggggttggtcggtcgaggaattagcggaactaggcaaggggttcagttctccaacccaaacagcaatcacaagggcctgctctcagaatcctttgactcactaacaaggcgtgctgagcaggaggctttagcaaaggcattgcaagaaagtacagactcaatagaccgtgtggcttgttcagcgactccactagtcacagaaaaactttgggtggaaaagtatgcaccgaattctttcacagagctattgagtgatgagcacacaaaccgagaggtacttctatggctaaaacaatgggactccattgtttttggatcccatattcgggctacaggtgatgatgtcttgtctgccttacgtcgacactcttcaaccatccaaaagaatgcaagtaacagaaatttcttttccaagagtaaggggggtcctgttgcaagtcaagatggcacacctctgaatgcacaaagcagcaatccagaaggtttaggtggctccttcagcaaaaagtcatcagttgataatgcaccagaacaaaaggtgttgctattatgcggtccacctgggctcggaaagaccacactcgctcatgttgcagtcagacattgtggctaccatgttgtggagattaatgccagtgacgatcgttccgcttcatccattgaaacaaaaattcttgatgtagttcagatgaactcgatcatgtcggattcaaagcccaagtgtctggtaattgatgaaattgatggagcactcggtgatggaaaaggtgcagtggaggtcatcttgaagatgatcaatgctgaaaagagtaataattccgacaagagcactaatggtgaggaaactcaagcccgaaagacatctaggaaaagtcatagaacagcaaaactactgaggcctccgacaattagccgtgtggtgaacagacattggactgatagagaaatatattcctgcagaatgtgacatccgttcatgcctaaacacacttcagtttttgaacaagaaaagagtggccctaaacattacagcgattgattcacaagtaattggacagaaagataagtcaaaaagcatcctcgatgtttggaagcaggttttgcaaaagaaaagactcaagcgggctggaaaggctgaaagccttttcaatgaagacaaggacatagactttcttttcacgctcatatctaaccgtggcgattatgaagttactatggacgggatccatgaaaatttcttgagattatcgtatcatgacccgatgttgcaaaaaactgtaaaatgtctcgatatacttggagtttcagattccttgacccaatatgtttaccggactcagcagatgccacttcatgcatatcaacctccaattgctatcactataagccgcatggttgctcaagttgagaagcctaatattaattggccaaaagctttgcagaggtctcgagcattgcttttagaaaagaaagacatgttgaaaacctggcaaaaccaaatgtcaccatttgtttcaaggcacctctcagtagaatcattcgttgaagacactgcttctccccttttacatattctctctccactgagtttgagacctgtagcactgaatttgctgtcagagagagaaaaggatgaacttgtgcaattagttgatactatggtctcctattcagttacatacagaaacacaaagtttgtccctcaagaaaaggcaaacctatctgtagtgccgcatgaagtttcatcactctctctttatcctccaattaatgatgtcataaattttgagggctatcaatcagagcacattggactgtctttagccatgaaacaggttttggtgcatgaggtggagaagcaaaagatcattaaagatagcgctggcaaattgttgaaccaatctaatgatggaaatatgaagagcgaagctttatcaactataaggaagaaaacagtagctaattccatccgtccagctttacattcttccaaggatagttccaagtgcaattcatctacacttgaaatgcagtcaaactcagcctctattgtgaatgataacgattctatatctgccaaaaaacactccagccgtgcagcaaatttctttgacagatttaggaaggaaagaccagtagacgcaaaaactcatagtgatgtggggctgcaaagagcaacacttcagagggattcacgccctctgatcttcaaatataatgagggtttcacaaatgctgtgaaaagaccagtgagagttagggatcttctgctcagctaggcccgcttggtacctgcacttctgtaaagttatctttgtgtttatgaattttcatttactgtatattgattgtatcatgaatattgtatcatgtggttgtgattggttgcctggccggatccctggctaggtcgaactcagcaacccgccctgctgtttgattgtctgtatcttccgttgccgttgagctaggacgacctcatgcaaatagtggtctggagccaggctcaggagggaagactattttggccgtatgaactcagcctggctggacacagaaaccaagatatagttttaattagttttcttgttacatctcttgattaa

SEQ ID NO: 92239 - DNA, 1744 bp, Zea Mays
agaggatttgctgactagaataaaatataatataaaaattcatgagtggacagcctaatatcgctgcaacggcggcgccgccgataaaacggccagccgggcagcggagacgcggagtggggcgcgacggcgcgtaacctgtggggtttcaggttttgtccctgcgtggcagcgacccagccccatcgagcatcgaggcatggaaccgggagccaaatcggaagcaaagcaaggtgaggcaggatctggcgcgggggaaagcggcagcggcaaggtgtatcatgagaggcagaggctgcaattctgtctcctccatgctctcaacaaccttatgcaggaaaaggaatgtttcacccgtgctgagttggacggcatcgctggaaatcttgttctcaatgatccaaacaagggccagtggactcctctaccattcatttttaaacctcaccacaatgttataactgggaactatgatgtgaatgttctcatcacagcattagaagctagaaacaagaaggtggtttggcatgatcgtcgtaaaggggcatcatcggttgatctgaatgcagaaacattggtaggcctggtgatcaatgtacctatcaggaggttcagggggctttggactggcaggcattgggtggcaattcgacgcattgatggcatctggtttaatttggacagtgatctttctgaacccaagcagtttaaggaccaagaaaacgtgattgggttccttgacagtgtgctcagccaaggtggagaactcatggttgtgctgcaaggtgaataaccctattgccccgaatctcaaatggctaccgaatagcctcttctatgcgacttgcccatgcttttgagttgtcatctgaatgagatcacatgcacctactgcagaaatttcctaaaccttacggtttaatcgctgatcataatggacagattggtaaatcgaaggtccagtatgcaacatatacacttggtttattcatatactggtttattggtaaatcgaaggtccagtatgcagacacctgctaacccttggtttgatttattgctgtgcccgtctctatcatatactggattgccaagcaggtgtctgcagtaggtagaacattagcttgctaaatgatgaaaatagcgaacttcaatcctcagcaagaattaatgttgctgcggaattgtacagaactaatagggaggttgcttgtgttgtagttatatgctttggagaaacgaagttatcccatgctcctagaatttgtcagttcgtttgtaagtaccattggatatcagggaacgtaacattatctgtagactgtactagttgatacccctggagtaatcagagcgatgtcccatggtctttcaaatattacaaagcataaaatatatgtagctgtaagatcattgttgtttaatgccatcatatcgagttaggaaggtgatgatgttgagcttgttattgagatgctgtggcgatttaattactttctctccttgcccgtgcacgcactcatgcaatttggtttcagttggggaagcaaaataaccaaagggaaaaatatgtagtttgcctactgtgttctcccgaatttcaacttcggactcagaaacgtcagaggaaacaagaaaagtaagatttgtctgtaccctttccttccaaaaccgccttacaaaactaccaaagaggttattcagaaattcagtttttgttactctttcaataaaaaaaacttga

SEQ ID NO: 92240 - DNA, 386 bp, Zea Mays
atcagacggtggagagtaacactagctcaaaaccctagcctccaactcatatacctgttgctcgccccgacgcgcatcaacttccgtcgccgccccttcctctccgtcgctcgcctcgcgcctacgccaccacctctgccatggccccgaagaaggatgaggcctcgccgccgtcgtccaagccggccaagtccggaggcgggaagcagaagaagaagaagtggagcaagggtaagcaaaaggagaaggtcaacaacgctgtgctcttcgaccaggccacctatgacaagttgctctccgaggtgcccaagtacaagcagatcaccccatccgtcctctccgagcgtctcagggtccctagtactgaaaatggtcctatggtttag

SEQ ID NO: 92241 - DNA, 2529 bp, Zea Mays
cctcctcgagatattttgcaatgccttcacaaatatctcgttggccccgcggcacggtgccatcagccatcgcgggcgaccgcgcgccattatagcacacggggcacggcacgccttcggcctcccactaactgcacagaggacgacgcggcagcgaggaggaagcaaaggaaaggggatatgtcgaggccgcccaacaggagcgacgcgcacctctccgccgaggacgaggcggcgctggaggccgaggtgcgggagtactacgacgacgcggcgccaaagcgccacaccaagccctcccgcagcgagcactccgccgtgtacgtcgacgcgctcgtcccggacgtcggcggcaactcccacccggagctggacaagttccaagagctggaagcacacaccgaggtctctcgcgtctcttctctccctctcctcccgccggaattccgaaggctcaactgtagcacgcacgggtcagtataatataatctgtgtttttttttgtcagaggttggtgtacgagggcgccaatgtgggagatgagttcgtggagacggagtactacaaggacctcggcggcgtcggcgagcagcaccacacgaccggaacgggtttcatcaagatggacaaagctaaaggcgcccccttcaaactgtctgaagatcccaatgcagaggagcgacatgcttcttgcaggggaaaccctgctaccaacgagtggatcccgtcagctaacacggtgtacccggcgtcagacaagccaagcagaagcgacagctgagggactgtatatctccagccatgagaattcagacgggtgctttccaccattaccattagaataaggaaccacactggttgtccaccgtatctttactgttctgcgtcgagattcttgtgattcttacatggaacaaattaagcgtgctacgagttagacctctgtgttctggctgtaaatggcaaggaataaagttctaatcgtggttcagcagtcaatcaattactctgtttctgatcctaaggctctagaaacaatcggaccttcaaaataaactaagcgaaaattctatgtcgtttcgaaattgcctttcaaccacaccagacagaaagaggtggggtgataaagattagagcaagaacatggtatttattatatagagattagagatacaagttgaaatggttgttgatacagatattaccaagaaacacctacgaactgcctgctggtgatcgattgatttaggccttcacttcaaactcgctacgggtagccgggtaggcaagcaagacagacgagcatggaggatacggatcagtcatggtgcgcagaggccgccgcggcgtcggtggactcggccgtcggccggacgcggaggcgtgcgagctcggcgtcgatacggccggtgaggatgagcaggaacatgcggaggtcgcagaggaaggaccacacggggtgaccgaacgtggcggggcggttgccctccaagaagaagtggctgtaccacgccatgccgtacccgagaatggggcccgcgaggaggaccgcggcgcggccagtggcggccgcgagcaccgcgcaggcgagcgaggccagcgtgccgaggaagtgccaccgccgcgtgcccggcttggagtgctggctcaggtagaagccccagaactcctccatgctcccgaactgctgccgcttccccgcggtctcgccgccgctcctccccatcagtcgcggtcgctggacccttccgctccgcgctgcgctgcttcacaggcaacggtgcgttgcgttggtgcccactgcgcaatcactggctctctctctcctttatccctactctgatgcaagagcatgctggagcctggaggcaggcgatacaagaaatgccccgccttgtgcaatgcccgttgaaagctgctatcaggaacgccgtcgaggagacacggaaccgaccgaccgggcgacatttcctaaggcaaatcagcaaatcggtaaatggccaggagcatggcaacaatagttagcgcaattccaagaccatattttcagaataacttttgatccaatcacgtttttctacatctaccgatggtagcgcgaactggaaaagcagcagccgctaacagccccccgccatagaccaaatagacgaccagaccagacaagccaaggttttagcattaatccataccgacttttgtctcaaaagaatctatagattgcagctgtaacagctgcatcagtggctaactttaatctaaagcaaacagcctaaattgtatttggtgctgtgccggacttcggtaccaagctttagcctgatgatcctaaacaaaactacggctttataggatgtttggtttgaggaatgaactagtccatcatcttctcactcctcactatttttgtttggtttgtgaaatggaataagttgatcatcaccacctcattcgtcataattagttagttagtactaatatgaggaatagggtcatcctaccaaatttgaggaatgaacacatgatgca

SEQ ID NO: 92242 - DNA, 1693 bp, Zea Mays
cctcctcgagatattttgcaatgccttcacaaatatctcgttggccccgcggcacggtgccatcagccatcgcgggcgaccgcgcgccattatagcacacggggcacggcacgccttcggcctcccactaactgcacagaggacgacgcggcagcgaggaggaagcaaaggaaaggggatatgtcgaggccgcccaacaggagcgacgcgcacctctccgccgaggacgaggcggcgctggaggccgaggtgcgggagtactacgacgacgcggcgccaaagcgccacaccaagccctcccgcagcgagcactccgccgtgtacgtcgacgcgctcgtcccggacgtcggcggcaactcccacccggagctggacaagttccaagagctggaagcacacaccgagaggttggtgtacgagggcgccaatgtgggagatgagttcgtggagacggagtactacaaggacctcggcggcgtcggcgagcagcaccacacgaccggaacgggtttcatcaagatggacaaagctaaaggcgcccccttcaaactgtctgaagatcccaatgcagaggagcgacatgcttcttgcaggggaaaccctgctaccaacgagtggatcccgtcagctaacacggtgtacccggcgtcagacaagccaagcagaagcgacagctgagggactgtatatctccagccatgagaattcagacgggtgctttccaccattaccattagaataaggaaccacactggttgtccaccgtatctttactgttctgcgtcgagattcttgtgattcttacatggaacaaattaagcgtgctacgagttagacctctgtgttctggctgtaaatggcaaggaataaagttctaatcgtggttcagcagtcaatcaattactctgtttctgatcctaaggctctagaaacaatcggaccttcaaaataaactaagcgaaaattctatgtcgtttcgaaattgcctttcaaccacaccagacagaaagaggtggggtgataaagattagagcaagaacatggtatttattatatagagattagagatacaagttgaaatggttgttgatacagatattaccaagaaacacctacgaactgcctgctggtgatcgattgatttaggccttcacttcaaactcgctacgggtagccgggtaggcaagcaagacagacgagcatggaggatacggatcagtcatggtgcgcagaggccgccgcggcgtcggtggactcggccgtcggccggacgcggaggcgtgcgagctcggcgtcgatacggccggtgaggatgagcaggaacatgcggaggtcgcagaggaaggaccacacggggtgaccgaacgtggcggggcggttgccctccaagaagaagtggctgtaccacgccatgccgtacccgagaatggggcccgcgaggaggaccgcggcgcggccagtggcggccgcgagcaccgcgcaggcgagcgaggccagcgtgccgaggaagtgccaccgccgcgtgcccggcttggagtgctggctcaggtagaagccccagaactcctccatgctcccgaactgctgccgcttccccgcggtctcgccgccgctcctccccatcagtcgcggtcgctggacccttccgctccgcgctgcgctgcttcacaggcaacggtgcgttgcgttggtg

SEQ ID NO: 92243 - DNA, 745 bp, Zea Mays
gaaatgggtcttgcagtacggcactccttcgaacgaggaataggaacgtactgagagggtagacttgcagtgctggcacttgaagcaggagcggtggaagacgacgccgtcggtggagagctggtccatcgggtacaccgtcttggtgcacaccttgcacttctgctgcgtcccgctaaacatcttcctcccgagcaccggtcaacccccccttcggtctctgtctcacggcggccggcgagatctgagaggccgccgatccggccttggcctgcgcgcgcgtgggatggagaaggagaacgaacgcctccccgggcgtcccgattgccgcgtttatatacgcaggaggcaggagcacgagacgcgattaagcgagggagttatgacgggttcgtctcccccaactcgcccgcgcgctcctcacttttgccgcggcggaaaggaaaagacagcaccaaacaagcgacgacgggggatgggaatcggaagatggaggcacagcacagcacagccagcacagtgcctacctgctgctcattaaactaatgagcaattattactaccaccattagtgcgcattcgaggaggaagctccgtgcacaggatgctctgatggtttgggtcactggtggcggggccacaagcgggtgggacctacgtgtcggtgagtaaggagttccgcagctcagctgcggtggggggaccgggaagaagtacgggagaagcaagcactggtgactgctcg

SEQ ID NO: 92244 - DNA, 2603 bp, Zea Mays
ggatttaatgaaagacccagttattgttgccactggacttatgagcgaggtaaaagggatgcaacaacagcactgtttaacttgtgtatttaccaaggcaacaaggggaagactgttagagctggatactaccagaactgctcatggagactgaaagtgggatggtagatgaggcccttgcaatattgacaatcctctcaggccatcctgaggggaaggcagcaattggcgctgcttctgcagtgcctgtacttgttggagttgtcagaaatggatctccaaggaacaaggaaaatgctgctgctgttatggtccatctatgaaatggggtgagcagcagcaacaacatcttgccgaagcacaggagcagggcatcgtgtctttgctggaggagctagcagacgaaagtggcacagagagaagaaagaggaaagctgtgcagctgctcgaacgaatgaatcagttcctaaagcaacagagtcaagcccaagccaaggccatggcacaggctcatgcgcaagcacaggcacaagatcatgctcaagcacatgcacaagcacaggcacaagcgcagtctcagctccttggttcaagctcaagcacacgcagatatgcaagctgaggaatcactacttctcatttcatcggatatatgctgctgctaaatgaactgttacttacaaaataattttgtttccaatattgactcatttacatgtactgctagttggattaggtaagccatgttttattttgcatcgactgatactgagcataagaaaatagaatttggaagcacaagcagatattcagacattagagaacctaataaacaaaaaaaagaaacaacagatcggcctatacttagaaacattttaacaggatatgagctacatttttatgttgttggaatgaacaacaaatacgatatgcagaccaaatgtttagcgatatttattgatggatactactggctttattgcacaaatggcttaaattttgagtagtgcatcaatgacagtagtagagaataaattgatataaccttagaaacgtttgatgaagggcttcaagctcacgctcttctgggtgaccttcatacagccacacagcctgagctgcttcgtcgcttccaagaccgcgccattgtagtcattgaccatgcagttcgaaaggttgagctcgatgagctggctgcaactctcacagatggcgaacaggcttgcatcatggtcaatgaggtggcaagggaagcgtcatggtccttaaccaaggcagaaacagccgcgtccgtgaccgtgagattctcgcagctgttcaaatcaatgtcgaccagcccactgtccgagctcttcattagtggaaggaagccattgtcggtgactgcactaaggccactcaaattgatgttctccagctgagggcagaacatgcccaccataggaaggctggtgtcggtgaagcctgagcaatccttgatggccagggaccgaagcgatttgcatactggaagctgtgcagatgcggagcatatgtccttgatctcgatgcacttggacagagagagggacttgaactttgggctacagttgaggaagaaagcaagaatgcccgtaagagtaaccttgctgcattcctcgatctgcaaactctccaggccttagatgattatgtaaattccttcagacatccgtctgagaccttgctgcacttcttgaggttaacaagcctcaaacttgggctgaacttggcgcggatgcaagagcaagatccatgagtcccgggcaggagacaatagtcatatgcctaagcttctgcaggaccagggcattagccatcacctagaaccccctctcactgacagcagggatgcgagcgagggccagatctttgattgacttcccatagtaccccatcatgacaagagaagcataattagtaacgttcaaaccctgaaaccgcatctcctctgtatccctggaacggagacatgccgagccgcaaaagaccaagaacgcacaatcctgaaacaagcatcagacttcctcaacgattaaatgattaaatcccaagttcaatagcacatttataagagataatttcacaaataaggcaatatattaaaaaaaacatgcacataattcgacacttaaacaactgaatagaagcgaaacctagacccggttcctgtcgagcataagaaatcatagacgaaaaccaaatcaaaagaactggcacgccttcaatcacattacaacgccaaagagaaacacacaaattattcaggaagggctgcgggcaagcgagacgataccccgagcccgagtgtcgactcccgaccaaattgtcgacgtgctaccaccacctcgctctccctcagttgagcagattaggtcgcgggcatgaggcaggtgtgctcgaggtggatgcgtcgaccattggagggcaagggcgtcgtggaggaggaatacttcgcgaagaggtgccatggcagagttgaggtcgtgggagggggcaagagtagtgggcgtggaaaggatgaggcggaagggcggcggcgacaatggcctccgtgagttttgtgagggtgtggaaggtgggcg

SEQ ID NO: 92245 - DNA, 1519 bp, Zea Mays
ccaagacctgggcttatgctggaaaaataattcagctcaacatcaaacgaggcccattcctcagacctctctgtctcgtcttcctagttcggacttcggattaaggcgacccaccgagcacctcgatacggcggagtcgtgggaagccagggaggtgaggacgacgtggcgaagtcgtgaggacaagaaaattccaccgctgtggcagccatgtcagtgcaggagtacctggggaagcacctgctctcgcgcaagagcgaggaggccctgaatacggcggtccgcgccaaggcccctgacccggcgcttttcatcgtcggccacatgaggcgggaggcgcccaccgtgatcacgagggtgcgggcgcgccagatccttgacgggcgtagcgcaccggccgttgaggtcgagttgcacaccaacaaggccgtgcaccgagcatctacggctagcgtgggcgcgctcgagggcgccgccgccgacgcggccggggcctccgagaggcggaagttcctcgccaggggggtcgcctacgcggtgcgggtgatcaacgacaaggtgtcggaggcactcgttgggatggatccgcagcagcaggcgcagatcgaccaggccatcatggacttgacaaggcgcgccacagattttatccaaatggaaatagatatgatattgtgcgaaatgcaggctgagcttggagcaaatactatgctggcagtgtcaattgcagcttgcaaagctggtgctgctgaaaaagaggttccactctacaagcatatagcggatcttgttggcaaaagcgctacaactcttcctgtccctgcaaatacagtcattaatggtggaaagcatgctggaaatggtcttcccattcaagaaattatgattcttcttgttggtgctatgaacttcgaagaagcaatgcagatgggttcagagacctatcaccatctcaaggatattatcttggagaaatgtggctcagacagctgcaacattggagatcatggtgggtttgctccaaatatttccaggcaattattagttcatgagtatctcatggcaaatcaagtgggcactgtcactgaggcgatagaggttgtgaagcaggcaaatgatgcacattggggtgtgatggtgtcacataggtctggagatactgaggattctttcattgctgacctggctgttggtgctgcagccggacagatcaaagccagtgtcccatgccgtggagtctaactaaatacaatcagctgcttagaatagatcaatagaggaagaacttggaagtgaaggcgtctatgcaggggagaattgaaaatcttgacccgcctttgtatgtagccacttatcttttctttgttgtcttgtccaattgtgtgtgctcgtcctcaacaaggatatggaaatagggtggtgaaatgcaccatttatagcatgggttataaacatgagtacaaaacatggtttaagaactagaaatgagttacattctagtgaactggtcctttttcgt

SEQ ID NO: 92246 - DNA, 1049 bp, Zea Mays
tttaaaaaaaccataataaagaatttatttcttaaaaataccataatgaagaaattttagatagagttaactcatgatatacatcatacgaacaccacaggaactagaactctagtagacaaactcatgacatccatacatagattcagacaccacaagtagacccaacatacgcaaagtttgtgaccacattccaccatcctacgacattacgaccatattgacaaacgccataattcttgtaacccaattttatttcacagaacgaccgaggcgaactgccgttcctcaaaccacgcaggtacgacgaccgcagaccgaggtctagccggagatctgaatggacttcacttcaggcttcttggcgtcctccttcggcacagtgactgtaagcacgccgttctccatggcggccgtgatctgctccgtcttggcgttctcgggcagtcggaacctgcgcaggaacctcccgctgctccgctccacgcggtgccaggtgtccgtcttctcctcctgctccttgttgcgctcgccgctgatctgaaggacgttgccgtcctcgacctccaccttgacctcctccttcttcagccccggtacgtcggccttgaacacgtgcgcctctggagtctccttccagtcgatccgcgcgccagcgaaggccgcggtctccgagctggtccgcgggaacgaggggaagagactgctgctgttgccggagccgaaggggaagccctcaaaggggtcccagaggtcgagggagaagggatcgaacacgttgctgcggcggatcagcgacatggtcaggttcggttctagtcttcttgtcaacgagaatctaatcgaagatttggggaagaggtttgagtgaattgattgagcttcggatcgctgcttgctgtctccctcaattcctagaaggggtctttttatagagggaaagcgagagagatgaagtggaggagaaagcagtttctggagagttctcacgtgttcgcggatagacccggatagacccgacgccgctgtattggagcgtggagaatgct

SEQ ID NO: 92247 - DNA, 1502 bp, Zea Mays
ggcgaactgccgttcctcaaaccacgcaggtacgacgaccgcagaccgaggtctagccggagatctgaatggacttcacttcaggcttcttggcgtcctccttcggcacagtgactgtaagcacgccgttctccatggcggccgtgatctgctccgtcttagcgttctcgggcagtcggaacctgcgcaggaacctcccgctgctccgctccacgcggtgccagccccggtacgtcggccttgaacacgtgcgcctctggagtctccttccagtcgatccgcgcgccagcgaaggccgcggtctccgagctggtccgcgggaacgaggggaagagactgctgctgctgccggagccgaaggggaagccctcaaaggggtcccagaggtcgagggagaagggatcgaacacgttgctgcggcggatcagcgacatggtcaggttcggttctagtcttcttgtcaacgagaatctaatcgaagatttggggaagaggtttgagtgaattgattgagcttcggatcgctgcttggtgcttgctgtctccctcaattcctagaaggggtctttttatagagggaaagcgagagagatgaagtggaggagaaagcagtttctggagagttctcacgtgttcgcggatagacccggatagacacgacgccgctgtattggagcgtggagaatgctagagagagctatccagtggcagtccctcttttagatcgtagtactgggctgggtttctagtaattttgttcatggaccaagacctgggcttatgctggaaaaataattcagctcaacatcaaacgaggcccattcctcagacctctctgtctcgtcttcctagttcggacttcggattaagacgacccaccgagcacctcgatacggcggagtcgtgggaagccagggaggtgaggacgacgtggcgaagtcgtgaggacaaattccaccgctgtggcagccatgtcagtgcaggagtacctggggaagcacctgctctcgcgcaagagcgaggaggccctgaatacggcggtccgcgccaaggcccctaacccggcgcttttcatcgtcggccacatgaggcgggaggcgcccaccgtgatcacgagggtgcgggcgcgccagatccttgacgggcgtagcgcaccggccgttgaggtcgagttgcacaccaacaaggccgtgcaccgagcatctacggctagcgtgggcgcgctcgagggcgccgccgccgacgcggccggggcctccgagaggcggaagttcctcgccaggggggtcgcctacgcggtgcgggtgatcaacgacaaggtgtcggaggcactcgttgggatggatccgcagcagcagacgcagatcgaccaggccatcatgcacttgacagggcgcgccacaaggtgggatactaggagatcctttccctctttctctcctttgcggttttttgctcctgaactctgcattgtcaaatccgttacacaaacaaacaactga

SEQ ID NO: 92248 - DNA, 498 bp, Zea Mays
ctagccggtgatctggacgttcttgacgtcggccttcttggcctcctccttgggcacggtgacggtgagcacgccgttctccatggacgccttgatctggtctgccttggcgttgtccggcagtctgaacctgcgaaggaacttgccgctgctgcgctccacccggtgccacctgtcgttcttctcctcgtgctccttgttgcgctcgccgctgatctgcaggacgttgccgtcctcgacctccaccttgacctcctccttcctcagccccggcacgtccgccttgaacacgtgcgcttcgggggtctccttccagtcgatccgcgcgccggcaaatgccgcggtctccgagctggtgcgcggcaacgagggaacgaggctgcggacgccgccggagccgaaggggaagaagccctcgaaggggtcccagaggtcgagggagaaggggtcgaatgcgtttccacggcgaatcagcgacattgttggtcggaccgacga

SEQ ID NO: 92249 - DNA, 1827 bp, Zea Mays
ctttgttactagttcgagtagatggccccgcgtaacgaacgtgctgaacatgttgatgaccttattaagttgtgaaacaccttgtatatactgccttgctggtactagaaatatactgtttttttggaggatagcctatctgcgtatctgatgggtaccgtatccgtatgtatgtaaacaacatagggtgcagccatgcaagtctgatactctgatgatggctacaacgtaaagctggtgaagcaacgccgtcctcacaattcttcccccaatccacattctctcccaggctcccaaaaccacacaaacctcaacccgaaaaaagacaagatcaagccaccaccaccgccagcaagagcagaggcgagaccgcgagagtgtacgtgccaccaggagcagcagcagcaatggccgccgccgccaccacctcctcatcctcccacttgctcctcctctcccgccagcaggcggcctccctacgatgccgcctctccttcctcggccagcccgccagaaggtccggcagggtcacggcccaggcgccggccgctaaggacgtgcggtgcatggcggccgtggacactgcggcgtccgcggcggcggcggagacgagccccaagtcgagcagctacgagatcgtgacgctcacgacgtggctgctgcagcaggagcggaccggcgcgatcgacaacgagatgaccatcgtgctggccagcatatccacggcgtgcaagcagatcgccgcgctggtgcagcgcgcgcccatctccaacctcacgggcgttcagggcgccgtcaacgtgcagggcgaggaccagaagaagctcgatgtcgtctccaacgaggtgttctccaactgcctcaagtcgagcgggcgcaccggcgtgatcgcctcggaggaggaggacgtgcccgtagcggtggagcagagctactccggcaactacatcgtcgtgttcgaccctctcgacggctcctccaacatcgacgccgccgtctccactggctccatcttcggcatctacaaccccaacgacgagtgcctcgccgacgtcgacgacaacgacacccttgattcggtggagcagaggtgcatcgtgaacgtgtgccagccggggagcaacctgctggccgccggctactgcatgtactcgagctcggtgatcttcgtgctcaccgtcggcaccggggtgtacgtgttcacgctggaccccatgtacggcgagttcgtgctgacgcaggagaaggtgcagatccccaaggcgggcaagatctacgccttcaacgagggcaactacgcgctctgggacgacaagctgaagctgtacatggacagcctcaaggagcccggcgactcggggaagccctactccgcgcggtacatcggcagcctcgtcggcgacttccaccgcactctgctctacggagggatctacgggtaccccagggacaagaagagcaagaacggcaagctgcggcttctctacgagtgcgcccccatgagcttcatcgtcgagcaggccggtggcaagggctctgacggccaccagagaattcttgacatcacacctacagagatccaccaaagagtgcctctgtacattgggagcgtggaggaagtggacaaggtggagaaattcctggcttgaatgccagagctctctcatcagatggactcccgaagacatcaagtttagggagggaatatacatgtactctctctttcccaccccaaataagtcttcttcatctcatatttcgataaatcaaacaatctcaattttgatctaatatatatacacacacaacattagtatttatagtatt

SEQ ID NO: 92250 - DNA, 1214 bp, Zea Mays
ctttgttactagttcgagtagatggccccgcgtaacgaacgtgctgaacatgttgatgaccttattaagttgtgaaacaccttgtatatactgccttgctggtactagaaatatactgtttttttggaggatagcctatctgcgtatctgatgggtaccgtatccgtatgtatgtaaacaacatagggtgcagccatgcaagtctgatactctgatgatggctacaacgtaaagctggtgaagcaacgccgtcctcacaattcttcccccaatccacattctctcccaggctcccaaaaccacacaaacctcaacccgaaaaaagacaagatcaagccaccaccaccgccagcaagagcagaggcgagaccgcgagagtgtacgtgccaccaggagcagcagcagcaatggccgccgccgccaccacctcctcatcctcccacttgctcctcctctcccgccagcaggcggcctccctacgatgccgcctctccttcctcggccagcccgccagaaggtccggcagggtcacggcccaggcgccggccgctaaggacgtgcggtgcatggcggccgtggacactgcggcgtccgcggcggcggcggagacgagccccaagtcgagcagctacgagatcgtgacgctcacgacgtggctgctgcagcaggagcggaccggcgcgatcgacaacgagatgaccatcgtgctggccagcatatccacggcgtgcaagcagatcgccgcgctggtgcagcgcgcgcccatctccaacctcacgggcgttcagggcgccgtcaacgtgcagggcgaggaccagaagaagctcgatgtcgtctccaacgaggtaattaattgagtggctcgcccacgttttgtgttatacacactgacacagcagatacagccgaaccacacacaaaaacaaagaagaaagaaacagcagcgtcacacacagccgctaccaaacgcaagcacacaaaaacacaagaaccattcaagaacgtacaacacgacgctcgatcgcgcgcgcgcaggtgttctccaactgcctcaagtcgagcgggcgcaccggcgtgatcgcctcggaggaggaggacgtgcccgtagcggtggagcagagctactccggcaactacatcgtcgtgttcgaccctctcgacggctcctccaacatcgacgccgccgtctccactggctccatcttcggcatcta

SEQ ID NO: 92251 - DNA, 639 bp, Zea Mays
atgtcaccttctgccgcccccccgacgcaccaacccaccagccccaaccctcagagccccaacgccggtcgagcaccagcgagagacctcaagaaggccgaggcgagggttcccgcatggggcgagaggtccaaagacggcaccctcaatagggtaagggtggcgcccacgggcgtcaccgctgtccacccacaagcgagcatggctttcgccggaggacctcccaccacacgccccaacgcacggagccaaccggcccgcgcgccgcacctcccgcctggcatgcgcacaaccgcaaacgccgccagggccactactgcccacatgccgacgccacacaccaccactgaggagccagatcctccgctcctcgccgacgcacggttgtcgccccgtccacagcgtagtctaggtcgtgaggggaggggcggcgaagaagagagcgccacccacagcgcctacacgagccccaaaccaacgccgctgccgacgcaaaccccacctgccgccagcgccacgcgcccatgtcccctcgcccgctgccgccagaatgccgtcgaggccctggccggccctgccgcgctggagaagggacgaggaggcggcggtcctgacggcgtccagctccacgtagcatga

SEQ ID NO: 92252 - DNA, 3694 bp, Zea Mays
caccacttcaagatccgatccatcgtccgtcccatccaatcgccccctctccctcgtgatcccgacgccgacgacgacaacgaaacagctcagtttcgtgtttttctcccgtaccccgcagccccccacacggccacgccccacctccgaatcacaagggtggcaccgtggcagtacaagtagaaacgtcgagtgaaactgaaaccgggggaggggtcgtgggaagaagcaaggccagcagctagcacgcgggccgcaccacaagcgcgccggcaccggccacctacctggtcgcccaacctattgcctataggctataggagtaggcgggagggggacgatatggagtagcagtagccagtaggcagtgtagcactgcggcttctactaccaccgcacctccaacccccgtccgatacctatccaccacaggtctctatccagtccacttgcccttcttctcatccgtcactgcagcgagctctcgcttcgtttccccctttccctcaggactggcagatctgttggtgtgatccccagcttggatcttgttgattcggtgatttgagtagccgattttcttcgagcaaactggtttttaggaagtgtggttttctcagtctctgtttgaaccacaacataccaaactgaatcaagtgataattgtgttctgaccatacgccaagttatacctgaaacttctgcttcatatgttcacccatcataaagatgccaacaaaagttcaggttagcagcgaaaggaatgtgaagatcatatcaggtcgagatgggcaaaagaagggaaattcacagcatgaccaaattgtacgcgtgccaaaggacatggtcacaccagtcaatggaaatgtagatggaaaatttgaagataaagttagagttgtgaagaatgataagttccgaagacaacgagagtcttggggtggggaaagggctgcatgcatgaagggctcaaaaccatggcctggtcgaaaggcaactactgttgatgaacttgtcaaacatatgtcaaatgttccttcatatttacagcgtaaagaaacttctgagcatcttcaagacaaggcgctgaatgttggagttcttgagtggggtcttcttgctaactggtctcagcaacaaaagcatgagctcgctagaagccatggagcatctccatccaatactagcaggtctgtactattctcatctccatcacattcttctgcaagccccagcagcagatctcttgagagcaatcaatctaccccaattagtgactatcatcattcatccatccgagcccagcagagtaggctcgcagataaacaccatgggaaggccagatgttcgcctagcccaaattctgcggtactgagcttattgccaggtcatggcacacatccctgtcaagagaatggttgtaattatgttgacttggatctcaacaatgtttctttagcctcagactctctaggttcttcctctcgaagttgcagtagacatgaaatagttgaagatgaagagactagatggaagattgaagatgttgtccatcattgttctcgtaggctttttacagacagtgataacattgggaaacatttcttcacatcaaataacaaagattccatgtgtaatgatcctgaacagagcagtggcttggattgtgaaaattttgagtcactaatatctgatgctgtgatggatacagctagaaatggcagtaggtcacctgattgtttcttggaggatattgagacatcccgtgaatttcctcgaatcccatattcatgtccacttcccatcatagattcagcagctaaagagattggcaccactagtactgaggctggagataattttattggtacagctgcaaaagtaagtaagaattctagcctaaaccaatctgccctgaatgccactgagaatcctccccgatattctgcaaagtttagtgataggatgcctgatcgccatcaaggttctgtgatgaatcgagtgagccgcagctctagcctcaaggagtcaccacatgctcgacaacccaatgtagttcctcctgttgataagacaggagatcggtcatcacccaacagcaaaggtaggcgaagcccattgaggaggatgttagatccaatattaaagccaagacattctagtccaatacgaccttcatttgttccaaaatgtcatcttccagtcaataccaccaagcaatctctggacttagggggatcagtgccacagaatatgcagcgaaggtcagttgatttggtagtcaattcgaattatcgaattgaagcaaatacaaatcagccacctcgtgtgctattgaacagtgcaagatacatccagaaagaaaaggattcaacaacaacaagacaagcatttctgcagctagcatggaagaatggcttgcctttattcatgctgtcttatggcgattctgatatcctggcagccactgttagaaggaagggcatctctgaaaaggatgatctggaaagcacatatgctgtattcactgttgaagaacctaagaaaaaaagtggagcttggatcaaggcagggggcaagaacaagaaacaccaccttttgtctagcatagttggggaaataaaggttgcacgtcgaaaatcaagatgtcaccatacagcagatgttcatgtatacagggaatttgtgttgcttggttccggatttctaccatcatctgaagaatcgggtgattcacatgttagtggagagtttgcggcttttattagtgcacttcctcagcaagaagcagaaacttcgaatcaatcatcttcacagaataccagacaaaaaaatttagcactaactggctgtggttgccccccactgggaaacttccagcctagttctgcttcagccaatgttattgcagtacttcctgatggcttccatggcaaatcaacgtctgggcagccgttgcctttgattgagaggtggaagtcaggaggagcttgtgactgtggcggatgggatgaaggttgcatgctgagtgtcctcactgatgcggccgaagaaaatgatgccgttcaggctaaccaggcaaaggatggcagccagcgatttgaacttctagctcagggtggatcacgagaagataggcatgccttcagtatgacttcattcaaagaggggctttatacagtggaattcagatcatccattgcattacttcaagcttttgcaatgtgtatagtgatgctacatgggaggtaccctgacaggctgcaagttggttcgcaagcagcgcaggagcatgacctccttgctggtcatgaggtcaaggccatggtagccagtcaaggaagagctccgaccagctatgtgccccaccgtccacctctttctcctgtgggccgagcctagcttatcgcgattaaatgtatgttctttgtgtgtctgtgtcctctttctccttcagtcgcgtagtgctggtgggattgatataccatggtcctcaggcccatatgcaatacgcatattgaaagtgacaatctcagaacaatcaatcggctttagaggtagctacctgtacatgttgtgatgttgatgttgtatgactgtactatgatgcggctgcaaggcccatctcggtgattactcacccgttatatgttctcttatcagttcataagaatacacaaaaaagatgaaaaaa

SEQ ID NO: 92253 - DNA, 3854 bp, Zea Mays
caccacttcaagatccgatccatcgtccgtcccatccaatcgccccctctccctcgtgatcccgacgccgacgacgacaacgaaacagctcagtttcgtgtttttctcccgtaccccgcagccccccacacggccacgccccacctccgaatcacaagggtggcaccgtggcagtacaagtagaaacgtcgagtgaaactgaaaccgggggaggggtcgtgggaagaagcaaggccagcagctagcacgcgggccgcaccacaagcgcgccggcaccggccacctacctggtcgcccaacctattgcctataggctataggagtaggcgggagggggacgatatggagtagcagtagccagtaggcagtgtagcactgcggcttctactaccaccgcacctccaacccccgtccgatacctatccaccacaggtctctatccagtccacttgcccttcttctcatccgtcactgcagcgagctctcgcttcgtttccccctttccctcaggactggcagatctgttggtgtgatccccagcttggatcttgttgattcggtgatttgagtagccgattttcttcgagcaaactggtttttaggaagtgtggttttctcagtctctgtttgaaccacaacataccaaactgaatcaagtgataattgtgttctgaccatacgccaagttatacctgaaacttctgcttcatatgttcacccatcataaagatgccaacaaaagttcaggttagcagcgaaaggaatgtgaagatcatatcaggtcgagatgggcaaaagaagggaaattcacagcatgaccaaattgtacgcgtgccaaaggacatggtcacaccagtcaatggaaatgtagatggaaaatttgaagataaagttagagttgtgaagaatgataagttccgaagacaacgagagtcttggggtggggaaagggctgcatgcatgaagggctcaaaaccatggcctggtcgaaaggcaactactgttgatgaacttgtcaaacatatgtcaaatgttccttcatatttacagcgtaaagaaacttctgagcatcttcaagacaaggcgctgaatgttggagttcttgagtggggtcttcttgctaactggtctcagcaacaaaagcatgagctcgctagaagccatggagcatctccatccaatactagcaggtctgtactattctcatctccatcacattcttctgcaagccccagcagcagatctcttgagagcaatcaatctaccccaattagtgactatcatcattcatccatccgagcccagcagagtaggctcgcagataaacaccatgggaaggccagatgttcgcctagcccaaattctgcggtactgagcttattgccaggtcatggcacacatccctgtcaagagaatggttgtaattatgttgacttggatctcaacaatgtttctttagcctcagactctctaggttcttcctctcgaagttgcagtagacatgaaatagttgaagatgaagagactagatggaagattgaagatgttgtccatcattgttctcgtaggctttttacagacagtgataacattgggaaacatttcttcacatcaaataacaaagattccatgtgtaatgatcctgaacagagcagtggcttggattgtgaaaattttgagtcactaatatctgatgctgtgatggatacagctagaaatggcagtaggtcacctgattgtttcttggaggatattgagacatcccgtgaatttcctcgaatcccatattcatgtccacttcccatcatagattcagcagctaaagagattggcaccactagtactgaggctggagataattttattggtacagctgcaaaagtaagtaagaattctagcctaaaccaatctgccctgaatgccactgagaatcctccccgatattctgcaaagtttagtgataggatgcctgatcgccatcaaggttctgtgatgaatcgagtgagccgcagctctagcctcaaggagtcaccacatgctcgacaacccaatgtagttcctcctgttgataagacaggagatcggtcatcacccaacagcaaaggtaggcgaagcccattgaggaggatgttagatccaatattaaagccaagacattctagtccaatacgaccttcatttgttccaaaatgtcatcttccagtcaataccaccaagcaatctctggacttagggggatcagtgccacagaatatgcagcgaaggtcagttgatttggtagtcaattcgaattatcgaattgaagcaaatacaaatcagccacctcgtgtgctattgaacagtgcaagatacatccagaaagaaaaggattcaacaacaacaagacaagcatttctgcagctagcatggaagaatggcttgcctttattcatgctgtcttatggcgattctgatatcctggcagccactgttagaaggaagggcatctctgaaaaggatgatctggaaagcacatatgctgtattcactgttgaagaacctaagaaaaaaagtggagcttggatcaaggcagggggcaagaacaagaaacaccaccttttgtctagcatagttggggaaataaaggttgcacgtcgaaaatcaagatgtcaccatacagcagatgttcatgtatacagggaatttgtgttgcttggttccggatttctaccatcatctgaagaatcgggtgattcacatgttagtggagagtttgcggcttttattagtgcacttcctcagcaagaagcagaaacttcgaatcaatcatcttcacagaataccagacaaaaaaatttagcactaactggctgtggttgccccccactgggaaacttccagcctagttctgcttcagccaatgttattgcagtacttcctgatggcttccatggcaaatcaacgtctgggcagccgttgcctttgattgagaggtggaagtcaggaggagcttgtgactgtggcggatgggatgaaggttgcatgctgagtgtcctcactgatgcggccgaagaaaatgatgccgttcaggctaaccaggcaaaggatggcagccagcgatttgaacttctagctcagggtggatcacgagaagataggcatgccttcagtatgacttcattcaaagaggggctttatacagtggaattcagatcatccattgcattacttcaagcttttgcaatgtgtatagtgatgctacatgggaggtaccctgacaggctgcaagttggttcgcaagcagcgcaggagcatgacctccttgctggtcatgaggtcaaggccatggtagccagtcaaggaagagctccgaccagctatgtgccccaccgtccacctctttctcctgtgggccgagcctagcttatcgcgattaaatgtatgttctttgtgtgtctgtgtcctctttctccttcagtcgcgtagtgctggtgggattgatataccatggtcctcaggcccatatgcaatacgcatattgaaagtgacaatctcagaacaatcaatcggctttagaggtagctacctgtacatgttgtgatgttgatgttgtatgactgtactatgatgcggctgcaaggcccatctcggtgattactcacccgttatatgttctcttatcagttgcttctgtatatgttgaaatatgtgattactgattagtcacccgttatgtgttctcttctcagttgctcctgtatatgttgattatatgcttaagaggcaattattctattataatactaactctgttctcgaatatttatcgtcaactagtttatttttgtataaaacacgataaattaaaaaaaaac

SEQ ID NO: 92254 - DNA, 3780 bp, Zea Mays
caccacttcaagatccgatccatcgtccgtcccatccaatcgccccctctccctcgtgatcccgacgccgacgacgacaacgaaacagctcagtttcgtgtttttctcccgtaccccgcagccccccacacggccacgccccacctccgaatcacaagggtggcaccgtggcagtacaagtagaaacgtcgagtgaaactgaaaccgggggaggggtcgtgggaagaagcaaggccagcagctagcacgcgggccgcaccacaagcgcgccggcaccggccacctacctggtcgcccaacctattgcctataggctataggagtaggcgggagggggacgatatggagtagcagtagccagtaggcagtgtagcactgcggcttctactaccaccgcacctccaacccccgtccgatacctatccaccacaggtctctatccagtccacttgcccttcttctcatccgtcactgcagcgagctctcgcttcgtttccccctttccctcaggactggcagatctgttggtgtgatccccagcttggatcttgttgattcggtgatttgagtagccgattttcttcgagcaaactgaacattattgtgctgccaaaagctgtcggtgggcaagcccctggtcactgcagacatgcagaaacagcataaaccatacattcaggattctcggcagacaaaatgatgtttttaggaagtgtggttttctcagtctctgtttgaaccacaacataccaaactgaatcaagtgataattgtgttctgaccatacgccaagttatacctgaaacttctgcttcatatgttcacccatcataaagatgccaacaaaagttcaggttagcagcgaaaggaatgtgaagatcatatcaggtcgagatgggcaaaagaagggaaattcacagcatgaccaaattgtacgcgtgccaaaggacatggtcacaccagtcaatggaaatgtagatggaaaatttgaagataaagttagagttgtgaagaatgataagttccgaagacaacgagagtcttggggtggggaaagggctgcatgcatgaagggctcaaaaccatggcctggtcgaaaggcaactactgttgatgaacttgtcaaacatatgtcaaatgttccttcatatttacagcgtaaagaaacttctgagcatcttcaagacaaggcgctgaatgttggagttcttgagtggggtcttcttgctaactggtctcagcaacaaaagcatgagctcgctagaagccatggagcatctccatccaatactagcaggtctgtactattctcatctccatcacattcttctgcaagccccagcagcagatctcttgagagcaatcaatctaccccaattagtgactatcatcattcatccatccgagcccagcagagtaggctcgcagataaacaccatgggaaggccagatgttcgcctagcccaaattctgcggtactgagcttattgccaggtcatggcacacatccctgtcaagagaatggttgtaattatgttgacttggatctcaacaatgtttctttagcctcagactctctaggttcttcctctcgaagttgcagtagacatgaaatagttgaagatgaagagactagatggaagattgaagatgttgtccatcattgttctcgtaggctttttacagacagtgataacattgggaaacatttcttcacatcaaataacaaagattccatgtgtaatgatcctgaacagagcagtggcttggattgtgaaaattttgagtcactaatatctgatgctgtgatggatacagctagaaatggcagtaggtcacctgattgtttcttggaggatattgagacatcccgtgaatttcctcgaatcccatattcatgtccacttcccatcatagattcagcagctaaagagattggcaccactagtactgaggctggagataattttattggtacagctgcaaaagtaagtaagaattctagcctaaaccaatctgccctgaatgccactgagaatcctccccgatattctgcaaagtttagtgataggatgcctgatcgccatcaaggttctgtgatgaatcgagtgagccgcagctctagcctcaaggagtcaccacatgctcgacaacccaatgtagttcctcctgttgataagacaggagatcggtcatcacccaacagcaaaggtaggcgaagcccattgaggaggatgttagatccaatattaaagccaagacattctagtccaatacgaccttcatttgttccaaaatgtcatcttccagtcaataccaccaagcaatctctggacttagggggatcagtgccacagaatatgcagcgaaggtcagttgatttggtagtcaattcgaattatcgaattgaagcaaatacaaatcagccacctcgtgtgctattgaacagtgcaagatacatccagaaagaaaaggattcaacaacaacaagacaagcatttctgcagctagcatggaagaatggcttgcctttattcatgctgtcttatggcgattctgatatcctggcagccactgttagaaggaagggcatctctgaaaaggatgatctggaaagcacatatgctgtattcactgttgaagaacctaagaaaaaaagtggagcttggatcaaggcagggggcaagaacaagaaacaccaccttttgtctagcatagttggggaaataaaggttgcacgtcgaaaatcaagatgtcaccatacagcagatgttcatgtatacagggaatttgtgttgcttggttccggatttctaccatcatctgaagaatcgggtgattcacatgttagtggagagtttgcggcttttattagtgcacttcctcagcaagaagcagaaacttcgaatcaatcatcttcacagaataccagacaaaaaaatttagcactaactggctgtggttgccccccactgggaaacttccagcctagttctgcttcagccaatgttattgcagtacttcctgatggcttccatggcaaatcaacgtctgggcagccgttgcctttgattgagaggtggaagtcaggaggagcttgtgactgtggcggatgggatgaaggttgcatgctgagtgtcctcactgatgcggccgaagaaaatgatgccgttcaggctaaccaggcaaaggatggcagccagcgatttgaacttctagctcagggtggatcacgagaagataggcatgccttcagtatgacttcattcaaagaggggctttatacagtggaattcagatcatccattgcattacttcaagcttttgcaatgtgtatagtgatgctacatgggaggtaccctgacaggctgcaagttggttcgcaagcagcgcaggagcatgacctccttgctggtcatgaggtcaaggccatggtagccagtcaaggaagagctccgaccagctatgtgccccaccgtccacctctttctcctgtgggccgagcctagcttatcgcgattaaatgtatgttctttgtgtgtctgtgtcctctttctccttcagtcgcgtagtgctggtgggattgatataccatggtcctcaggcccatatgcaatacgcatattgaaagtgacaatctcagaacaatcaatcggctttagaggtagctacctgtacatgttgtgatgttgatgttgtatgactgtactatgatgcggctgcaaggcccatctcggtgattactcacccgttatatgttctcttatcagttgcttctgt

SEQ ID NO: 92255 - DNA, 228 bp, Zea Mays
gtacaaaaaaatctggagtggccatgctgcaatgggtcccgaaagggttggggcacggccgccttgcgaggcaacaccaaggagcttaaagatcctggggccatagccgacatagagtccttagtgcctaagtgtcatcgtgttttagggcctagactgccccgaacacttaacttcataatgcctcagggcacaaagggccccgaggacttaggcttattctcatga

SEQ ID NO: 92256 - DNA, 1900 bp, Zea Mays
atcatttcccgaagcttcgcatccgtccttcggtccttcctcacccgttcgtctgtctcgcctcacccacccacccacagcatcagaacggagggaattagggagcttcggccggatccgcaacatcggggaacggcgggaaccagggagctcccgccgcctagaaccggagctcccaatcgatccactggccgttgagccgacacttcaatggaagcccacgcctcgcggggccgccgcaccctggaggagattcggcagaagagagccgcggagaggatgcaacacgccgtcccgatcgcggcgtctcacgtcgactctcacgggaaccaaagagctggagctgagcatcttgctcgagttcaagaacttgaaaatggcaacacggaattggagagggaaaacaaaatgctcttgtccaagatcgctgagaaggaagttgagaaggacgcccttgtaaaccgtttgaatgatctcgagcggaatgtagtgccctctttgaaaaaaagcttgaatgacatttatttggagaaagatgctgctgtagttgctaaggaggatgctctagctcaactcaggagcatgaagaaacgactcaaggaagcagaggaagaacagtatagggcagaagaagactcggcctccttgagagcacagctaaataccctgcagcagcaaatgggccacacttacagtggatatacaatgggaacatcaagtgaggaatctgttgccatggaaaaggagatacaagatttacaggcacagctaaagcaagagtcactgctaaggcaacaggagcaacaacaattagctgaacaatcccagctgaggcaacaagagcaagaaaaactagccaaagagcaaacccgtattgcttctctggaggctgaaaagcaacagttggaagaccaaattactatgttgacaaagaaagctacagaggacgcttctgagtttgctgcacgcaaggcattttcaatgcaagatagggaaaaacttgaacagcagttgcatgacatggctttgatgattgagaggctagaggggagtcgtcaaaaactgctaatggagattgattctcaatcgtcagaaatagagaaactgtttgaggagaactcagccttatctgcttcttatcaagaagccattgatgttactgtacaatgggaaaaccagaaaatttcaggttagagactgtctgaagcaaaatgaagagctccgttctcacttggagaaactaagacttgaacaagttagcctgttgaaagtaagcaatatcgctacccaatcagatgggcaaactgaaaacagtatctcaaacccaccacaaatggtcatcgagaatatttctctaaaggatcagcttataaaagaacagagcagatctgaggggttgtcggcagagataatgaaactttcagctgagcttaggaaagcagtccatgcacagaataaccttgcacgcttatacagacctgtattaagagacattgagagcaatctgatgaaaatgaaacaagaaacttatgcgacgatccagtgatacatgttgacatgttgtgaaactcagtcctctggcatggccgcatgggctccacgttactgattttcgtcgtggatgtatttatctcatgccatcttcaagatgctggtgcaaagcagttcttttcgtggccaccatttataagtagagttcagtcgagatcgttgtacttgtatcatactcatgtatacccgattcccagactggttcatctcgtaaattggaagcgatgtttggatgcctatgtatcaagtggatcataaacatccaaacaacgccttaaaatagatcgtttcgacattattattttcctgcttgcaatccaggctctaacaacttctcggtcttgtttaa

SEQ ID NO: 92257 - DNA, 1954 bp, Zea Mays
gctcttaccggcgtggttcgacttctacaacaaacatggcatctgtctcaccctgccctctttcatcatttcccgaagcttcgcatccgtccttcggtccttcctcacccgttcgtctgtctcgcctcacccacccacccacagcatcagaacggagggaattagggagcttcggccggatccgcaacatcggggaacggcgggaaccagggagctcccgccgcctagaaccggagctcccaatcgatccactggccgttgagccgacacttcaatggaagcccacgcctcgcggggccgccgcaccctggaggagattcggcagaagagagccgcggagaggatgcaacacgccgtcccgatcgcggcgtctcacgtcgactctcacgggaaccaaagagctggagctgagcatcttgctcgagttcaagaacttgaaaatggcaacacggaattggagagggaaaacaaaatgctcttgtccaagatcgctgagaaggaagttgagaaggacgcccttgtaaaccgtttgaatgatctcgagcggaatgtagtgccctctttgaaaaaaagcttgaatgacatttatttggagaaagatgctgctgtagttgctaaggaggatgctctagctcaactcaggagcatgaagaaacgactcaaggaagcagaggaagaacagtatagggcagaagaagactcggcctccttgagagcacagctaaataccctgcagcagcaaatgggccacacttacagtggatatacaatgggaacatcaagtgaggaatctgttgccatggaaaaggagatacaagatttacaggcacagctaaagcaagagtcactgctaaggcaacaggagcaacaacaattagctgaacaatcccagctgaggcaacaagagcaagaaaaactagccaaagagcaaacccgtattgcttctctggaggctgaaaagcaacagttggaagaccaaattactatgttgacaaagaaagctacagaggacgcttctgagtttgctgcacgcaaggcattttcaatgcaagatagggaaaaacttgaacagcagttgcatgacatggctttgatgattgagaggctagaggggagtcgtcaaaaactgctaatggagattgattctcaatcgtcagaaatagagaaactgtttgaggagaactcagccttatctgcttcttatcaagaagccattgatgttactgtacaatgggaaaaccaggttagagactgtctgaagcaaaatgaagagctccgttctcacttggagaaactaagacttgaacaagttagcctgttgaaagtaagcaatatcgctacccaatcagatgggcaaactgaaaacagtatctcaaacccaccacaaatggtcatcgagaatatttctctaaaggatcagcttataaaagaacagagcagatctgaggggttgtcggcagagataatgaaactttcagctgagcttaggaaagcagtccatgcacagaataaccttgcacgcttatacagacctgtattaagagacattgagagcaatctgatgaaaatgaaacaagaaacttatgcgacgatccagtgatacatgttgacatgttgtgaaactcagtcctctggcatggccgcatgggctccacgttactgattttcgtcgtggatgtatttatctcatgccatcttcaagatgctggtgcaaagcagttcttttcgtggccaccatttataagtagagttcagtcgagatcgttgtacttgtatcatactcatgtatacccgattcccagactggttcatctcgtaaattggaagcgatgtttggatgcctatgtatcaagtggatcataaacatccaaacaacgccttaaaatagatcgtttcgacattattattttcctgcttgcaatccaggctctaacaacttctcggtcttgtttaa

SEQ ID NO: 92258 - DNA, 2026 bp, Zea Mays
gctcttaccggcgtggttcgacttctacaacaaacatggcatctgtctcaccctgccctctttcatcatttcccgaagcttcgcatccgtccttcggtccttcctcacccgttcgtctgtctcgcctcacccacccacccacagcatcagaacggagggaattagggagcttcggccggatccgcaacatcggggaacggcgggaaccagggagctcccgccgcctagaaccggagctcccaatcgatccactggccgttgagccgacacttcaatggaagcccacgcctcgcggggccgccgcaccctggaggagattcggcagaagagagccgcggagaggatgcaacacgccgtcccgatcgcggcgtctcacgtcgactctcacgggaaccaaagagctggagctgagcatcttgctcgagttcaagaacttgaaaatggcaacacggaattggagagggaaaacaaaatgctcttgtccaagatcgctgagaaggaagttgagaaggacgcccttgtaaaccgtttgaatgatctcgagcggaatgtagtgccctctttgaaaaaaagcttgaatgacatttatttggagaaagatgctgctgtagttgctaaggaggatgctctagctcaactcaggagcatgaagaaacgactcaaggaagcagaggaagaacagtatagggcagaagaagactcggcctccttgagagcacagctaaataccctgcagcagcaaatgggccacacttacagtggatatacaatgggaacatcaagtgaggaatctgttgccatggaaaaggagatacaagatttacaggcacagctaaagcaagagtcactgctaaggcaacaggagcaacaacaattagctgaacaatcccagctgaggcaacaagagcaagaaaaactagccaaagagcaaacccgtattgcttctctggaggctgaaaagcaacagttggaagaccaaattactatgttgacaaagaaagctacagaggacgcttctgagtttgctgcacgcaaggcattttcaatgcaagatagggaaaaacttgaacagcagttgcatgacatggctttgatgattgagaggctagaggggagtcgtcaaaaactgctaatggaggtgcttaatgccgctttactttttgaattgtactagtctcaaatgttgattattttttaccgcggtagacagattgattctcaatcgtcagaaatagagaaactgtttgaggagaactcagccttatctgcttcttatcaagaagccattgatgttactgtacaatgggaaaaccaggttagagactgtctgaagcaaaatgaagagctccgttctcacttggagaaactaagacttgaacaagttagcctgttgaaagtaagcaatatcgctacccaatcagatgggcaaactgaaaacagtatctcaaacccaccacaaatggtcatcgagaatatttctctaaaggatcagcttataaaagaacagagcagatctgaggggttgtcggcagagataatgaaactttcagctgagcttaggaaagcagtccatgcacagaataaccttgcacgcttatacagacctgtattaagagacattgagagcaatctgatgaaaatgaaacaagaaacttatgcgacgatccagtgatacatgttgacatgttgtgaaactcagtcctctggcatggccgcatgggctccacgttactgattttcgtcgtggatgtatttatctcatgccatcttcaagatgctggtgcaaagcagttcttttcgtggccaccatttataagtagagttcagtcgagatcgttgtacttgtatcatactcatgtatacccgattcccagactggttcatctcgtaaattggaagcgatgtttggatgcctatgtatcaagtggatcataaacatccaaacaacgccttaaaatagatcgtttcgacattattattttcctgcttgcaatccaggctctaacaacttctcggtcttgtttaa

SEQ ID NO: 92259 - DNA, 2823 bp, Zea Mays
ctctcgcttttctgttccgcgcagcaacgacgcggttgcttctccccacggcggcatctcctgcgcggcggcgccgcccccgcgagagccgcgacggcgcactaggcgagttactggacacgggagcgatgggggacggcgccagcggccgcggcggtcgaagcggcgccgggcgccgggtgggggagtacgagctgctgcgaccgattgggtcgggagcctactcgcaggtgtggctgggacggcaccgggtgcggggcacggaggtggcggtgaaggagatcgccatggaacgtctcagcaaaaagctccgcgagagcctcctctccgaggtcgacatccttcgtcgcatccgacacgataacgtcatcgcactccacgactccgtcaaggatcatgggagtatatatctcatactggagtattgtcgaggtggtgacttacatgcataccttcaacgtcataaaagagtttctgaaaaggttgctaagcacttcatccgtcagttagcatctggtctgaaaatgcttcgcgataataacgtggttcaccgagacctaaaacctcagaacattcttcttgttgaaaataatgaaaatactctgttgaagattgccgactttggatttgcaaaatttttgcaaccctttgccctagccgaaacactttgtggttcaccactttacatggctccagaagtcatgcaaggtcagaagtatgatgcaaaggcagatctgtggagtgttggtgtcattctatatcaacttgttactggaataccaccttttaatggggacaatcagatacagttgcttaaaaatatactcaggacgcatgaaatacgattaccatctgattgtgaattgagccatgactgcatcgacttgtgcagaaagttgctgcggctcaattcagtggagcggcttacagttgaagaatttgtgcaccacccatttctttctgaacatgctccagagaggaccttgagccggacattatctgaaataagagatggctttccaataaataatatcagtccaacaaggccttcaagccaaagttcacaagaagattgtatgccttttcctttggatgatgagtcaagtggacaggatgagggtccaattcctgacagtaagagtccgatgaaatcttatgggtttcccacaggtaaaagattggataaaacttcaggccagagtccatcaaaacataccagtctgttctccaggtatgtcttgggaaataatcatgcacctagtagccaacaccatggccatactgataaaatgaccaaggaaagcaagattcatgaagtgcaaggtccaaaaggtgtttatccagaaggtatggaagtcattagtagtgcaattcctcatttttattatgaacaatccttactgaaattattatttcattactttgtaaatgtagattcccctatcattgattcattagagtttgtagatcaggaatatgtatttgtgtctggaccacacccagagggatcatcgtcttcaacaaatgcttctcagcagcttaacttaccggcaaaatatgataatttatctgtttcaccaccgaagttaactttcttgagtgcaccaatgccgataaacggtttgccgattaatagacaacaatctgctgggactggtagcttcgacagccactattctcctgcatctgtcatttcacagggatctgcggatataagtgatgccatggatcagcccccatctgattatctgacgaggattagattgttagagcaatatgcatcagccatagcagggttggtcagggatgagatcaaaggtggcaggcacttggtggcgttctctattcagctaattgttcttgcaacctggaagcaagcaattcatttatgcaatacctttgtagcttcacttgcaagggagagtccctcacaggatatccatatgaaggggcttagtgctgatgcttcgcatttgcttgcgaactcaaagctagctgatgatgtctgcgtgcagatagagaaacagtttctctccgaagttgaatatgcggaagaactagccagcactgtgggacagatagctgatggtacagagatgccagatgcaatcgaaatgatatttcagtctgctttacttacaggaaggcgaggcggtgtaagtaaagcacagtgtattccattacagaactagtctgacatgtttacatgtttaccacccattgtttcctcatcccaattcacaggttgatgagatgtttgggaaagcagcggatgccatgactgggtatacgagggcggtatccatgctgcggtttctcctgatcgaggcaccatcacttgccctcaaccctcctttgactctgacaagatccgatcggcatcgacttcgcacatacattgaagctctcaacaccaggctctgtcagatgcagagccagaggcattgactgctgccatgtgtcctcaaatcttgttcaggttgagggacggtagacttgtgcaatattttttcatttgtaaatatatttgttggcccaagataggacatgtaagatgtcagaaatttggaactaggcagagcagcgaaaatctattataactcgaccagactactattatgatatggaattaggtggagtgtacgtgttaggttcattctgtgtgaattcaggcagaagcttgaaaacgaaatgaccaatcatggtcacttgtggaaatgtaaactacttcgtagattctttattagtactctatttcgttcttttttatttgttgtggtttagttaaaaaaatgaattagctttcgacaaatattcgagaaa

SEQ ID NO: 92260 - DNA, 2562 bp, Zea Mays
ctctcgcttttctgttccgcgcagcaacgacgcggttgcttctccccacggcggcatctcctgcgcggcggcgccgcccccgcgagagccgcgacggcgcactaggcgagttactggacacgggagcgatgggggacggcgccagcggccgcggcggtcgaagcggcgccgggcgccgggtgggggagtacgagctgctgcgaccgattgggtcgggagcctactcgcaggtgtggctgggacggcaccgggtgcggggcacggaggtggcggtgaaggagatcgccatggaacgtctcagcaaaaagctccgcgagagcctcctctccgaggtcgacatccttcgtcgcatccgacacgataacgtcatcgcactccacgactccgtcaaggatcatgggagtatatatctcatactggagtattgtcgaggtggtgacttacatgcataccttcaacgtcataaaagagtttctgaaaaggttgctaagcacttcatccgtcagttagcatctggtctgaaaatgcttcgcgataataacgtggttcaccgagacctaaaacctcagaacattcttcttgttgaaaataatgaaaatactctgttgaagattgccgactttggatttgcaaaatttttgcaaccctttgccctagccgaaacactttgtggttcaccactttacatggctccagaagtcatgcaaggtcagaagtatgatgcaaaggcagatctgtggagtgttggtgtcattctatatcaacttgttactggaataccaccttttaatggggacaatcagatacagttgcttaaaaatatactcaggacgcatgaaatacgattaccatctgattgtgaattgagccatgactgcatcgacttgtgcagaaagttgctgcggctcaattcagtggagcggcttacagttgaagaatttgtgcaccacccatttctttctgaacatgctccagagaggaccttgagccggacattatctgaaataagagatggctttccaataaataatatcagtccaacaaggccttcaagccaaagttcacaagaagattgtatgccttttcctttggatgatgagtcaagtggacaggatgagggtccaattcctgacagtaagagtccgatgaaatcttatgggtttcccacaggtaaaagattggataaaacttcaggccagagtccatcaaaacataccagtctgttctccaggtatgtcttgggaaataatcatgcacctagtagccaacaccatggccatactgataaaatgaccaaggaaagcaagattcatgaagtgcaaggtccaaaaggtgtttatccagaagatcaggaatatgtatttgtgtctggaccacacccagagggatcatcgtcttcaacaaatgcttctcagcagcttaacttaccggcaaaatatgataatttatctgtttcaccaccgaagttaactttcttgagtgcaccaatgccgataaacggtttgccgattaatagacaacaatctgctgggactggtagcttcgacagccactattctcctgcatctgtcatttcacagggatctgcggatataagtgatgccatggatcagcccccatctgattatctgacgaggattagattgttagagcaatatgcatcagccatagcagggttggtcagggatgagatcaaaggtggcaggcacttggtggcgttctctattcagctaattgttcttgcaacctggaagcaagcaattcatttatgcaatacctttgtagcttcacttgcaagggagagtccctcacaggatatccatatgaaggggcttagtgctgatgcttcgcatttgcttgcgaactcaaagctagctgatgatgtctgcgtgcagatagagaaacagtttctctccgaagttgaatatgcggaagaactagccagcactgtgggacagatagctgatggtacagagatgccagatgcaatcgaaatgatatttcagtctgctttacttacaggaaggcgaggcggtgttgatgagatgtttgggaaagcagcggatgccatgactgggtatacgagggcggtatccatgctgcggtttctcctgatcgaggcaccatcacttgccctcaaccctcctttgactctgacaagatccgatcggcatcgacttcgcacatacattgaagctctcaacaccaggctctgtcagatgcagagccagaggcattgactgctgccatgtgtcctcaaatcttgttcaggttgagggacggtagacttgtgcaatattttttcatttgtaaatatatttgttggcccaagataggacatgtaagatgtcagaaatttggaactaggcagagcagcgaaaatctattataactcgaccagactactattatgatatggaattaggtggagtgtacgtgttaggttcattctgtgtgaattcaggcagaagcttgaaaacgaaatgaccaatcatggtcacttgtggaaatgtaaactacttcgtagattctttattagtactctatttcgttcttttttat

SEQ ID NO: 92261 - DNA, 2681 bp, Zea Mays
ctctcgcttttctgttccgcgcagcaacgacgcggttgcttctccccacggcggcatctcctgcgcggcggcgccgcccccgcgagagccgcgacggcgcactaggcgagttactggacacgggagcgatgggggacggcgccagcggccgcggcggtcgaagcggcgccgggcgccgggtgggggagtacgagctgctgcgaccgattgggtcgggagcctactcgcaggtgtggctgggacggcaccgggtgcggggcacggaggtggcggtgaaggagatcgccatggaacgtctcagcaaaaagctccgcgagagcctcctctccgaggtcgacatccttcgtcgcatccgacacgataacgtcatcgcactccacgactccgtcaaggatcatgggagtatatatctcatactggagtattgtcgaggtggtgacttacatgcataccttcaacgtcataaaagagtttctgaaaaggttgctaagcacttcatccgtcagttagcatctggtctgaaaatgcttcgcgataataacgtggttcaccgagacctaaaacctcagaacattcttcttgttgaaaataatgaaaatactctgttgaagattgccgactttggatttgcaaaatttttgcaaccctttgccctagccgaaacactttgtggttcaccactttacatggctccagaagtcatgcaaggtcagaagtatgatgcaaaggcagatctgtggagtgttggtgtcattctatatcaacttgttactggaataccaccttttaatggggacaatcagatacagttgcttaaaaatatactcaggacgcatgaaatacgattaccatctgattgtgaattgagccatgactgcatcgacttgtgcagaaagttgctgcggctcaattcagtggagcggcttacagttgaagaatttgtgcaccacccatttctttctgaacatgctccagagaggaccttgagccggacattatctgaaataagagatggctttccaataaataatatcagtccaacaaggccttcaagccaaagttcacaagaagattgtatgccttttcctttggatgatgagtcaagtggacaggatgagggtccaattcctgacagtaagagtccgatgaaatcttatgggtttcccacaggtaaaagattggataaaacttcaggccagagtccatcaaaacataccagtctgttctccaggtatgtcttgggaaataatcatgcacctagtagccaacaccatggccatactgataaaatgaccaaggaaagcaagattcatgaagtgcaaggtccaaaaggtgtttatccagaaggtatggaagtcattagtagtgcaattcctcatttttattatgaacaatccttactgaaattattatttcattactttgtaaatgtagattcccctatcattgattcattagagtttgtagatcaggaatatgtatttgtgtctggaccacacccagagggatcatcgtcttcaacaaatgcttctcagcagcttaacttaccggcaaaatatgataatttatctgtttcaccaccgaagttaactttcttgagtgcaccaatgccgataaacggtttgccgattaatagacaacaatctgctgggactggtagcttcgacagccactattctcctgcatctgtcatttcacagggatctgcggatataagtgatgccatggatcagcccccatctgattatctgacgaggattagattgttagagcaatatgcatcagccatagcagggttggtcagggatgagatcaaaggtggcaggcacttggtggcgttctctattcagctaattgttcttgcaacctggaagcaagcaattcatttatgcaatacctttgtagcttcacttgcaagggagagtccctcacaggatatccatatgaaggggcttagtgctgatgcttcgcatttgcttgcgaactcaaagctagctgatgatgtctgcgtgcagatagagaaacagtttctctccgaagttgaatatgcggaagaactagccagcactgtgggacagatagctgatggtacagagatgccagatgcaatcgaaatgatatttcagtctgctttacttacaggaaggcgaggcggtgttgatgagatgtttgggaaagcagcggatgccatgactgggtatacgagggcggtatccatgctgcggtttctcctgatcgaggcaccatcacttgccctcaaccctcctttgactctgacaagatccgatcggcatcgacttcgcacatacattgaagctctcaacaccaggctctgtcagatgcagagccagaggcattgactgctgccatgtgtcctcaaatcttgttcaggttgagggacggtagacttgtgcaatattttttcatttgtaaatatatttgttggcccaagataggacatgtaagatgtcagaaatttggaactaggcagagcagcgaaaatctattataactcgaccagactactattatgatatggaattaggtggagtgtacgtgttaggttcattctgtgtgaattcaggcagaagcttgaaaacgaaatgaccaatcatggtcacttgtggaaatgtaaactacttcgtagattctttattagtactctatttcgttctttttta

SEQ ID NO: 92262 - DNA, 2098 bp, Zea Mays
atccggggccactaaacgcagatttcctcggttccttgtacgttcagggccggacgacggggacagacagcggtgtcgcggggccacctgcttcccaacgccgaccgcacctgctgccctgtcgtccgccctccttcccttctcctcccctccaactgtttcctcaacctcccgacccaaccacggccgtgcccgccaaggcgccaaccgcacagcagcagctggggtgctgacgtgctgtgggtggttctgttgtccatggcgcggaagcatcagcatgttgccatatttaccacagcgtgcctgccgtggatgactgggactgcggtaaacccactgtttcgggctgcataccttgccaaggctggagattgggaggtcacgctggtggtgccttggctgtccaagggggatcaggagctcgtttatccaaacaagatgaggttcagtttgccggcagagcaggaaaactatgtgcggcggtggcttgaggaacggactgggctgttgccgaagtttgacataaagttctatcctgggaagttttcaactgagaaaagaagtattctacctgttggagacatcagtcagacaatatctgatgataaagcggatattgcagtgctagaagagccagaacatcttacttggtaccaccatgggcggaggtggaaaagcaagttccaaaaagttataggtgttgttcacacaaactatttggaatacgtgaaaagagagaaaaatggatacattagtgcgtttatcttaaaacacattaattcttgggttacagacatctattgtcataaggttataagattgtctgcagcaactcaggatgttccaaggtctgtgatttgtaatgttcatggagttaaccccaaatttattgagattggcaaattgaaacatcagcagctatgccaaagagagcaagcattcttcaagggtgcatattatatcggaaagatggtatggagtaaaggttacacagagcttcttcagcttcttcataagcaccaaatggaattgtctggccttaaaatggagttgtatggcagtggggaagatgctgatgaagtaaaggcatcagctgagcgactgagcttagatattagagtctatccaggccgtgatcatggagattcaatatttcacgactacaaggtcttcataaacccaagtacaactgatgtggtatgcacaacaactgcagaagctttggcaatggggaagattgtgatctgtgcaaaccatccttcaaatgtttttttcaaaagatttcctaattgtcacatgtacaatactgatgaagagtttgtgagactaacaatgaaagctttggcagaagaacctatcccactgtcagatgatttgcggcatgaactttcctgggaggcagcaacagaaagatttattagggttgctgatattgcaccaactgtgcctgtgggacaaccaccaccctcctcacagcatttcatgcgcatctccccagatgaactgcagaagaacatggaagaggcatcggcatttttccataatacaatctctgggtttgaagctgtgcgttgtgtgttcggtgcaataccaaacacactgcagccggatgaacagcaatgcaaggaacttgggtggaatttgcagggatagcattagcttttcttgcgatgctgttgccatggaccatagaatgaaccagtctaactcaacggcaaaaagatgtgtcgctcggagaggttctcagattgatcaaacatacattctatgtggtgttctggtgtggcggcactgcattttttcttcatatatcaaaggcgttctgaagttcctggatgcatcgtatcttctgattgttaatcttaagcagtctgaagtgcacactagtattacagtctcatatatgtggactgtttttcatcgtgttgtttcccaggattgacgcgtgtgttgaaaatcttattgtataataatatgccccttgttttcgcagccatccatgctgaaacttttactacaccgcctaaaatctgtgtgctagttgatactacctgtgttctcgataaataaaaaagaacagaaaaagtaaaaaaaaaaa

SEQ ID NO: 92263 - DNA, 2076 bp, Zea Mays
atccggggccactaaacgcagatttcctcggttccttgtacgttcagggccggacgacggggacagacagcggtgtcgcggggccacctgcttcccaacgccgaccgcacctgctgccctgtcgtccgccctccttcccttctcctcccctccaactgtttcctcaacctcccgacccaaccacggccgtgcccgccaaggcgccaaccgcacagcagctggggtgctgacgtgctgtgggtggttctgttgtccatggcgcggaagcatcagcatgttgccatatttaccacagcgtgcctgccgtggatgactgggactgcggtaaacccactgtttcgggctgcataccttgccaaggctggagattgggaggtcacgctggtggtgccttggctgtccaagggggatcaggagctcgtttatccaaacaagatgaggttcagtttgccggcagagcaggaaaactatgtgcggcggtggcttgaggaacggactgggctgttgccgaagtttgacataaagttctatcctgggaagttttcaactgagaaaagaagtattctacctgttggagacatcagtcagacaatatctgatgataaagcggatattgcagtgctagaagagccagaacatcttacttggtaccaccatgggcggaggtggaaaagcaagttccaaaaagttataggtgttgttcacacaaactatttggaatacgtgaaaagagagaaaaatggatacattagtgcgtttatcttaaaacacattaattcttgggttacagacatctattgtcataaggttataagattgtctgcagcaactcaggatgttccaaggtctgtgatttgtaatgttcatggagttaaccccaaatttattgagattggcaaattgaaacatcagcagctatgccaaagagagcaagcattcttcaagggtgcatattatatcggaaagatggtatggagtaaaggttacacagagcttcttcagcttcttcataagcaccaaatggaattgtctggccttaaaatggagttgtatggcagtggggaagatgctgatgaagtaaaggcatcagctgagcgactgagcttagatattagagtctatccaggccgtgatcatggagattcaatatttcacgactacaaggtcttcataaacccaagtacaactgatgtggtatgcacaacaactgcagaagctttggcaatggggaagattgtgatctgtgcaaaccatccttcaaatgtttttttcaaaagatttcctaattgtcacatgtacaatactgatgaagagtttgtgagactaacaatgaaagctttggcagaagaacctatcccactgtcagatgatttgcggcatgaactttcctgggaggcagcaacagaaagatttattagggttgctgatattgcaccaactgtgcctgtgggacaaccaccaccctcctcacagcatttcatgcgcatctccccagatgaactgcagaagaacatggaagaggcatcggcatttttccataatacaatctctgggtttgaagctgtgcgttgtgtgttcggtgcaataccaaacacactgcagccggatgaacagcaatgcaaggaacttgggtggaatttgcagggatagcattagcttttcttgcgatgctgttgccatggaccatagaatgaaccagtctaactcaacggcaaaaagatgtgtcgctcggagaggttctcagattgatcaaacatacattctatgtggtgttctggtgtggcggcactgcattttttcttcatatatcaaaggcgttctgaagttcctggatgcatcgtatcttctgattgttaatcttaagcagtctgaagtgcacactagtattacagtctcatatatgtggactgtttttcatcgtgttgtttcccaggattgacgcgtgtgttgaaaatcttattgtataataatatgccccttgttttcgcagccatccatgctgaaacttttactacaccgcctaaaatctgtgtgctagttgatactacctgtgttctcgataaataaaaaagaaca

SEQ ID NO: 92264 - DNA, 1653 bp, Zea Mays
atccggggccactaaacgcagatttcctcggttccttgtacgttcagggccggacgacggggacagacagcggtgtcgcggggccacctgcttcccaacgccgaccgcacctgctgccctgtcgtccgccctccttcccttctcctcccctccaactgtttcctcaacctcccgacccaaccacggccgtgcccgccaaggcgccaaccgcacagcagcagctggggtgctgacgtgctgtgggtggttctgttgtccatggcgcggaagcatcagcatgttgccatatttaccacagcgtgcctgccgtggatgactgggactgcggtaaacccactgtttcgggctgcataccttgccaaggctggagattgggaggtcacgctggtggtgccttggctgtccaagggggatcaggagctcgtttatccaaacaagatgaggttcagtttgccggcagagcaggaaaactatgtgcggcggtggcttgaggaacggactgggctgttgccgaagtttgacataaagttctatcctgggaagttttcaactgagaaaagaagtattctacctgttggagacatcagtcagacaatatctgatgataaagcggatattgcagtgctagaagagccagaacatcttacttggtaccaccatgggcggaggttataagattgtctgcagcaactcaggatgttccaaggtctgtgatttgtaatgttcatggagttaaccccaaatttattgagattggcaaattgaaacatcagcagctatgccaaagagagcaagcattcttcaagggtgcatattatatcggaaagatggtatggagtaaaggttacacagagcttcttcagcttcttcataagcaccaaatggaattgtctggccttaaaatggagttgtatggcagtggggaagatgctgatgaagtaaaggcatcagctgagcgactgagcttagatattagagtctatccaggccgtgatcatggagattcaatatttcacgactacaaggtcttcataaacccaagtacaactgatgtggtatgcacaacaactgcagaagctttggcaatggggaagattgtgatctgtgcaaaccatccttcaaatgtttttttcaaaagatttcctaattgtcacatgtacaatactgatgaagagtttgtgagactaacaatgaaagctttggcagaagaacctatcccactgtcagatgatttgcggcatgaactttcctgggaggcagcaacagaaagatttattagggttgctgatattgcaccaactgtgcctgtgggacaaccaccaccctcctcacagcatttcatgcgcatctccccagatgaactgcagaagaacatggaagaggcatcggcatttttccataatacaatctctgggtttgaagctgtgcgttgtgtgttcggtgcaataccaaacacactgcagccggatgaacagcaatgcaaggaacttgggtggaatttgcagggatagcattagcttttcttgcgatgctgttgccatggaccatagaatgaaccagtctaactcaacggcaaaaagatgtgtcgctcggagaggttctcagattgatcaaacatacattctatgtggtgttctggtgtggcggcactgc

SEQ ID NO: 92265 - DNA, 1283 bp, Zea Mays
gtcgggcgctcagatccatctgactcgccatgctttcggtaaaacccccgcaggtcatgctcaactttctcaaggacttcgagagcaagcttggcatcaagatcacctgctcgcaggagacggagcccctcgggaccgcaggcccgctggccctggcccgcgacaagctcgccgacggatccggcgaccctttcttcgtgctcaacagcgacgtgatcagcgagtacccgttcgccgagctcattgagttccacagggcccacggcggcgaggccacgatcatggtgaccaaggtcgacgagccgtccaagtacggcgtggtggtcatggaggagggcaccggcaaggtggagcggttcgtggagaagcccaaggcgttcgtgggcaacaagatcaacgccggcatctacctgctcaacccgtccgtgctcggccgcatcgagctgaagccgacgtccatcgagaaggaggtgttcccgcgcgtcgcggcggacggggccctcttcgccatggttctcccgggtttctggatggacatcgggcagccgagggactacatcacgggcctgcgcctgtacctggactcgctgcggaagaaggcgcccgccaggctcgcgtcgggcgcgcacgtcctgggcaacgtgctggtgcacgagaccgcggtcatcggggacggctgcctcatcgggcccgacgtcgcggtcgggccaggctgcgtggtggaggccggggtgcgcctgtcccgctgcaccgtcatgcgcgccgcgcgcgtcaagcagcacgcctgcgtctccagcagcatcatcggctggcactccaccgtcggcaagtgggcgcgcgtcgagaacatgaccatcctcggcgaggacgtccacgtctgcgacgagatctacagcaacggcggcgtcgtgctcccgcacaaggagatcaaatccagcatcctcaagcccgagatcgtcatgtgatccgggagtaaatctggggcgccaaatccaaatcacaaggggcccttgcattgcattgcattgcatcgcatcgcatcccatcccatcccgatatgcttcatacttttgttgtttgattttttgctcggttgtttgtctgcaagtgtaaccagttgtcgagtgtttaatttgtcggctatatagactattttcaagtttcgctccgtgcttgtagataggtatcagtcgtctatcagatgagtggaaataacaacttctcttcgtatactacaagttgagcaactccgttctaggtctattgcagatttgttggaattg

SEQ ID NO: 92266 - DNA, 1890 bp, Zea Mays
ccccgccatttccttcaacttctgctaaatagcctaatacccccatcggccgatcggctcctctacctgcatttgccgattggcgtcttcctcgtcaacgaccagatccatcccctctccacccggggacggggggtctagaacgtcgtcaggtcgtccttatccgcgtgctggccttcggatttcggctgccgcgttggtttaacacaaaccacgcgtccatgcctgccgcttccgcaggctccatgccactgccacctgggtgggttttctttccgggggcacatcacacatggcgtccgtccgcgtaggcacagaaggcttctcctggagttcagtggctattccctactaactgctaactggcagcagcttctggatcgggccatcggggtcggtggatctcactgttttcttttcctgctgcttgctgcatttttcgcagggtgtgggagctgagttgggaggaggactgctgctgcagccatgaaggccctcattctcgtcggaggcttcggcacccgcctgcgcccgctcacgctcagcgtgcccaagccgctcgtggatttcggcaacaagcccatgatcctgcaccagatcgaggctctgaaggaagttggtgttacagaggttgtcctggccatcaattaccagcctgaggtcatgctcaactttctcaaggacttcgagagcaagcttggcatcaagatcacctgctcgcaggagacggagcccctcgggaccgcaggcccgctggccctggcccgcgacaagctcgccgacggatccggcgaccctttcttcgtgctcaacagcgacgtgatcagcgagtacccgttcgccgagctcattgagttccacagggcccacggcggcgaggccacgatcatggtgaccaaggtcgacgagccgtccaagtacggcgtggtggtcatggaggagggcaccggcaaggtggagcggttcgtggagaagcccaaggcgttcgtgggcaacaagatcaacgccggcatctacctgctcaacccgtccgtgctcggccgcatcgagctgaagccgacgtccatcgagaaggaggtgttcccgcgcgtcgcggcggacggggccctcttcgccatggttctcccgggtttctggatggacatcgggcagccgagggactacatcacgggcctgcgcctgtacctggactcgctgcggaagaaggcgcccgccaggctcgcgtcgggcgcgcacgtcctgggcaacgtgctggtgcacgagaccgcggtcatcggggacggctgcctcatcgggcccgacgtcgcggtcgggccaggctgcgtggtggaggccggggtgcgcctgtcccgctgcaccgtcatgcgcgccgcgcgcgtcaagcagcacgcctgcgtctccagcagcatcatcggctggcactccaccgtcggcaagtgggcgcgcgtcgagaacatgaccatcctcggcgaggacgtccacgtctgcgacgagatctacagcaacggcggcgtcgtgctcccgcacaaggagatcaaatccagcatcctcaagcccgagatcgtcatgtgatccgggagtaaatctggggcgccaaatccaaatcacaaggggcccttgcattgcattgcattgcatcgcatcgcatcccatcccatcccgatatgcttcatacttttgttgtttgattttttgctcggttgtttgtctgcaagtgtaaccagttgtcgagtgtttaatttgtcggctatatagactattttcaagtttcgctccgtgcttgtagataggtatcagtcgtctatcagatgagtggaaataacaacttctcttcgtatactacaagttgagcaactccgttctaggtctattgcagatttgttggaattg

SEQ ID NO: 92267 - DNA, 1830 bp, Zea Mays
tacggatagagctatagatggatcacgcattcaggccctgatgcgagcgctccccccgccatttccttcaacttctgctaaatagcctaatacccccatcggccgatcggctcctctacctgcatttgccgattggcgtcttcctcgtcaacgaccagatccatcccctctccacccggggacggggggtctagaacgtcgtcaggtcgtccttatccgcgtgctggccttcggatttcggctgccgcgttggtttaacacaaaccacgcgtccatgcctgccgcttccgcaggctccatgccactgccacctgggtgggttttctttccgggggcacatcacacatggcgtccgtccgcgtaggcacagaaggcttctcctggaggtgtgggagctgagttgggaggaggactgctgctgcagccatgaaggccctcattctcgtcggaggcttcggcacccgcctgcgcccgctcacgctcagcgtgcccaagccgctcgtggatttcggcaacaagcccatgatcctgcaccagatcgaggctctgaaggaagttggtgttacagaggttgtcctggccatcaattaccagcctgaggtcatgctcaactttctcaaggacttcgagagcaagcttggcatcaagatcacctgctcgcaggagacggagcccctcgggaccgcaggcccgctggccctggcccgcgacaagctcgccgacggatccggcgaccctttcttcgtgctcaacagcgacgtgatcagcgagtacccgttcgccgagctcattgagttccacagggcccacggcggcgaggccacgatcatggtgaccaaggtcgacgagccgtccaagtacggcgtggtggtcatggaggagggcaccggcaaggtggagcggttcgtggagaagcccaaggcgttcgtgggcaacaagatcaacgccggcatctacctgctcaacccgtccgtgctcggccgcatcgagctgaagccgacgtccatcgagaaggaggtgttcccgcgcgtcgcggcggacggggccctcttcgccatggttctcccgggtttctggatggacatcgggcagccgagggactacatcacgggcctgcgcctgtacctggactcgctgcggaagaaggcgcccgccaggctcgcgtcgggcgcgcacgtcctgggcaacgtgctggtgcacgagaccgcggtcatcggggacggctgcctcatcgggcccgacgtcgcggtcgggccaggctgcgtggtggaggccggggtgcgcctgtcccgctgcaccgtcatgcgcgccgcgcgcgtcaagcagcacgcctgcgtctccagcagcatcatcggctggcactccaccgtcggcaagtgggcgcgcgtcgagaacatgaccatcctcggcgaggacgtccacgtctgcgacgagatctacagcaacggcggcgtcgtgctcccgcacaaggagatcaaatccagcatcctcaagcccgagatcgtcatgtgatccgggagtaaatctggggcgccaaatccaaatcacaaggggcccttgcattgcattgcattgcatcgcatcgcatcccatcccatcccgatatgcttcatacttttgttgtttgattttttgctcggttgtttgtctgcaagtgtaaccagttgtcgagtgtttaatttgtcggctatatagactattttcaagtttcgctccgtgcttgtagataggtatcagtcgtctatcagatgagtggaaataacaacttctcttcgtatactacaagttgagcaactccgttctaggtctattgcagatttgttggaattg

SEQ ID NO: 92268 - DNA, 1961 bp, Zea Mays
gcacagagccgccggaggtagcagcgtgtggcccgcgtgtcatcctgtgcgtaagctgctgctggtgggcgcccgctgtttaatctccgggtatccgggtaggtgggttctggcgggttgggacgagctcgggccagcaaatggttgctgcgaaatactacaaaaaagggagaagagacgaagaaaagctcgatgattaattggcggcgaagccagtacattaaacacttcgtcaaccccaaccgtagtagtgctcaaggggagacggaggaggaggaggaagcggtataaagccgcggcgtcgttcgtcggcagccgcgtcctgagtcgctcgcagtcgcagccgacgccttttcctcctccttgtcttcttcctcgctgcagctctcgccgccgaggtcctgggcgccgtcgacaaaccacctccctcccccgtctctcgtcgtctcggaaggaacggccgcccgtcgcgccaaggattcaaggtgcgtgcaccgcgcttcttgcagagagaagggtgtgggagctgagttgggaggaggactgctgctgcagccatgaaggccctcattctcgtcggaggcttcggcacccgcctgcgcccgctcacgctcagcgtgcccaagccgctcgtggatttcggcaacaagcccatgatcctgcaccagatcgaggctctgaaggaagttggtgttacagaggttgtcctggccatcaattaccagcctgaggtcatgctcaactttctcaaggacttcgagagcaagcttggcatcaagatcacctgctcgcaggagacggagcccctcgggaccgcaggcccgctggccctggcccgcgacaagctcgccgacggatccggcgaccctttcttcgtgctcaacagcgacgtgatcagcgagtacccgttcgccgagctcattgagttccacagggcccacggcggcgaggccacgatcatggtgaccaaggtcgacgagccgtccaagtacggcgtggtggtcatggaggagggcaccggcaaggtggagcggttcgtggagaagcccaaggcgttcgtgggcaacaagatcaacgccggcatctacctgctcaacccgtccgtgctcggccgcatcgagctgaagccgacgtccatcgagaaggaggtgttcccgcgcgtcgcggcggacggggccctcttcgccatggttctcccgggtttctggatggacatcgggcagccgagggactacatcacgggcctgcgcctgtacctggactcgctgcggaagaaggcgcccgccaggctcgcgtcgggcgcgcacgtcctgggcaacgtgctggtgcacgagaccgcggtcatcggggacggctgcctcatcgggcccgacgtcgcggtcgggccaggctgcgtggtggaggccggggtgcgcctgtcccgctgcaccgtcatgcgcgccgcgcgcgtcaagcagcacgcctgcgtctccagcagcatcatcggctggcactccaccgtcggcaagtgggcgcgcgtcgagaacatgaccatcctcggcgaggacgtccacgtctgcgacgagatctacagcaacggcggcgtcgtgctcccgcacaaggagatcaaatccagcatcctcaagcccgagatcgtcatgtgatccgggagtaaatctggggcgccaaatccaaatcacaaggggcccttgcattgcattgcattgcatcgcatcgcatcccatcccatcccgatatgcttcatacttttgttgtttgattttttgctcggttgtttgtctgcaagtgtaaccagttgtcgagtgtttaatttgtcggctatatagactattttcaagtttcgctccgtgcttgtagataggtatcagtcgtctatcagatgagtggaaataacaacttctcttcgtatactacaagttgagcaactccgttctaggtctattgcagatttgttggaattg

SEQ ID NO: 92269 - DNA, 1930 bp, Zea Mays
gcacagagccgccggaggtagcagcgtgtggcccgcgtgtcatcctgtgcgtaagctgctgctggtgggcgcccgctgtttaatctccgggtatccgggtaggtgggttctggcgggttgggacgagctcgggccagcaaatggttgctgcgaaatactacaaaaaagggagaagagacgaagaaaagctcgatgattaattggcggcgaagccagtacattaaacacttcgtcaaccccaaccgtagtagtgctcaaggggagacggaggaggaggaggaagcggtataaagccgcggcgtcgttcgtcggcagccgcgtcctgagtcgctcgcagtcgcagccgacgccttttcctcctccttgtcttcttcctcgctgcagctctcgccgccgaggtcctgggcgccgtcgacaaaccacctccctcccccgtctctcgtcgtctcggaaggaacggccgcccgtcgcgccaaggattcaagggtgtgggagctgagttgggaggaggactgctgctgcagccatgaaggccctcattctcgtcggaggcttcggcacccgcctgcgcccgctcacgctcagcgtgcccaagccgctcgtggatttcggcaacaagcccatgatcctgcaccagatcgaggctctgaaggaagttggtgttacagaggttgtcctggccatcaattaccagcctgaggtcatgctcaactttctcaaggacttcgagagcaagcttggcatcaagatcacctgctcgcaggagacggagcccctcgggaccgcaggcccgctggccctggcccgcgacaagctcgccgacggatccggcgaccctttcttcgtgctcaacagcgacgtgatcagcgagtacccgttcgccgagctcattgagttccacagggcccacggcggcgaggccacgatcatggtgaccaaggtcgacgagccgtccaagtacggcgtggtggtcatggaggagggcaccggcaaggtggagcggttcgtggagaagcccaaggcgttcgtgggcaacaagatcaacgccggcatctacctgctcaacccgtccgtgctcggccgcatcgagctgaagccgacgtccatcgagaaggaggtgttcccgcgcgtcgcggcggacggggccctcttcgccatggttctcccgggtttctggatggacatcgggcagccgagggactacatcacgggcctgcgcctgtacctggactcgctgcggaagaaggcgcccgccaggctcgcgtcgggcgcgcacgtcctgggcaacgtgctggtgcacgagaccgcggtcatcggggacggctgcctcatcgggcccgacgtcgcggtcgggccaggctgcgtggtggaggccggggtgcgcctgtcccgctgcaccgtcatgcgcgccgcgcgcgtcaagcagcacgcctgcgtctccagcagcatcatcggctggcactccaccgtcggcaagtgggcgcgcgtcgagaacatgaccatcctcggcgaggacgtccacgtctgcgacgagatctacagcaacggcggcgtcgtgctcccgcacaaggagatcaaatccagcatcctcaagcccgagatcgtcatgtgatccgggagtaaatctggggcgccaaatccaaatcacaaggggcccttgcattgcattgcattgcatcgcatcgcatcccatcccatcccgatatgcttcatacttttgttgtttgattttttgctcggttgtttgtctgcaagtgtaaccagttgtcgagtgtttaatttgtcggctatatagactattttcaagtttcgctccgtgcttgtagataggtatcagtcgtctatcagatgagtggaaataacaacttctcttcgtatactacaagttgagcaactccgttctaggtctattgcagatttgttggaattg

SEQ ID NO: 92270 - DNA, 819 bp, Zea Mays
gcacagagccgccggaggtagcagcgtgtggcccgcgtgtcatcctgtgcgtaagctgctgctggtgggcgcccgctgtttaatctccgggtatccgggtaggtgggttctggcgggttgggacgagctcgggccagcaaatggttgctgcgaaatactacaaaaaagggagaagagacgaagaaaagctcgatgattaattggcggcgaagccagtacattaaacacttcgtcaaccccaaccgtagtagtgctcaaggggagacggaggaggaggaggaagcggtataaagccgcggcgtcgttcgtcggcagccgcgtcctgagtcgctcgcagtcgcagccgacgccttttcctcctccttgtcttcttcctcgctgcagctctcgccgccgaggtcctgggcgccgtcgacaaaccacctccctcccccgtctctcgtcgtctcggaaggaacggccgcccgtcgcgccaaggattcaaggtgcgtgcaccgcgcttcttgcagagagaagggtgtgggagctgagttgggaggaggactgctgctgcagccatgaaggccctcattctcgtcggaggcttcggcacccgcctgcgcccgctcacgctcagcgtgcccaagccgctcgtggatttcggcaacaagcccatgatcctgcaccaggtcagcgcgattcctccgtctctgggacaaagttcagttctttgtttttagtcattagatacagcgcagggcgaaccggggaagttcatattcagttgtaggaattggctatggtttcctgttgctgaattgatactgtatttggttgttc

SEQ ID NO: 92271 - DNA, 273 bp, Zea Mays
atcggtgggggtgtccaaccgtccaaggccacctgttcactaatgcaagcttggaatgagctccagcctgccgcctgcctttggcattttgcccttgctttgggcgactacccaacgcacgcagtgacgcagacgcagatgcgcatgcgaggcggggtgctttcgtacaggactcctgagccgtcgcagttgcagttgcacgcccccaactcatctaggcgcttcctgcttactcgtcgtcgtcctcgttcgattgcgacgcgtccctgctga

SEQ ID NO: 92272 - DNA, 1148 bp, Zea Mays
cccctgtcacgggctcggccgctcggtctcgtagacagatgaagtgtgttggtgcctgcgtcgttctaatcaagttcgcatgaatgatgatgattcgctgcagcctgaccgccccgacgagctcgaacggatccacgcagcgggagggcgcgtcatcttctgggacggcgcccgcgtcttcggcatgctcgccatgtcccgagccatcggtgacagctacctgaagccgttcgtgatctccgacccggaggtgctggtggtggagaggaaggacggcgaggacgagttcctgatcctggccagcgacgggctgtgggacgtggtgagcaacgaggtggcgtgcaaggtcgtgcgcacctgcctccggaacagggcgccgcgcggtggccgggagcggtcgagcccgacctccaacctgagccctaggcagagcagcgccagcggcggcagcagcagcagcggggacgaggaggctggtgggcccagcggcgacggcgcggggtccgagagcgacggcgagagcgccgaggacagggcgtgcgccgaggcggccatcctgctgaccaagctagcgctggcgcggcagagcgccgacaacgtcagcgtcgtcgtcatcaacctcaggcggcgcccgcgatcgtgatcggtggtggtggctctgtgatggactagccgttcttggttggtttggttttctggccccctccgtaagttcaaatgggagcccggttcaccttcgcttcggcagagcaatcatcagacaagatgtcaaagcgaagatcgaacaaaatgtgagatccttagcaaaattgcatgctacttccttttacagtagtacagcaggactattgtttcgttagcgtttttttatgggtgggttgaggggtgcgtttctgatctggtcggacagatcatcccgcctttcttcccccggtaaattctccaaatagaaaagcgcatgcgtctccgatgtttgaagaaactttaccgtgcgtccgagagatttaattgtaatatatagtccagtgcccctttcactagccaaatgcccaaatccttccaaccttctctgactaagatcgtgatgtgctcctccggttccgtgtttcatgttttatataaataaatttgacccaccatgattgtcc

SEQ ID NO: 92273 - DNA, 1857 bp, Zea Mays
aaacgcaacccctctcgctctcaagcttcaaaatcccactagcgaaaggaaaacgggagaagctaggaagcagcagccgcggcatttcttccttgagcgttcgccttcggctgctcaacgcgtgcttcgtttcaggagagccttggtggcatctctgtttcatggccgagatctgctgtgaggcggcggcggcggcggcggggtcggaccagaagggggagtgcgccggcagccgcgcggcgcggcggcggaggatggagattcggcggctcagggtggtggccgaggaggcgtccgccaagaggcggaggctggaggcggatgaggaagacgcggttggggggcgagcgccgaggtacggcgtgacgtcggtctgcgggcggcggagagacatggaggacgcggtgaccgcccgtccggagttcatcaacggccaccacttcttcggggtgttcgacggccacggctgctcacatgtggcgacgtcgtgcggggagcggatgcaccagattgtggccgaggaggcgacagctgccgcaggctcgtcggtttcggacgagaccgcgcggtggaggggtgtcatggagaagagctacgcgaggatggacgccgaggccgtcgtctccagggagaccgccggcccggcgcccacctgccgttgcgagatgcagcttcccaagtgcgaccacgtgggctccactgccgtcgtggccgtggtggggcctcgccacctcgtcgtcgccaactgcggcgactcccgcgcggtcctctccagcggaggcgccacgatccctctctcagctgaccacaagcctgaccgccccgacgagctcgaacggatccacgcagcgggagggcgcgtcatcttctgggacggcgcccgcgtcttcggcatgctcgccatgtcccgagccatcggtgacagctacctgaagccgttcgtgatctccgacccggaggtgctggtggtggagaggaaggacggcgaggacgagttcctgatcctggccagcgacgggctgtgggacgtggtgagcaacgaggtggcgtgcaaggtcgtgcgcacctgcctccggaacagggcgccgcgcggtggccgggagcggtcgagcccgacctccaacctgagccctaggcagagcagcgccagcggcggcagcagcagcagcggggacgaggaggctggtgggcccagcggcgacggcgcggggtccgagagcgacggcgagagcgccgaggacagggcgtgcgccgaggcggccatcctgctgaccaagctagcgctggcgcggcagagcgccgacaacgtcagcgtcgtcgtcatcaacctcaggcggcgcccgcgatcgtgatcggtggtggtggctctgtgatggactagccgttcttggttggtttggttttctggccccctccgtaagttcaaatgggagcccggttcaccttcgcttcggcagagcaatcatcagacaagatgtcaaagcgaagatcgaacaaaatgtgagatccttagcaaaattgcatgctacttccttttacagtagtacagcaggactattgtttcgttagcgtttttttatgggtgggttgaggggtgcgtttctgatctggtcggacagatcatcccgcctttcttcccccggtaaattctccaaatagaaaagcgcatgcgtctccgatgtttgaagaaactttaccgtgcgtccgagagatttaattgtaatatatagtccagtgcccctttcactagccaaatgcccaaatccttccaaccttctctgactaagatcgtgatgtgctcctccggttccgtgtttcatgttttatataaataaatttgacccaccatgattgtcc

SEQ ID NO: 92274 - DNA, 1086 bp, Zea Mays
agcattatcggcgcatgtccacgttgattcatcaatcagttccacaatccacttgcctcggccgctatcgtgaccgggaacaacaactgcgagatggccacggtggagacctcgggcacggcgatagggtcctccgggagatgggcactacacggcaagacagccctcgtcaccggcggcacccgcggcatcgggcgtgcggtagtggaggagctggcggcgctgggggcggccgtgcacacatgctcccggaaggcggaggagctcggcgagcgcatcaaggagtgggaggccaggggattcagcgttaccgggtccgtctgcgacctctccgagagggaccagcgggagcggttgctccgcgaggttgccgaccgcttcggcggcaagctcaacatcctcgtaaacaatgtaggaacaaacataaggaaaccaactactgagtttactgcagaggaatactcgtttctgatggctactaatcttgaatctgcatatcacttgtgccaaattgcacatcctcttttgaaattatctgggtcaggcagcattatattcatatcatctgttgctggagcgataggaatctttagtggaactatatatgctatgactaaaggtgccattaaccagctaaccaagaatttagcttgtgaatgggctaaggacaacataagagccaactctgtcgctccgtggtacatcaccacttcacttacggaaggaattttggcaaataagaactttgaggaacaagttgtgagtcgaactccgcttggacgtgtcggagaacctggagaagtatcggcacttgttgcttttctttgcatgccgggttccacttatattagcggccagacgattgcggtcgacggaggtatgactgtgaacgggttttaccctcccaagccctaggcggcagctgccatgtttctttgtgctgaggaaacgacaatagctgttgttcttggttgttgagaaaaaaaatctaataaaatgtatgtaaaggtaaggttgtcatgttgatactgttcattacattacataattctatcagggcaatgtgaagaacgttgtgtttagatc

SEQ ID NO: 92275 - DNA, 281 bp, Zea Mays
tttctttttcatgtatttttctgatcaggaaaaataaaaaattatatcagttatttttaagttattctaatctcgtacacacaaaaatttgcaattattcatctactgttggaatctggaatctggatttttttatcgatgcaaattggatttggatagaagggtacattcttttattttagatagaagaaacatttcttctatctaaaataaaagaattttgctgatttatttattgctatatccaatttatagaattgatataccatttaattgatatc

SEQ ID NO: 92276 - DNA, 1022 bp, Zea Mays
aagaagtggaaatctaactagaaaggtggagagggtatacggcgggcgggcggccgctagaacgacgtcggcggtgggcgcgtcacagccgcgtgcccccactgcccgaacatgtcgtgcgggtgcggcggcgtctgcgggacggcgtacatggacggcggcacgacgggacccccgctgctctgctgctgctccagctgctgcgcggtggcgccctcggacgagccggacagcacggcgccctcctcggcgtctgcctggtccagcggcagcctctcgtaggtggcgttgccgaacgtggcggcgatcaccatgacggggcccgaagcgatgagctcccccatgacgctcccgcccaccacctgcccctgcccccccgccaggtacacggtgagccccgtggcccccggcggcgccggcgccgggaggaaagccccggacatggacagtatctcgaagcggccgcgcagcgcgacggccgctgccccgcctgcccccgcgggctcccgcagcgtgacgttggtgaccgcgcccgtgccgctgaggacggagacgccgcgctggcggcggcgggagaagcccgcgatggcgtcgacgatgtcggcgccgctggcgatctccagcacgtgggagcgcatcgcgttggggctctcccgcgtcaccaccacgggcggcttcggcttgttcttggaccccgggggcctcccgcgcggccggcgaggacctcctcccgccccggcaggcggcgggggcgacgcgtcgtcctcgtcgttgttgttgttgctgctgtcgggacccgcgccgacgtgggagtgggagtgggcgtagccgtggtggcggccctgctgcagcgagtggccgccgtcgaggctccccatctcctcggccgccgcgctgccggccggccaccggtttgccagccctactattttcgtagccgtattgaacacggcgcggcgagaaaatcagctggaggatgtctctgagctaccgagccagcctctctccctagtccctatata

SEQ ID NO: 92277 - DNA, 1686 bp, Zea Mays
atccccaggaaggcgcaggccacggtccccatccccaggaaggcgcaggccacggtccccatccccaggaagacgcagacctttatcgccagagggaaggaggagtaccagtccgtacaatagcaggagtcctaatcgctctcgccagagtttaagtaaagatactgagaaagaaacaaatggcaccccttccgttaaggacagagttgtgcactcaagggggcaagaacaaaaatcagatgataataatagggatggtgcaaggattgttggcaataattccccagattctgagcatagattgtcaaagtccttgaggcctcctaactatgaagaaaggaattccacacgtgacagagaggtctcatattcaatttggcagttcttacaagaactcagacaaacctatacctagtcagggcagcacagatacaagtggagatgaggaacacagtcgtgctagagaaaatgcccggaaagcaaattcatgtcgtaggaaaacaaaggatctctcggcaggtctgcaacctaagaaaatcagtgctggtgactcaagccccagagacaaatctccattcattttacaacagagtggcaaggtcgtccaaaagaaacaccccgatcaattgtcagaatcatcagaagatgagcttgctggtagaagaacaaagcatcaaactgattcacctgatgattctcgtcgaaaacagcattccccgactagaattgaaaatgatgagtcttattcaaagggtggtagaaacagtgagcatgtcatgagaggtttgcgtgatgattctgatgatgctattgatacaaagaaatatttgtctaaagtcaatgaggactcccaatcggacgatggaagtcctttgaaaaaaactaagaaaaaaacagatggtaataggcacattgattctggtagttcagggtctgaagagcctgacaaacatagaacccactcggagaagcgaaggcacaagaaaactcataagcataagaaacagtatgatgatagttccgagtctgattctgagccagatggcaaagacgcaaagaggaggaggaggaaggaagagaagaggctaagaaaagaggaaagacgtcgaagacgtgaagaacgacaccgcagaagggcagaacgccatgccagcaaacgaaaattaaagaacaccgatactgttacaatgccttcagactctgagaaggatcgggattctgattcagatggtgatgttaggaaaagagtttcaaacgctggaagagaagagtctgatcagaagaaactagaaattgaactccgtgagaaggcccttgaatctcttagagcaaagaaagccatcaacaactagactgagaatttttttgtgacacatttgagtttctattttcaagtggaagtgtccttatatgatactatttaatgttctgtgtgtttatgtggcagttgatctgatgattcctgagctgtttacttgatgcagctgaattcaggcttagcagccagttatctggtaatgtttgcttctacagatttgtacgcgaaccataaccctgaaaaggatatgttttgttatgtgagcatctgcttccttttttttcattgtgtgaaatgatattctcatgtttctttactagtgtatgatgttgtgttatcgcatacgctgttaaaaaataaccttgcac

SEQ ID NO: 92278 - DNA, 3127 bp, Zea Mays
gtatcaccccacctcgtctcgtcgcctaccctcccaacccgcattcgcggcgcgggcgccttggaaccctagtcacccgcgccccccctccactgtccactcaacccccgtcccctccctcggcggcggcggcatcggcgtcaaccaagatgtcgggcggcttcttccgggggacgtccgctgaccaggacacgcgcttctcgaataagcaagccaagctgctcaagacgcaaaagttcgcgcccgagcttgaccatctggtggatacgtcaaaggtaaagatggacgtgatgaagccctggattgctaagcgggtcactgagctccttgggttcgaggacgaagttctcatcaacttcatttatggcctcctcgaggagaaggaagccgatggaaagaagattcagatccagctgacagggttcatggagaagaacacagtgaagttcatgagggagctctggaccctccttctcagtgcacagcagaatgccagtggggtgcctcaacagtttctggatgaaaaagaggctgagatacagcagaaaaaggcagaggatgataggattgcacaggagattcaaaagaagcgagagatggaggaaaatgattcagaactggtaaagaacaaagtgatggatggggatgctggtaactcaagatcctatggcgatccagttggctctgctttaaatagtacaaatttcaataccgaggaagaaaagaacaatgatttcaagcgtagcttaagagcaaagaacaggggaagtcgcagatccaggagcatatctttgtcgccacgtgctaggcaaagatccatctctcctagaaataattctcgttctcctcctaggcgttcccactctattgatagacaccatagatcatcatggcgttcaacttcacctagacgttctatttctccccgaaggcattctccaagaagtaccccttcaatttctagaaggagatcaccttactcaaggagagggtcgccttccttgtcaagatatccatccccatttacacgccggagatctcctcttcgcagaaaatcaccatcatctgggccactaaggtcactttctcctcgccatcgccgctcaccagctcgtgtaccaaggaggtcaccatctcctgcaagtcgaaggtctcctgttcgacgcagattctcaccaggtagacgtacatctccatctccagtaaggcgcaggccaaggtctccatcacctgggaggcgtaggccaaggtctccatcacctgggaggcgtaggccaaggtccccatccccaagaaggcgtaggccaaggtccccatccccaggaaggcgcaggccacggtccccatccccaggaaggcgcaggctacggtccccatctccaggaaggcgcaggccacggtccccatccccaggaaggcgcaggccacggtccccatccccaggaaggcgcaggccacggtccccatccccaggaagacgcagaccacgatccccatcgcctggaaggcgcaggccatggtctcggtctccaataagacgtcagtccccatctccaaaacgccagaggacatcaccaagttcaccgaagactcgttctgcaaatcgacctttatcgccagagggaaggaggagtaccagtccgtacaatagcaggagtcctaatcgctctcgccagagtttaagtaaagatactgagaaagaaacaaatggcaccccttccgttaaggacagagttgtgcactcaagggggcaagaacaaaaatcagatgataataatagggatggtgcaaggattgttggcaataattccccagattctgagcatagattgtcaaagtccttgaggcctcctaactatgaagaaaggaattccacacgtgacagttcttacaagaactcagacaaacctatacctagtcagggcagcacagatacaagtggagatgaggaacacagtcgtgctagagaaaatgcccggaaagcaaattcatgtcgtaggaaaacaaaggatctctcggcaggtctgcaacctaagaaaatcagtgctggtgactcaagccccagagacaaatctccattcattttacaacagagtggcaaggtcgtccaaaagaaacaccccgatcaattgtcagaatcatcagaagatgagcttgctggtagaagaacaaagcatcaaactgattcacctgatgattctcgtcgaaaacagcattccccgactagaattgaaaatgatgagtcttattcaaagggtggtagaaacagtgagcatgtcatgagaggtttgcgtgatgattctgatgatgctattgatacaaagaaatatttgtctaaagtcaatgaggactcccaatcggacgatggaagtcctttgaaaaaaactaagaaaaaaacagatggtaataggcacattgattctggtagttcagggtctgaagagcctgacaaacatagaacccactcggagaagcgaaggcacaagaaaactcataagcataagaaacagtatgatgatagttccgagtctgattctgagccagatggcaaagacgcaaagaggaggaggaggaaggaagagaagaggctaagaaaagaggaaagacgtcgaagacgtgaagaacgacaccgcagaagggcagaacgccatgccagcaaacgaaaattaaagaacaccgatactgttacaatgccttcagactctgagaaggatcgggattctgattcagatggtgatgttaggaaaagagtttcaaacgctggaagagaagagtctgatcagaagaaactagaaattgaactccgtgagaaggcccttgaatctcttagagcaaagaaagccatcaacaactagactgagaatttttttgtgacacatttgagtttctattttcaagtggaagtgtccttatatgatactatttaatgttctgtgtgtttatgtggcagttgatctgatgattcctgagctgtttacttgatgcagctgaattcaggcttagcagccagttatctggtaatgtttgcttctacagatttgtacgcgaaccataaccctgaaaaggatatgttttgttatgtgagcatctgcttccttttttttcattgtgtgaaatgatattctca

SEQ ID NO: 92279 - DNA, 3109 bp, Zea Mays
gtatcaccccacctcgtctcgtcgcctaccctcccaacccgcattcgcggcgcgggcgccttggaaccctagtcacccgcgccccccctccactgtccactcaacccccgtcccctccctcggcggcggcggcatcggcgtcaaccaagatgtcgggcggcttcttccgggggacgtccgctgaccaggacacgcgcttctcgaataagcaagccaagctgctcaagacgcaaaagttcgcgcccgagcttgaccatctggtggatacgtcaaaggtaaagatggacgtgatgaagccctggattgctaagcgggtcactgagctccttgggttcgaggacgaagttctcatcaacttcatttatggcctcctcgaggagaaggaagccgatggaaagaagattcagatccagctgacagggttcatggagaagaacacagtgaagttcatgagggagctctggaccctccttctcagtgcacagcagaatgccagtggggtgcctcaacagtttctggatgaaaaagaggctgagatacagcagaaaaaggcagaggatgataggattgcacaggagattcaaaagaagcgagagatggaggaaaatgattcagaactggatggggatgctggtaactcaagatcctatggcgatccagttggctctgctttaaatagtacaaatttcaataccgaggaagaaaagaacaatgatttcaagcgtagcttaagagcaaagaacaggggaagtcgcagatccaggagcatatctttgtcgccacgtgctaggcaaagatccatctctcctagaaataattctcgttctcctcctaggcgttcccactctattgatagacaccatagatcatcatggcgttcaacttcacctagacgttctatttctccccgaaggcattctccaagaagtaccccttcaatttctagaaggagatcaccttactcaaggagagggtcgccttccttgtcaagatatccatccccatttacacgccggagatctcctcttcgcagaaaatcaccatcatctgggccactaaggtcactttctcctcgccatcgccgctcaccagctcgtgtaccaaggaggtcaccatctcctgcaagtcgaaggtctcctgttcgacgcagattctcaccaggtagacgtacatctccatctccagtaaggcgcaggccaaggtctccatcacctgggaggcgtaggccaaggtctccatcacctgggaggcgtaggccaaggtccccatccccaagaaggcgtaggccaaggtccccatccccaggaaggcgcaggccacggtccccatccccaggaaggcgcaggctacggtccccatctccaggaaggcgcaggccacggtccccatccccaggaaggcgcaggccacggtccccatccccaggaaggcgcaggccacggtccccatccccaggaagacgcagaccacgatccccatcgcctggaaggcgcaggccatggtctcggtctccaataagacgtcagtccccatctccaaaacgccagaggacatcaccaagttcaccgaagactcgttctgcaaatcgacctttatcgccagagggaaggaggagtaccagtccgtacaatagcaggagtcctaatcgctctcgccagagtttaagtaaagatactgagaaagaaacaaatggcaccccttccgttaaggacagagttgtgcactcaagggggcaagaacaaaaatcagatgataataatagggatggtgcaaggattgttggcaataattccccagattctgagcatagattgtcaaagtccttgaggcctcctaactatgaagaaaggaattccacacgtgacagttcttacaagaactcagacaaacctatacctagtcagggcagcacagatacaagtggagatgaggaacacagtcgtgctagagaaaatgcccggaaagcaaattcatgtcgtaggaaaacaaaggatctctcggcaggtctgcaacctaagaaaatcagtgctggtgactcaagccccagagacaaatctccattcattttacaacagagtggcaaggtcgtccaaaagaaacaccccgatcaattgtcagaatcatcagaagatgagcttgctggtagaagaacaaagcatcaaactgattcacctgatgattctcgtcgaaaacagcattccccgactagaattgaaaatgatgagtcttattcaaagggtggtagaaacagtgagcatgtcatgagaggtttgcgtgatgattctgatgatgctattgatacaaagaaatatttgtctaaagtcaatgaggactcccaatcggacgatggaagtcctttgaaaaaaactaagaaaaaaacagatggtaataggcacattgattctggtagttcagggtctgaagagcctgacaaacatagaacccactcggagaagcgaaggcacaagaaaactcataagcataagaaacagtatgatgatagttccgagtctgattctgagccagatggcaaagacgcaaagaggaggaggaggaaggaagagaagaggctaagaaaagaggaaagacgtcgaagacgtgaagaacgacaccgcagaagggcagaacgccatgccagcaaacgaaaattaaagaacaccgatactgttacaatgccttcagactctgagaaggatcgggattctgattcagatggtgatgttaggaaaagagtttcaaacgctggaagagaagagtctgatcagaagaaactagaaattgaactccgtgagaaggcccttgaatctcttagagcaaagaaagccatcaacaactagactgagaatttttttgtgacacatttgagtttctattttcaagtggaagtgtccttatatgatactatttaatgttctgtgtgtttatgtggcagttgatctgatgattcctgagctgtttacttgatgcagctgaattcaggcttagcagccagttatctggtaatgtttgcttctacagatttgtacgcgaaccataaccctgaaaaggatatgttttgttatgtgagcatctgcttccttttttttcattgtgtgaaatgatattctca

SEQ ID NO: 92280 - DNA, 830 bp, Zea Mays
cgcattcgcggcgcgggcgccttggaaccctagtcacccgcgccccccctccactgtccactcaacccccgtcccctccctcggcggcggcggcatcggcgtcaaccaagatgtcgggcggcttcttccgggggacgtccgctgaccaggacacgcgcttctcgaataagcaagccaagctgctcaagacgcaaaagttcgcgcccgagcttgaccatctggtggatacgtcaaaggtaaagatggacgtgatgaagccctggattgctaagcgggtcactgagctccttgggttcgaggacgaagttctcatcaacttcatttatggcctcctcgaggagaaggaagccgatggaaagaagattcagatccagctgacagggttcatggagaagaacacagtgaagttcatgagggagctctggaccctccttctcagtgcacagcagaatgccagtggggtgcctcaacagtttctggatgaaaaagaggctgagatacagcagaaaaaggcagaggatgataggattgcacaggagattcaaaagaagcgagagatggaggaaaatgattcagaactggtaaagaacaaagtgatggtgagctattcgtttcagctgatttttgtataattgattttagggctatgttgtgacaccttgtgtttctgatgacattcagataacttctccgataatttgggttcatatcgttatttacctcaactgctgtaggatggggatgctggtaactcaagatcctatggcgatccagttggctctgctttaaatagtacaaatttcaataccgaggaagaaaagaacaatgat

SEQ ID NO: 92281 - DNA, 645 bp, Zea Mays
aacaaagcccttcttatgaaatgcctccacaaattctttaatagagctaacattccatgggttaacattatttgggccaaccattacagcaattcactaccttcagctaaacccgttggttccttctggtggaaagatatcctcaaaattcaaggcgcttttaaggagttagcccgggtggagattggagatggaaaaactacactcctgtggcacgataattgggatggtttgtgcaaatctgcaagattcccagaacttttgtcttttgcctccttcaaagacgtcatcatccatcatgcaaggctggcttcgccgaatgagatgtttcacactccactgtctgctgaagcgtttgatcagcttcttgctttacaagacattctgggaaatctccagctacatgatcacagtgataaatggctctgcaatgcctcttctagcctgttttcttctcagaaggcctattcccacatgaccgggaaccaaccgactcatcccattttttcctggttgtggaaatccaaatgtcaacccaagcacaaggtgtttttctggctactgcttaaagatagattgaatacccgctctttcctcaggcagcgttcaatgccattggactctttcacttgcgataattgtatt

SEQ ID NO: 92282 - DNA, 1313 bp, Zea Mays
cttatgactcatcagtcgtacgatcccaactagtatttgtaaataatgtggccccaaaacttgcatggcatcggtgaagcaccgaacccaacccaagtgacgtgataggtgacacattttctaaaggaaaacgagggtatcaaatcgagtcttcgatcacacatcccaagacggtcgctgatcccaatccgatcagtgcctcagaagtaagaaactgaccgcaggcatctcaacttgcatgaagcgagcgacggccatgcagatccctctccagtctccaccgtccacgccgaccccgcctcctccaaacacggccacccactcacccgtgctccgtttaaaataggcatagcatagccatcccacgagcaccgcatgcacgcatgtaagtttctgcagaagctagccaggcagacgagagagcgagtcaccgcgagaaggggatcgcggaaagtgagagcagaatcaacaatccacctgctcatcgagtcgatggagatgaaggttgctgcctcacggccaggatgcaagaaacgccccccgagccgtctccagaagcatgcgccagcgtcgctgcaactggagcaggctgtcgccagtgcggggacgggagcaccgcccgcggtgtggggtgacgggagggcgccgatcccgctcctgtcgccgctcgtcgtgtcgcccatggtgccggtctgggaggcggaccagacggggggcgccaggaaggagggaggaggggaccaggccgagggcaggagcggtgccgagcagcagcagcgcggcgccgccgctcggcatggcagcagtggggagcaccaggtgcacgacgtgacaccgaggccgtcggcgcccgcgctcggcatggggtggcggcacccagcgatgtcgacgcccgtggcggagccggcgtcccttgtgcccttattccagtcgcagtgcgcgttggaggtgcgcaactcgcagcagtgagggggaatcatttgctcaaccaagcagccatgcccatagtagtgcgctcgagctcgtgctcacgacaggcgccgctacgatgtgagaagacgatgacgctttcgtcctcgcaggctattctcgtcgtgatctatctttgaacaactagcattggttttgctgctcttcatcagtttatcgtaatatctttacaatgtggtcacagttctttgtgaatataatttaaacctatatggtttagcgatggctggatgttcgaaaactatatatctatttgaaacgacttatctagctttagaattacactgttgttatgatccggtaaagcattggcatttagggca

SEQ ID NO: 92283 - DNA, 217 bp, Zea Mays
ggtatttgtattatacagtaagttttattctacaacattttttcttggtgtgtgtctagtgtatctgtttgtgtaaggaaaagaacgggtaaaagtgcgtaaatgatatatatacgacctggagatccgactcccatctatctcaacaacatgctttcacgccgtaacagttgtcaactcttaagacctcaatccacctcaatacatatgtattaaa

SEQ ID NO: 92284 - DNA, 264 bp, Zea Mays
atgggaacgacgtgcttaccgctgccgagcggaagcctgcaagagcgcgacggcgaggcccttcctcccccgaacgttgtcctgctgatcgtccgacgttccgcccatcgatccatgctggtctgtgccgtctcgctaagatccggctcggcggtgaccttcaagctccagacctccagcctggcggccttgccccgcccccggcacggtgcacgacggatatggctgctgctttctctgggccattcccgcgcgtctctctag

SEQ ID NO: 92285 - DNA, 1065 bp, Zea Mays
cactatataaatgatacgaaaaaatgtatttattaattttttaaccaataaattcgaaatatcaataataattacattgcttgttttgatgttctgtaattgttgtcggtaacgcgcaacatagtataatatcgttgccaaaatatgttttcaaatggacaagcttgcaccgtaagccagtactcttcttcgagaagccatagcctagcttcccttgcacgacaagcgaatggcttgtatccgaagcgtacttcctctataaatacgaagtgagccttgcatacttcactcaaccttgcatttccaaagtccacaaccatgaatccctacttagaaaacaattttcttgtgcgcttgatggaagaaatggaagaggaagaagaagagttgcagttggcgaggcacatggtcaataggaggcgacgtgcacacaatgagcgtcgtcatggtggttccatcccagggcgtgttaggattcatcgtgatcacatcagcggcgatgcaagaatccgagcggactactttggagcgaacccggtgtacacggatgctcaatttcgtaggaggttccgcatgcgtcgccatgtctttgagcgccttgttgatgttgtgcaacaagtggatccatattttattcagcgtccaaattgtgcgggtgagattggtctttctgctctacagaaagttgttgctgctgttcgaatccttgcttacggtattccggctgatgccgttgacgaatacgtacgtattggggaatctactgctcatgaagcattgaaacacttttgcacggccgtccaaaccgcgtttgctccctattatctccgtgcaccaaatgcagaagatatcgcacgccttctccaagttggcgagtcacgtgggtttcctggtatgcttggtagtgttgattgcatgcattgggagtggcgtaactgcccaagttcatggaaggggatgtttacagggcgtggtaaacatcctaccatgatcttggaagctgttgcgtcgtatgacctgtggatatggcatgcatattttggtctgccaggtagttgcaacgac

SEQ ID NO: 92286 - DNA, 3515 bp, Zea Mays
gtgtaagtatctcgcgtcgccgcgatcgaacacacacatcaccagctttgggagccgctgagagaaaccggacgcgcggtggtttgctttcgccggaagcgccgtcggattaagaagcataaagggaggaggacagatggcgggggatcggctgagctgggcggggctgctcaaatggagcctctcctacgtcgacggggcgggaccctctcgcgccgtcagagaggaggagcggcggtggctggcggacgcggtggagcagcacatgatgatggacgtggtgagccggatgagggagattgcgctgctcatgagcaccccgcccgccgtcctggaggcgcagggcatcacccacgacgacatcgaagatttgctgagtgagctgcaggtgcatgttgagtctatcgacatggcaaatgatttgcattctgttggtgggttggttccagttatcaagtacctcagaaattctaatgctcgtatccgagcgaaggcagctgatgtggtaacaacagtggttcagaacaatccgaccagccagcagttggtcatggaagctagtgggtttgaacctctcttatccaatttcagatcagatcctgaccttactgctcggataaaagctcttggtgcactatcttctctgattcgaaacaacaaaccaggagtttctgcatttcgtttagccaacggatatagtggactaagagatgcattgaattcagaaagtgcaaggtttcagaggaaagcattgagtctgactcactatctgctcagcgaaagccattcagattgttcagtatttgcacagttaggtttcccccaccttatgatgcgtttggcatccagcgatgactccggtgttcgagaggcagcattagggggcttgcttgagcttgcaagggacacgacacttggaaataggaatctactagcagaacatgacaggttacgaaggcttctccgtggacgtatggaaagcataaggacgatgactcctgaagatttggatgctgcacgagaagagcggcagcttgttgactcactttggatcacatgctaccatgaaccctccatgctccgcaatgaagggctccttgttctgcctggggaggaatcctttgagcaacctcctgatgtggctggtagattgttcgagccaatgcgccgagcttctgctaggagggcaccccctgctgagagatcagacccaagggatgaaactgggggaggaatggttttgcttttaggtggtccagcacaagatggtagatcaaactcccccaatcactgatctttctgggcggtgaggccgtgcgttaggaatggagaaatgaagcaaaccgtactgctgccttgtaataattatataagttgcttcgaacaacattatgtaatgtgtaattaggatttagggacctggcatccagtctcaaataagtaaatactacgttgtgtttatgcttgtatagtattagtggctcccaatcatgttatatacttgtacatgtgtttgttcgacgttgagtaaacagtgtgaatgctaaacattacatccattaaatctaagtagcacaacatttctactttcatggtagcatcaaatagaccaacacatgcatttgtaggaaactcttggatgtttgcttctgcaaatctgggcaactatgaatctgtgatcaatcaattctgttcctttgatctcagaccatatatcgctctcgattatgtagactcactctaaccagctgcagccatgcagcttcttcatgcgccgtctctttgccagcctcttcatcttcataacatcatcttgtctgcctacacttgccagcgagtccgagagtaggaggcaacttgctgcattggccggctcgacggttagcaggtgggacgcagccagctcggcaagcttgatgtcgccatggctccggcatgcccccagcaacgccccccaaacgaagcagtcaggccccaggggcatggctttgatgaaatcataagcctcggcgagccagccggctcggccaagcaaatgcaccatgcatgcacaatgctccagcctcggctcgatgccgtgttcttcctgcatggcgcggtacaggcccttcccgagctccaccatgccggcgtagctgcaaaccgtcagagcggcggtgaacgtcaggtgatccggccttgctccgtcgcacagcatccggttgaagagaccgatggcttcttggcagtgaccggaattcgccagcccgaagatcatggaattccatgtcaccgtgcttctttccgacatcttgtcaaacagcctgcgggcttcgaccacaaacccgctcttcgtgtacatatctactagagcactgctcacattgagctcctgttcgacgccggtcaccacggcgtaggcgtggacttccttgccacgcttcacgtcagcaacattggcgaacgcaggcaggatgctggcaatcgtggccgagctcggcaggacagggttggcagtggtcatcattctccggaacagcacgcgcgccctggcatactggaagttcagcaccgagccggatacaagcgatgtccaagtgaccacgtccggctggaacccgtccacctccatggcgccgaccaattttgtggccatttggtcgtcgccggccagtgcaaaaccggagacgacggcgttccatgtcaccaggtcggggcacaggcactggccccgcattttgatagccagcaccagtgcgcgctccgggagggcgtggcgcgcgtagcatgcgaccagcgcgttccaggcgacgaggtcatccctactcggcatttcgtcgaacaccctctgggcactcgcgacaaggccacatttggcgtacatgtcgagaagcgcggtggcggcgacggcgtcggaggcgagggacgggaaccgggtgaggacgagcgcgtggattaggcggccggaagaggcgtttccgaggcgcgcgcaggcgcggagtgccgtggggacggccgcgcggtgcagctctaccacgcccctgtcgccgcgtcgtaggtgggtgaagagaaggtggaggacgcggccgtggcggccttgccgggaagcgttcatcagctgcttcatccatgagctggtggttgtcgtgcgtgcgcacatgagccctacgcctctacctcatctgtcatctcacgttcatgttcatccatgtccatgaatcttagacatggagcttgaagccgatcgaagtgatgcaccttttgcaaacagggatggaggcataaaaaaagtttacgaggaattgaactaaactctgcagtatgtaatctacttctacgttacattgtatatattttagattagaaaaggttacatcgtatatattttagattagagaagctccataagatcggcgtaggggctcgagttcggcccgccgtggacccgtggtaccgagagtagttaactagttattagttggtaaacatgtgacgatcctacagttctaatgttaatccctgatgtattttcttca

SEQ ID NO: 92287 - DNA, 3677 bp, Zea Mays
gtgtaagtatctcgcgtcgccgcgatcgaacacacacatcaccagctttgggagccgctgagagaaaccggacgcgcggtggtttgctttcgccggaagcgccgtcggattaagaagcataaagggaggaggacagatggcgggggatcggctgagctgggcggggctgctcaaatggagcctctcctacgtcgacggggcgggaccctctcgcgccgtcagagaggaggagcggcggtggctggcggacgcggtggagcagcacatgatgatggacgtggtgagccggatgagggagattgcgctgctcatgagcaccccgcccgccgtcctggaggcgcagggcatcacccacgacgacatcgaagatttgctgagtgagctgcaggtgcatgttgagtctatcgacatggcaaatggagacaatggtagcacttggaggcatgcattcttggtgttgaactgaatacattcacatcattgggtgattcaaaatgacattcgtagtttcttttgaggtggctaaacaaatggatggaggcaactatagtggtatttggcaatagaacattgttattcagatttgcattctgttggtgggttggttccagttatcaagtacctcagaaattctaatgctcgtatccgagcgaaggcagctgatgtggtaacaacagtggttcagaacaatccgaccagccagcagttggtcatggaagctagtgggtttgaacctctcttatccaatttcagatcagatcctgaccttactgctcggataaaagctcttggtgcactatcttctctgattcgaaacaacaaaccaggagtttctgcatttcgtttagccaacggatatagtggactaagagatgcattgaattcagaaagtgcaaggtttcagaggaaagcattgagtctgactcactatctgctcagcgaaagccattcagattgttcagtatttgcacagttaggtttcccccaccttatgatgcgtttggcatccagcgatgactccggtgttcgagaggcagcattagggggcttgcttgagcttgcaagggacacgacacttggaaataggaatctactagcagaacatgacaggttacgaaggcttctccgtggacgtatggaaagcataaggacgatgactcctgaagatttggatgctgcacgagaagagcggcagcttgttgactcactttggatcacatgctaccatgaaccctccatgctccgcaatgaagggctccttgttctgcctggggaggaatcctttgagcaacctcctgatgtggctggtagattgttcgagccaatgcgccgagcttctgctaggagggcaccccctgctgagagatcagacccaagggatgaaactgggggaggaatggttttgcttttaggtggtccagcacaagatggtagatcaaactcccccaatcactgatctttctgggcggtgaggccgtgcgttaggaatggagaaatgaagcaaaccgtactgctgccttgtaataattatataagttgcttcgaacaacattatgtaatgtgtaattaggatttagggacctggcatccagtctcaaataagtaaatactacgttgtgtttatgcttgtatagtattagtggctcccaatcatgttatatacttgtacatgtgtttgttcgacgttgagtaaacagtgtgaatgctaaacattacatccattaaatctaagtagcacaacatttctactttcatggtagcatcaaatagaccaacacatgcatttgtaggaaactcttggatgtttgcttctgcaaatctgggcaactatgaatctgtgatcaatcaattctgttcctttgatctcagaccatatatcgctctcgattatgtagactcactctaaccagctgcagccatgcagcttcttcatgcgccgtctctttgccagcctcttcatcttcataacatcatcttgtctgcctacacttgccagcgagtccgagagtaggaggcaacttgctgcattggccggctcgacggttagcaggtgggacgcagccagctcggcaagcttgatgtcgccatggctccggcatgcccccagcaacgccccccaaacgaagcagtcaggccccaggggcatggctttgatgaaatcataagcctcggcgagccagccggctcggccaagcaaatgcaccatgcatgcacaatgctccagcctcggctcgatgccgtgttcttcctgcatggcgcggtacaggcccttcccgagctccaccatgccggcgtagctgcaaaccgtcagagcggcggtgaacgtcaggtgatccggccttgctccgtcgcacagcatccggttgaagagaccgatggcttcttggcagtgaccggaattcgccagcccgaagatcatggaattccatgtcaccgtgcttctttccgacatcttgtcaaacagcctgcgggcttcgaccacaaacccgctcttcgtgtacatatctactagagcactgctcacattgagctcctgttcgacgccggtcaccacggcgtaggcgtggacttccttgccacgcttcacgtcagcaacattggcgaacgcaggcaggatgctggcaatcgtggccgagctcggcaggacagggttggcagtggtcatcattctccggaacagcacgcgcgccctggcatactggaagttcagcaccgagccggatacaagcgatgtccaagtgaccacgtccggctggaacccgtccacctccatggcgccgaccaattttgtggccatttggtcgtcgccggccagtgcaaaaccggagacgacggcgttccatgtcaccaggtcggggcacaggcactggccccgcattttgatagccagcaccagtgcgcgctccgggagggcgtggcgcgcgtagcatgcgaccagcgcgttccaggcgacgaggtcatccctactcggcatttcgtcgaacaccctctgggcactcgcgacaaggccacatttggcgtacatgtcgagaagcgcggtggcggcgacggcgtcggaggcgagggacgggaaccgggtgaggacgagcgcgtggattaggcggccggaagaggcgtttccgaggcgcgcgcaggcgcggagtgccgtggggacggccgcgcggtgcagctctaccacgcccctgtcgccgcgtcgtaggtgggtgaagagaaggtggaggacgcggccgtggcggccttgccgggaagcgttcatcagctgcttcatccatgagctggtggttgtcgtgcgtgcgcacatgagccctacgcctctacctcatctgtcatctcacgttcatgttcatccatgtccatgaatcttagacatggagcttgaagccgatcgaagtgatgcaccttttgcaaacagggatggaggcataaaaaaagtttacgaggaattgaactaaactctgcagtatgtaatctacttctacgttacattgtatatattttagattagaaaaggttacatcgtatatattttagattagagaagctccataagatcggcgtaggggctcgagttcggcccgccgtggacccgtggtaccgagagtagttaactagttattagttggtaaacatgtgacgatcctacagttctaatgttaatccctgatgtattttcttca

SEQ ID NO: 92288 - DNA, 1048 bp, Zea Mays
acctctcacccttgttataaataccgctcggattcctcacgcccccacacggccacacctctcctctctctctctccctctgtccagcgcactctttctcctcactagctacccacctcagcgagccaaggccggcgaagcgcatccatcggtccatggagttgtacgtggacgagaagtggaagttctccaagaagagccggaacaacggcagccggcgcgtcccgggatccggcggcggggactctctgctgaagagatcgtcgagcatgagggacgtcgcggcgatcggccggcgcggtaccggcggcgccggcgccgcggcggcgggcgggtgcgcgccgcagccgtcgttctcgagccggtgcgcgggcctggtgaaggagcagcgggcgcgcttctacatcatgcgccgctgcgtcaccatgctcgtctgctggaaggactgctcgtagccacggctccagggccggccggcgaagaggctcgacccctcgcagttccccccgcccgtccgcccgcccgccaggatcagagagagagagagagagagagagtcagccatggggctgaagcaagcaagctgcaagccggggggacacggggaagaaggcagattaggtgatgtgtgtatagatcagtcatcagtcttgattaggagtcctcatctttcttcttcttttttacctcccatttctgggacgttttctcgattgccggtgctcgattaggtaaagagtagtaactagtacagtacctagcgttgcgaggtagatgcgtgtggtatcgtggacagttttgggaatccccttcttcaaggggaatggggatctgggttctttacagctgcagtgctgcgaaggagcaccgcaggcagctgagatgaaatctagtggatctcttctgttgttagttgtaccacgaccacggtaaaaaaaacaacaacaacgtcgtcatcgcccggccatgtatagctaaagaaaccagacgcaacagcctgctaaagatgcatgtcacctcgtatcctgtttatatatattttttaatc

SEQ ID NO: 92289 - DNA, 2186 bp, Zea Mays
ctgtcctcctcctcctcgctatataacccttcattcctgccgcgtgttgtagctatagctctagctagctatcttgctgcggccggccatatataacaaccgtacgtcctcgatctctcgtccgagatcgatctgcgtgccaagggaagggagatgggggcggcgccgccatcgtcgtggcttgcgttcatcctgttcttcggcacgttggtagcgttgccgcagtcgtcacacggcggcggcacaaccagacactacaccttcaacgtgacgatgaagaaggtgacgcggctgtgcaccacccgcgccatcccgacggtgaacggccagttccccggccccaagatagtcaccagggagggcgaccgcgtcgtcgtcaaggtgctgaacaatgtcaaggacaacgttaccatccactggcacggcgttcggcagctgcgcacggggtggtcggacgggccggcgtacgtgacgcagtgccccatccagacggggcagagcttcgtgtacaacttcaccatcacggggcagcggggcaccctgttctggcacgcgcacgtctcctggatgcgcgccacgctctacggggccatcgtcatcctccccaagcgcggcgtgccatacccgctcccggttaaaccctacaaggacgtcccagtcatcttcggagagtggttcaacgcggatccagagacaattgtcgcccaggcgcttcagactggagcaggcccaaacgtgtcggacgccttcaccatcaacgggctcccgggccctttgtacaactgctccagcaaagacacgttcaagctgaaggtgctgcccggcaaatggtacctgctccgtctcatcaacgccgcgctcaacgacgagctcttcttctccatcgccaaccacacgctcaccgtcgtcgacgtcgacgccgcctacgtcaagccgttccgcacggacatcgtgctcatcacgccgggccagaccaccaacgtgctcctgcgcgccgagcccgacgcggggtgccccgcggccacgcacctcatgctggcgcgcccctacggcacgggccagccgggcaccttcgacaacaccaccgtcgcggccgtgctcgagtacgcgccgccgggccacatcaggagcctcccgctcttccggccctcgctccccgcgctcaacgacacggccttcgccgcgaactacagcgccaggctccggagcctggcaaccccggactacccggccaacgtgccccgcgccgtggaccgctccttcttcttcgccgtcgggctcggcaccaacccctgccccgtcaaccagacgtgccaggggcccaacgggaccatgttcacggcgtccatgaacaacgtgtccttcaacatgcccaccaccgcgctcctgcaggcgcactacggcagcgtcgccggcgtgtacacgcccgacttccccgtcgcgccgctcgagccgttcaactacacgggcacgccgccgaacaacaccaacgtctcccacgggaccaaggtggtggtgctggactacaataccagcgtcgaggtcgtgctgcaggccaccagcatcctcggcgccgagagccacccgctgcacctccacggattcgatttcttcgtcgtcggccaaggcttcggcaactacgactcgtccaaggacccacccaagttcaacctagtcgacccggtgcaaaggaacaccgtcggcgtgccggcagggggctgggtcgccatcaggttcttcgcggataatcccggtgtttggttcatgcattgccatctggaggtgcacacaagctgggggttgaagatggcatgggtggtcaacgatggcccgttgcctgagcagaagctgatgccgccgccggccgatcttcccaagtgctgaagatccaccgcgcgttgacattgtccaacattatgattcgtttctactgcataaacatatcaatggagatacacattgtcgtcgtacatatagcgtcgtacacagcgtttaaagaggctttgtggtttctctatgcattgtttcttcttcattcttctaaaggttttaaaagttgtgttttgtgataggaaatcattgttttactttcacatagattttttttcatctggagtagtttgaaatcctttgttgcaattcgaactcaataaatatggtttcaaaaaaaaacaagttgaccaagt

SEQ ID NO: 92290 - DNA, 627 bp, Zea Mays
atggtaaccgaacagccatctgaggacgatggaggtgtcaattttcaggatggtggaggttccagtgcggctctgttggacaagaatgctggtgaagagatagaattggtggtcggcgttcgggctctgcaggtaccattgacaggcaacgaaagtgatgccagccatgaaagtgaaatgagaaagttcaatgaagtactaactgtcagagagaaaaacagtgaggttgatacacaagaagtcagtaaggagatggaacatactgatattgctgagttgcaggctgacattgtggatgaggcagcttttcttgattgctcgagtattgttaacctggttgctggagaggagaccgaggtggtcaatactgaagatggtcttggctgtgaggaggatggtgatgttgacaaagtgctgcatgactctgtggatgacaccattcttattgattgctcaagtgagaatgttgaaatggagaaggcaggaaaagtcacacgtgagatgcctgagaaccaagctgcattggatgaggatgttgataaaccgaatgaagtggttatcggtgacatgccccaagacacagtgacagataaagttgttcaggaggaaagggaactgatcgagtag

SEQ ID NO: 92291 - DNA, 248 bp, Zea Mays
cgcgaacagagctaacggctcgcaaggtcaatgagacgctagcagatttttgccactgactgacaggcacgaatcatttgggtgtccaattattggtgcaaatcatttgataatggccttgatgggccgcgtggcgtccggaagtcactcattttcgcatggcgcaggggccgacgcgtcaatagccctcatcagaatcagataaatacgcccatcgtgatcctaaaaaaggaataacttctcgaaac

SEQ ID NO: 92292 - DNA, 3234 bp, Zea Mays
gagcacaccatcctcgcattattcttttcggatttgctccacccctccactcccatgcccgtgtccatctcaggctgcgtcacatcatcgccgccacacccagcaccagcaccagcggcggcgcaccaccaccggcgccatcaccagcgccagcgctagcgccggcgcaggcggaggcccgggcgacgcggactgggcgaagttactggccttcttttcgtcagcggcgtcccttgccatcaagctaaggtcttccagcaaggttacgtggagtttaccaatgggtctggataatacttatggcgacctatctggcatgttctatggaggcctgtcttatgatggctacacagaccacagcagcgcaagtgattacttcagatttgccgatccacttcctgccactgtgccccagatggcaccagaagcctgttcaaatccttcctccactgtgtcaagggccaatactgaaactgacaacccagaggattgggaattcatctcagatgagtccctcgactatatcagccggatgctcatggaggaggatattgatgagaaagttagcatgtaccaggcggagtcagcagcactgcgtgctgctgcaaagccgttctatgacattcttgggcacaagttcccaccgtctcctgaccgccagctgatctcttggtccatggacagccccagtgagagtagcagtagcatctgcacacaatctgtggcaagtactgtcacgagcagcagtgttggtggcacagtggatagcaaccggcgctatgacattggacttagtgagcagctggaagcttaccgaggcttgtgtggtcaagcttctcatccacttgttggtacatcaagtgatgcttccaatgcagtggatgtgctagaagaccctttgatcacgaacggtcagatccctgagtatttgtttgagagccttccaacttgggatttcaggagaggtattgaggaagcccagaagtttcttcctgttaacaataaactagtcattggtttagaagctggtggtattgcaagaccccaagaggcaaggaaagatgtttctttgaatgccaaaaaggcagatgcattgaaggtcaagaaaaatagacagagtgaagaccttgacgtgattgaaggccggaacattaaacagtctgcattttgttccgatgaacctgattggattgaaatgttcgatgatctgcttcttcaaaccgagaagaaggccacagatctgcgagagctgatgcggaatgaagcttccaagaattctcaggtcacccagacgaaaggaccaagtggaccacggccacggggaaggaaaccaacaaagaaggatgtggtggaccttaggaccatcctcatccactgtgcacaggctgtggcagcagatgaccgcaggactgctaatgaattgttaaagcaaataaggcaccattccaagccaaatggtgatggaacccagaggttagcacattgctttgcagatggtcttgaggctcgattggcaggcacagggagtcagctttaccgcaagcttatagcaaaacgaacaactgcctcagacatgcttaaagcttaccacctttaccttgcggcatgcccatttaagaggctttcacattttctttccaatcaaacaatcttgagtatgactaaacatgcatcaaaggtgcatatcattgacttcggcatttatttcggcttccaatggccatgcctaatcaggcgtctctccaagagggaaggtggtccacctgttctgcgcattactggaattgatgtacctcagccaggtttccgacctactgagagaattgaagagactggacaaaggcttgcagaatatgctgagaagttgaaggtgccttttgagtatcagggaatagcatctaagtgggaaaccatccgagttgaggatctcaaagttggcaaggacgaagttgtgattgttaattgcctatacagattcagaaacctgattgatgaaacagttgctgtagacagtcctaggaatagagtgctcaacaccataaggcaagtaaacccagcaattttcattcatggaattgtgaatgggtcatacagtgttcccttcttcatcacacgtttccgtgaggcgctgttccatttctctgcattgtttgacatgctagagacaactgtcccacgggatgatgcacagcgtgcactcatagagagggaaatgtttggccgagaggcactcaatgttattgcatgtgagggctcagacagagttgagagacccgagacatataaacagtggcaggtgaggaacctcagggctggatttgttcagtccccgttaaaccaagaaatcgtgatgaaagccaaggacaaagtaaaagacatttatcacaaggactttgtcatagatgaagacagcggatggctcctgcaaggctggaaaggaaggataatctatgcaatatctacctggaagcctaagaataactaggttcttggtctcacatgttacgtttcctattccattgacggtggcagctaattaaccagtcctgctatgttatagcatgtggaccttgacttgtgaacctgtctgatcaaggaaatggcttgaagacggataatgatcaacatggagctttgctagcttcacatctgtccagccagtactctgatagactggatgtaggcctctctaccttggtgttggtacaatcacttctattaaatttcgtagttttcttctttccatttacttctatgatcggccaggcgtcctattagcaataaccagatcactgcttctagttaattggttagccaaactacctactatcttgagcttagtatttttgacttgtatccatccatgttgaacattatttggttttcagcaccagcagataaaaaattccccaacgaggaagcatgaagcatctaaatttgttatacgagaatgggcgctgctgtttgtgtggaatgtagtatctcatggagtgctttgcctttgaattctccattttttatttcatctctttgtagcaagtgatgcgtgctgtcacaaaatgactctttaaacttgagtggagcactagtttgagaatatcgctagaaagtggcgctacagatttttggagacgactagcgaatggtgccaccacaaggcggcatgatattagtgcaatgcgaccactatcagcgtatcttcatttgataacgcattgttttagctgatccttt

SEQ ID NO: 92293 - DNA, 887 bp, Zea Mays
gagcacaccatcctcgcattattcttttcggatttgctccacccctccactcccatgcccgtgtccatctcaggctgcgtcacatcatcgccgccacacccagcaccagcaccagcggcggcgcaccaccaccggcgccatcaccagcgccagcgctagcgccggcgcaggcggaggcccgggcgacgcggactgggcgaagttactggccttcttttcgtcagcggcgtcccttgccatcaagctaaggaaatggcttgaagacggataatgatcaacatggagctttgctagcttcacatctgtccagccagtactctgatagactggatgtaggcctctctaccttggtgttggtacaatcacttctattaaatttcgtagttttcttctttccatttacttctatgatcggccaggcgtcctattagcaataaccagatcactgcttctagttaattggttagccaaactacctactatcttgagcttagtatttttgacttgtatccatccatgttgaacattatttggttttcagcaccagcagataaaaaattccccaacgaggaagcatgaagcatctaaatttgttatacgagaatgggcgctgctgtttgtgtggaatgtagtatctcatggagtgctttgcctttgaattctccattttttatttcatctctttgtagcaagtgatgcgtgctgtcacaaaatgactctttaaacttgagtggagcactagtttgagaatatcgctagaaagtggcgctacagatttttggagacgactagcgaatggtgccaccacaaggcggcatgatattagtgcaatgcgaccactatcagcgtatcttcatttgataacgcattgttttagctgatccttt

SEQ ID NO: 92294 - DNA, 2886 bp, Zea Mays
gagcacaccatcctcgcattattcttttcggatttgctccacccctccactcccatgcccgtgtccatctcaggctgcgtcacatcatcgccgccacacccagcaccagcaccagcggcggcgcaccaccaccggcgccatcaccagcgccagcgctagcgccggcgcaggcggaggcccgggcgacgcggactgggcgaagttactggccttcttttcgtcagcggcgtcccttgccatcaagctaaggtcttccagcaaggttacgtggagtttaccaatgggtctggataatacttatggcgacctatctggcatgttctatggaggcctgtcttatgatggctacacagaccacagcagcgcaagtgattacttcagatttgccgatccacttcctgccactgtgccccagatggcaccagaagcctgttcaaatccttcctccactgtgtcaagggccaatactgaaactgacaacccagaggattgggaattcatctcagatgagtccctcgactatatcagccggatgctcatggaggaggatattgatgagaaagttagcatgtaccaggcggagtcagcagcactgcgtgctgctgcaaagccgttctatgacattcttgggcacaagttcccaccgtctcctgaccgccagctgatctcttggtccatggacagccccagtgagagtagcagtagcatctgcacacaatctgtggcaagtactgtcacgagcagcagtgttggtggcacagtggatagcaaccggcgctatgacattggacttagtgagcagctggaagcttaccgaggcttgtgtggtcaagcttctcatccacttgttggtacatcaagtgatgcttccaatgcagtggatgtgctagaagaccctttgatcacgaacggtcagatccctgagtatttgtttgagagccttccaacttgggatttcaggagaggtattgaggaagcccagaagtttcttcctgttaacaataaactagtcattggtttagaagctggtggtattgcaagaccccaagaggcaaggaaagatgtttctttgaatgccaaaaaggcagatgcattgaaggtcaagaaaaatagacagagtgaagaccttgacgtgattgaaggccggaacattaaacagtctgcattttgttccgatgaacctgattggattgaaatgttcgatgatctgcttcttcaaaccgagaagaaggccacagatctgcgagagctgatgcggaatgaagcttccaagaattctcaggtcacccagacgaaaggaccaagtggaccacggccacggggaaggaaaccaacaaagaaggatgtggtggaccttaggaccatcctcatccactgtgcacaggctgtggcagcagatgaccgcaggactgctaatgaattgttaaagcaaataaggcaccattccaagccaaatggtgatggaacccagaggttagcacattgctttgcagatggtcttgaggctcgattggcaggcacagggagtcagctttaccgcaagcttatagcaaaacgaacaactgcctcagacatgcttaaagcttaccacctttaccttgcggcatgcccatttaagaggctttcacattttctttccaatcaaacaatcttgagtatgactaaacatgcatcaaaggtgcatatcattgacttcggcatttatttcggcttccaatggccatgcctaatcaggcgtctctccaagagggaaggtggtccacctgttctgcgcattactggaattgatgtacctcagccaggtttccgacctactgagagaattgaagagactggacaaaggcttgcagaatatgctgagaagttgaaggtgccttttgagtatcagggaatagcatctaagtgggaaaccatccgagttgaggatctcaaagttggcaaggacgaagttgtgattgttaattgcctatacagattcagaaacctgattgatgaaacagttgctgtagacagtcctaggaatagagtgctcaacaccataaggcaagtaaacccagcaattttcattcatggaattgtgaatgggtcatacagtgttcccttcttcatcacacgtttccgtgaggcgctgttccatttctctgcattgtttgacatgctagagacaactgtcccacgggatgatgcacagcgtgcactcatagagagggaaatgtttggccgagaggcactcaatgttattgcatgtgagggctcagacagagttgagagacccgagacatataaacagtggcaggtgaggaacctcagggctggatttgttcagtccccgttaaaccaagaaatcgtgatgaaagccaaggacaaagtaaaagacatttatcacaaggactttgtcatagatgaagacagcggatggctcctgcaaggctggaaaggaaggataatctatgcaatatctacctggaagcctaagaataactaggttcttggtctcacatgttacgtttcctattccattgacggtggcagctaattaaccagtcctgctatgttatagcatgtggaccttgacttgtgaacctgtctgatcaaggaaatggcttgaagacggataatgatcaacatggagctttgctagcttcacatctgtccagccagtactctgatagactggatcaccagcagataaaaaattccccaacgaggaagcatgaagcatctaaatttgttatacgagaatgggcgctgctgtttgtgtggaatgtagtatctcatggagtgctttgcctttgaattctccattttttatttcatctctttgtagcaagtgatgcgtgctgtcacaaaatgactctttaaacttgagtggagcactagtttgag

SEQ ID NO: 92295 - DNA, 1709 bp, Zea Mays
tgcccgtccattaatgacctaacggaccccacggcgcgcgcccaccaccagtccaccaccctccaccgccctccctcgcaggcaggcaggcagccagagccagagccagccgggcaagcactgcagcagccattgtactcatcacctccttcccacgcagcgagaggatgacaccacgaggcaaataaacccagacgtagttcagctagccgcttctacctccctctccccccccgcctgcgcgctgccgcgagagctcgttcctgatggggaactgcgccggcgtggaggggaacgccgagatcaacccttccttcagtgcccccaattcctcagggaccgccggttctaagagcgtcagcaagaacgcggccgacaccagcaccttcggcaccaagacgtccggctcgtcgtcgtcggtgccgccaacccctcgtacggaggcggagatcctggagtcgtcgaatgtccgcaagttcagcttcggcgagctcaaaggctccacgaggaacttcaggccggacagcctgctcggggaggggggcttcgggtccgtgttcaaggggtggatggatgagcgcacgctcgcgcccgtcaggccgggcgccgggatcatcgtcgccgtcaagaagctcaagctcgacagcttccaagggcaccgggaatggctggcggaggtcaattacctggggcagttatcccaccctaatctcgtgaaactcatcggctactgcttggaggacgagcagcggcttcttgtgtacgagtatatgccgagagggagcctggagcatcatctcttcaggaggggctcgaacttccagccgctcccatggaacttacgcatgaaggttgctctcgaggctgccagaggtcttgctttcctgcacggcgaccaggccaaagttatctaccgcgatttcaagacctccaatatccttctcgactcggagtacaacgcaaaactgtctgatttcggtttggcaaaggacggtccaagcggtgataagagccatgtttctactagggtcatggggacacaaggatacgctgcccctgaatatcttgcgacaggccatttgacagcgaagagcgatgtgtacagctacggtgtggttcttctggagctgctgtccgggcagcgcgctctggacaagaaccgcccgcccggtcagcacaatctggtggagtgggctagaccttacatcaccaacaagaggagggtcattcatgtcctggactcacggctgggttcccagtattcccttcccgcggctcagaaggtggcaacactggcgctgcaatgcttatcgatggacgcacgatgcaggcctggcatggatcaggttgtgactgcattagaacaacttcaaaggccaagggctcactgaaaaagatgtccatctacatctgtggagtctggagcatcctcctgtaatactttaggggagtaaaaaaacagagaacggacgagggtttgaagggctaagtggcttgtgaagagaatataatattgccttgctttgtgtacagctagttgcttcgtcgttgtaacttgggtctctacttatatattttattagtcttcgatgtaccagcggttcaaagggtaagttcttttgttccacttcaccgcaagattccagtttgaatgttcttgagagtgtaagaaatgcttcttaaaagaccgccgctgcaaattgcttgcc

SEQ ID NO: 92296 - DNA, 1715 bp, Zea Mays
cctccaccgccctccctcgcaggcaggcaggcagccagagccagagccagccgggcaagcactgcagcagccattgtactcatcacctccttcccacgcagcgagaggatgacaccacgaggcaaataaacccagacgtagttcagctagccgcttctacctccctctccccccccgcctgcgcgctgccgcgagagctcgttcctgatggggaactgcgccggcgtggaggggaacgccgagatcaacccttccttcagtgcccccaattcctcagggaccgccggttctaagagcgtcagcaagaacgcggccgacaccagcaccttcggcaccaagacgtccggctcgtcgtcgtcggtgccgccaacccctcgtacggaggcggagatcctggagtcgtcgaatgtccgcaagttcagcttcggcgagctcaaaggctccacgaggaacttcaggccggacagcctgctcggggaggggggcttcgggtccgtgttcaaggggtggatggatgagcgcacgctcgcgcccgtcaggccgggcgccgggatcatcgtcgccgtcaagaagctcaagctcgacagcttccaagggcaccgggaatggctggcggaggtcaattacctggggcagttatcccaccctaatctcgtgaaactcatcggctactgcttggaggacgagcagcggcttcttgtgtacgagtatatgccgagagggagcctggagcatcatctcttcaggagtaggctctctctcgagtgtttcgttcgcgatatccctccattcttggcttctcgctttatgaaaaaaaggactgaatgctatggtgttgcagggggctcgaacttccagccgctcccatggaacttacgcatgaaggttgctctcgaggctgccagaggtcttgctttcctgcacggcgaccaggccaaagttatctaccgcgatttcaagacctccaatatccttctcgactcggagtacaacgcaaaactgtctgatttcggtttggcaaaggacggtccaagcggtgataagagccatgtttctactagggtcatggggacacaaggatacgctgcccctgaatatcttgcgacaggccatttgacagcgaagagcgatgtgtacagctacggtgtggttcttctggagctgctgtccgggcagcgcgctctggacaagaaccgcccgcccggtcagcacaatctggtggagtgggctagaccttacatcaccaacaagaggagggtcattcatgtcctggactcacggctgggttcccagtattcccttcccgcggctcagaaggtggcaacactggcgctgcaatgcttatcgatggacgcacgatgcaggcctggcatggatcaggttgtgactgcattagaacaacttcaaaggccaagggctcactgaaaaagatgtccatctacatctgtggagtctggagcatcctcctgtaatactttaggggagtaaaaaaacagagaacggacgagggtttgaagggctaagtggcttgtgaagagaatataatattgccttgctttgtgtacagctagttgcttcgtcgttgtaacttgggtctctacttatatattttattagtcttcgatgtaccagcggttcaaagggtaagttcttttgttccacttcaccgcaagattccagtttgaatgttcttgagagtgtaagaaatgcttctt

SEQ ID NO: 92297 - DNA, 1320 bp, Zea Mays
cgcagcgagaggatgacaccacgaggcaaataaacccagacgtagttcagctagccgcttctacctccctctccccccccgcctgcgcgctgccgcgagagctcgttcctgatggggaactgcgccggcgtggaggggaacgccgagatcctggagtcgtcgaatgtccgcaagttcagcttcggcgagctcaaaggctccacgaggaacttcaggccggacagcctgctcggggaggggggcttcgggtccgtgttcaaggggtggatggatgagcgcacgctcgcgcccgtcaggccgggcgccgggatcatcgtcgccgtcaagaagctcaagctcgacagcttccaagggcaccgggaatggctggcggaggtcaattacctggggcagttatcccaccctaatctcgtgaaactcatcggctactgcttggaggacgagcagcggcttcttgtgtacgagtatatgccgagagggagcctggagcatcatctcttcaggaggggctcgaacttccagccgctcccatggaacttacgcatgaaggttgctctcgaggctgccagaggtcttgctttcctgcacggcgaccaggccaaagttatctaccgcgatttcaagacctccaatatccttctcgactcggagtacaacgcaaaactgtctgatttcggtttggcaaaggacggtccaagcggtgataagagccatgtttctactagggtcatggggacacaaggatacgctgcccctgaatatcttgcgacaggccatttgacagcgaagagcgatgtgtacagctacggtgtggttcttctggagctgctgtccgggcagcgcgctctggacaagaaccgcccgcccggtcagcacaatctggtggagtgggctagaccttacatcaccaacaagaggagggtcattcatgtcctggactcacggctgggttcccagtattcccttcccgcggctcagaaggtggcaacactggcgctgcaatgcttatcgatggacgcacgatgcaggcctggcatggatcaggttgtgactgcattagaacaacttcaaaggccaagggctcactgaaaaagatgtccatctacatctgtggagtctggagcatcctcctgtaatactttaggggagtaaaaaaacagagaacggacgagggtttgaagggctaagtggcttgtgaagagaatataatattgccttgctttgtgtacagctagttgcttcgtcgttgtaacttgggtctctacttatatattttattagtcttcgatgtaccagcggttcaaagggtaagttcttttg

SEQ ID NO: 92298 - DNA, 1475 bp, Zea Mays
tgcccgtccattaatgacctaacggaccccacggcgcgcgcccaccaccagtccaccaccctccaccgccctccctcgcaggcaggcaggcagccagagccagagccagccgggcaagcactgcagcagccattgtactcatcacctccttcccacgcagcgagaggatgacaccacgaggcaaataaacccagacgtagttcagctagccgcttctacctccctctccccccccgcctgcgcgctgccgcgagagctcgttcctgatggggaactgcgccggcgtggaggggaacgcggagatcctggagtcgtcgaatgtccgcaagttcagcttcggcgagctcaaaggctccacgaggaacttcaggccggacagcctgctcggggaggggggcttcgggtccgtgttcaaggggtggatggatgagcgcacgctcgcgcccgtcaggccgggcgccgggatcatcgtcgccgtcaagaagctcaagctcgacagcttccaagggcaccgggaatggctggcggaggtcaattacctggggcagttatcccaccctaatctcgtgaaactcatcggctactgcttggaggacgagcagcggcttcttgtgtacgagtatatgccgagagggagcctggagcatcatctcttcaggaggggctcgaacttccagccgctcccatggaacttacgcatgaaggttgctctcgaggctgccagaggtcttgctttcctgcacggcgaccaggccaaagttatctaccgcgatttcaagacctccaatatccttctcgactcggagtacaacgcaaaactgtctgatttcggtttggcaaaggacggtccaagcggtgataagagccatgtttctactagggtcatggggacacaaggatacgctgcccctgaatatcttgcgacaggccatttgacagcgaagagcgatgtgtacagctacggtgtggttcttctggagctgctgtccgggcagcgcgctctggacaagaaccgcccgcccggtcagcacaatctggtggagtgggctagaccttacatcaccaacaagaggagggtcattcatgtcctggactcacggctgggttcccagtattcccttcccgcggctcagaaggtggcaacactggcgctgcaatgcttatcgatggacgcacgatgcaggcctggcatggatcaggttgtgactgcattagaacaacttcaaaggccaagggctcactgaaaaagatgtccatctacatctgtggagtctggagcatcctcctgtaatactttaggggagtaaaaaaacagagaacggacgagggtttgaagggctaagtggcttgtgaagagaatataatattgccttgctttgtgtacagctagttgcttcgtcgttgtaacttgggtctctacttatatattttattagtcttcgatgtaccagcggttcaaagggtaagttcttttg

SEQ ID NO: 92299 - DNA, 1937 bp, Zea Mays
tttaagcagctctgcactcccccctgctctctcccagtcccagtcccagtcccagtcccaggacagtcccgtcagcagccacttccccggcccctcccgctcctgctcgccggaggccgggccggcggcgatggggcacggcgctagctgcggccgaccaagcgaggaggtagacttcttcggcgcggcgcagtccggggacatggcccgcctcgccgccgctcttcgctcccgccccaccttgctcagccgcaccacgctcttcgaccgcctctccgcgctccacatcgccgccgcacacggccacctccaggtggtctccctggcattggatctttgcgtgcaccccgacgtcgttaaccgccacaagcagacggcgttgatgctctcggcgatgcacgggaagaccgactgcgtccgccggctgctcgacgccggcgccaatatcgtgatgttcgattcctcgcacgggcggacgtgcctgcactacgcagcgtactacgggcacgcggactgcctccggaccatcctctcggcggcggccaagtccgcgccggtctcggaatcctgggggttcgcgcgcttcgtgaacgtgcgggacgacaccggagcgacgccgctgcacctcgcggcgaggcagggctggcggcgctgcgtccacgtcctactcgagaacggcgccatcgtgtctgcttccagtggcgccttcggattcccgggcagcacgccgctgcatttggccgcgcgcggcggcaacctggactgcgtccggcaactgctgtcctggggcgccgaccgcctccagcgagactccgtcgggagaattccgtatgaggtcgccgcgaagcgagggcacgtcgcgtgcgcggcgctgctgaacccgtcgtccgcggagccccttgtctggccgtccgctctcaagttcatcagcgagctggaacccgatgccaaatctttgctcgaagcagccctgatggaggccaacagagagagggagaggaggatcctgaaaggcgccaagaatgcattgccctcgccatcgcaccccgatgacggcgctcatgacaccgccatagctgaggctagcgacgcggaggtgtgcagcatctgcttcgagcaggcgtgcagcatcgaggtccgggagtgcgggcaccagatgtgcgcggcgtgcacgctggcgctgtgctgccacgccaagcccaacccggcgacgcagtcccagccgctgccgacctgcccgttctgccgcggcggcatcgcccggctggtggtggccacgcggacgagggccggcgacgacgaggagcggtgcaagctggagtctcccaggcactgccgagcccgccggtccatgagcctcagcggcgacgcgggcagcaccagcaccctcatgggcagcatcgcctcctccatcggcaagatgggccgccggcgaacagagagcagcgagcaggtcgacgacaaaccgtagcaaaatcattgtttcctttcatgcatccatccatgcgtaatccacatgtgaaatcggtgcgtatgataatcctgcaacgtcggcgtcgaacaaggcacagcttttgtagattattttttggcaagtgagctattcacctgtgtaggttcattcaagagagagtctgcgctgacgtgctgtctaggctagatccgatcagcgatgatccgaataagcagctcgtccttgcccggcagcccccatgcggccatgccccccgtggtccgtggatggagttcttgaaaggctgctgagaaaacatgcctgattcgcagaggcctggcccggcatggcaatgagaaacggtacaaatccatgagaccgattcatatatgattgcccgaatggggcagcgccgctcaggttttggccagttgccctctcagaatttagtcccaatcacatcttaattctggttctgaattaa

SEQ ID NO: 92300 - DNA, 1951 bp, Zea Mays
tttaagcagctctgcactcccccctgctctctcccagtcccagtcccagtcccagtcccaggacagtcccgtcagcagccacttccccggcccctcccgctcctgctcgccggaggccgggccggcggcgatggggcacggcgctagctgcggccgaccaagcgaggaggtagacttcttcggcgcggcgcagtccggggacatggcccgcctcgccgccgctcttcgctcccgccccaccttgctcagccgcaccacgctcttcgaccgcctctccgcgctccacatcgccgccgcacacggccacctccaggtggtctccctggcattggatctttgcgtgcaccccgacgtcgttaaccgccacaagcagacggcgttgatgctctcggcgatgcacgggaagaccgactgcgtccgccggctgctcgacgccggcgccaatatcgtgatgttcgattcctcgcacgggcggacgtgcctgcactacgcagcgtactacgggcacgcggactgcctccggaccatcctctcggcggcggccaagtccgcgccggtctcggaatcctgctgtggaggtgcagggggttcgcgcgcttcgtgaacgtgcgggacgacaccggagcgacgccgctgcacctcgcggcgaggcagggctggcggcgctgcgtccacgtcctactcgagaacggcgccatcgtgtctgcttccagtggcgccttcggattcccgggcagcacgccgctgcatttggccgcgcgcggcggcaacctggactgcgtccggcaactgctgtcctggggcgccgaccgcctccagcgagactccgtcgggagaattccgtatgaggtcgccgcgaagcgagggcacgtcgcgtgcgcggcgctgctgaacccgtcgtccgcggagccccttgtctggccgtccgctctcaagttcatcagcgagctggaacccgatgccaaatctttgctcgaagcagccctgatggaggccaacagagagagggagaggaggatcctgaaaggcgccaagaatgcattgccctcgccatcgcaccccgatgacggcgctcatgacaccgccatagctgaggctagcgacgcggaggtgtgcagcatctgcttcgagcaggcgtgcagcatcgaggtccgggagtgcgggcaccagatgtgcgcggcgtgcacgctggcgctgtgctgccacgccaagcccaacccggcgacgcagtcccagccgctgccgacctgcccgttctgccgcggcggcatcgcccggctggtggtggccacgcggacgagggccggcgacgacgaggagcggtgcaagctggagtctcccaggcactgccgagcccgccggtccatgagcctcagcggcgacgcgggcagcaccagcaccctcatgggcagcatcgcctcctccatcggcaagatgggccgccggcgaacagagagcagcgagcaggtcgacgacaaaccgtagcaaaatcattgtttcctttcatgcatccatccatgcgtaatccacatgtgaaatcggtgcgtatgataatcctgcaacgtcggcgtcgaacaaggcacagcttttgtagattattttttggcaagtgagctattcacctgtgtaggttcattcaagagagagtctgcgctgacgtgctgtctaggctagatccgatcagcgatgatccgaataagcagctcgtccttgcccggcagcccccatgcggccatgccccccgtggtccgtggatggagttcttgaaaggctgctgagaaaacatgcctgattcgcagaggcctggcccggcatggcaatgagaaacggtacaaatccatgagaccgattcatatatgattgcccgaatggggcagcgccgctcaggttttggccagttgccctctcagaatttagtcccaatcacatcttaattctggttctgaattaa

SEQ ID NO: 92301 - DNA, 1250 bp, Zea Mays
caatgatgatggaagaatcatagttgcaaagcaaaagctaggtggacaacctgatgaagcatatcttaaatttgtgacgctttgtgcggaaaaaatattttctgaggttacgcaggatgcttatgctgttatcctggctggtggaaccctccagcctattgaagaaactaggctgcgcttgtgtccaagcttaccaccaactggtataaaattcttcacttccaaccatattgttcctcctgagagtattcttccaatagcagttacacgtggaccctcaggcatggcatttgatttcagctacaattcaaggagctctccttccatgattgaggaacttggtcgtttcatctgtaacattataacagtcgtgcctaagggagttgttatgtttttttcttcatatgattatgaaaggcgtgtatatgatgcatggatgacaacaggcacaatttccaggatttctaaaaagaaacatgttttcagagatccaaggaacagtgctgatgtcgaggctgtcctcaacaaatacaaggaggcaattgaatcctgtagtaatttttcccaagacacaggtgtcaatggggcacttctattagctgttgttggtgggaagatttctgaaggcataaatttcagcaacgggatgggtcgttgtgtcataatggttggcttgccttatctaagtccatctgatgtgagctgatagagacgataaagcatatcgaaagtatttctagctcattttttgctggagatgataaggccttaagcagaaaatatgatgatgaatgtgaacttcagcctggttatgatatattacggaagtgcactagaggtggaagagagtattatgagaatttatgcatgaaagctgtgaatcaatctattggtaagctgcttctcctgagcatttgtcatgcatatagcactgtttaatttcatccttatatggtaagatgaaataattgcaggcagagcaatcaggcacataaatgactatgctacaatgctattggttgactcgcgttatgcacagacttcatcaaccaaaagtttttcctgcccggctgataagcttcctcaatggataaaagcacgactctcttgtgctcaaaactatggagaagttcatagatcgttgcatcagttcttcaagttcaataaaaaaaatgttgaaatactctagaaaccaccaagcattgccattgttgattcaatgcaaacaaaaatacaggtgtatgtactcg

SEQ ID NO: 92302 - DNA, 2369 bp, Zea Mays
gctcggcggatttccctacacagaacgttcgaaatttcagagatctccgcgcgccaaagcgcctagctgataccaagagtgaacatcgctgaaaaaaattctaatttctatagactcatcatgtgatacccttttgtgttcagatctaaaccgaagcttgagctccggttgttggtggttggtcggcggcggcaggggaggctgcgaagatgtcgtcgagcacgatccgcaaggccctgggcgcggtgaaggaccagaccagcatcggcctcgccaaggtcaccagcaacatcgcgcccgagctggacgtgctcatcgtcaaggccacgagccacgacgacgagccggccgaggagcgccacatccgcgagatcctccacctcacatccggatcccgcgcccacgtcgctgctgccgtggcaggctgctcccgcaggctctcccgcacccgcgactacgtggtcgcgctcaagtcgctcatgctcgtgcaccgcctcctggccgatggcgacccgtccttccaccgcgagctcctccacgccacacgccggggcacccgcctgctcaacctctccgattttcgggacgaggcgcactctggatcctgggatcactctgcctttgtgcgcacctacgcgctctaccttgaccagcgcctcgagttcttcctccatgagcgcaagcaggggtcaaatgctggcagcagcagcagcaccaatggtccatcaccgcgggaccgtgaccgctggggttcacctgatccctatggccgccgctctccctcctactcgtcaccccctggggtatggcggatatgatgattaccgcgagagaaatggtggaaacaatgatgacaagagaccgcccaccccagtgagagatatgaagccagagcaggtccttgctcgtatgcaccacctacagcagctgcttgacaggttccttgcttgccgtcccaccggtggggcgaagcacagcaggatggtgctggttgcgctgtatcagattgtgagggagagcttccagctctacgccgatatctgcgaggtgctggcggtgctgctggacaggttctttgacatggagtatgctgaatgcgtgaaggcttttgaggcttatgctagtgctgcaaagcagatcgatgagctctgtgcattctatgcatggtgtaaagataccggagttgcaaggtcatctgagtacccagaggtgcagcgggtcaccgataagttgctggagacgctggaagaatttatgagggaccgggcaaagaggcccaagagcccatcaccggagcctgaacctgagcctgtcaaggaagaacctgagccagatatgaacagcatcaaggcgcttccagcaccagaagattataaggagcctgaacctgagaaggtggaggaagaggtgaagccagagccacccctgcagccacagggtgacttggtggatctcagagaagatactgttagtgcagatgagcaaggtaacaggcttgctctagctctcttccaggggccaccagctgctggtggaagcaacggttcatgggaggctttcccttcaaatggtggcaacgaggtgacttcggcctggcagaaccctgcagctgaacctgggaaggctgattgggagcttgcccttgtagagacagcaagcaacttgtccaatcagaagccagcaatgtcaggtggcatggacccgctgctgctgaatggtatgtatgaccagggtgttgtgcgccagcatgtcggtgcacaggtgaccaccgggagtgccagcagtgtcgcgctgcctgctcctggacagaagactcagatgcttgctctgcccgcaccggatggttcgatgcagactgttggtggtgatcccttcgcggcgtcccttgccgtgccaccgccgtcctatgtgcagatggcagatttggagaagaagcaacagctcttgacgcaggagcaaattatgtggcagcagtaccagagagacggcatgcaagggcaatcgagcctgaacaggctcgaccgcgcccccaacccggccatgccctacgggatgcccatggcatacaacacgaaccccatgccaatggcttacaccgggaacactgggtattactaccctacttactgaggaggcctgttctttaatcatccttacagttgctgtgaatttttgttctgtgttgtgatcttccccgccctgcggttgtgtccagcatcagctgttgttcccctgtccctggatcaaaccttttggtctgatatatgtaatgtaattttctttgtttggaaccaaatgcagcatccgagggtggtggctatagttgattacataatctcatgttgatctttacactgtttttactgatc

SEQ ID NO: 92303 - DNA, 2531 bp, Zea Mays
ggaagacacaacagcgcctcaccagccagccaccaccgcgctccatttcctttctctctctctctcggctcctccgctctcttgcccgagtcgctagcttccctgccccgcctcctcccgtccccgtggacagacagctccccccacctccgcttccatagcatccgagctaaggtcaactcctccgtcggcggagcgagagcggggaagagacgggagggtcccggatccgagccgagctgcgctccccgcgcgaccgacacccaggtctcgtcgtcccatgcagatctgctcctcctcctgagatctaaaccgaagcttgagctccggttgttggtggttggtcggcggcggcaggggaggctgcgaagatgtcgtcgagcacgatccgcaaggccctgggcgcggtgaaggaccagaccagcatcggcctcgccaaggtcaccagcaacatcgcgcccgagctggacgtgctcatcgtcaaggccacgagccacgacgacgagccggccgaggagcgccacatccgcgagatcctccacctcacatccggatcccgcgcccacgtcgctgctgccgtggcaggctgctcccgcaggctctcccgcacccgcgactacgtggtcgcgctcaagtcgctcatgctcgtgcaccgcctcctggccgatggcgacccgtccttccaccgcgagctcctccacgccacacgccggggcacccgcctgctcaacctctccgattttcgggacgaggcgcactctggatcctgggatcactctgcctttgtgcgcacctacgcgctctaccttgaccagcgcctcgagttcttcctccatgagcgcaagcaggggtcaaatgctggcagcagcagcagcaccaatggtccatcaccgcgggaccgtgaccgctggggttcacctgatccctatggccgccgctctccctcctactcgtcaccccctggggtatggcggatatgatgattaccgcgagagaaatggtggaaacaatgatgacaagagaccgcccaccccagtgagagatatgaagccagagcaggtccttgctcgtatgcaccacctacagcagctgcttgacaggttccttgcttgccgtcccaccggtggggcgaagcacagcaggatggtgctggttgcgctgtatcagattgtgagggagagcttccagctctacgccgatatctgcgaggtgctggcggtgctgctggacaggttctttgacatggagtatgctgaatgcgtgaaggcttttgaggcttatgctagtgctgcaaagcagatcgatgagctctgtgcattctatgcatggtgtaaagataccggagttgcaaggtcatctgagtacccagaggtgcagcgggtcaccgataagttgctggagacgctggaagaatttatgagggaccgggcaaagaggcccaagagcccatcaccggagcctgaacctgagcctgtcaaggaagaacctgagccagatatgaacagcatcaaggcgcttccagcaccagaagattataaggagcctgaacctgagaaggtggaggaagaggtgaagccagagccacccctgcagccacagggtgacttggtggatctcagagaagatactgttagtgcagatgagcaaggtaacaggcttgctctagctctcttccaggggccaccagctgctggtggaagcaacggttcatgggaggctttcccttcaaatggtggcaacgaggtgacttcggcctggcagaaccctgcagctgaacctgggaaggctgattgggagcttgcccttgtagagacagcaagcaacttgtccaatcagaagccagcaatgtcaggtggcatggacccgctgctgctgaatggtatgtatgaccagggtgttgtgcgccagcatgtcggtgcacaggtgaccaccgggagtgccagcagtgtcgcgctgcctgctcctggacagaagactcagatgcttgctctgcccgcaccggatggttcgatgcagactgttggtggtgatcccttcgcggcgtcccttgccgtgccaccgccgtcctatgtgcagatggcagatttggagaagaagcaacagctcttgacgcaggagcaaattatgtggcagcagtaccagagagacggcatgcaagggcaatcgagcctgaacaggctcgaccgcgcccccaacccggccatgccctacgggatgcccatggcatacaacacgaaccccatgccaatggcttacaccgggaacactgggtattactaccctacttactgaggaggcctgttctttaatcatccttacagttgctgtgaatttttgttctgtgttgtgatcttccccgccctgcggttgtgtccagcatcagctgttgttcccctgtccctggatcaaaccttttggtctgatatatgtaatgtaattttctttgtttggaaccaaatgcagcatccgagggtggtggctatagttgattacataatctcatgttgatctttacactgtttttactgatc

SEQ ID NO: 92304 - DNA, 2521 bp, Zea Mays
ggaagacacaacagcgcctcaccagccagccaccaccgcgctccatttcctttctctctctctctcggctcctccgctctcttgcccgagtcgctagcttccctgccccgcctcctcccgtccccgtggacagacagctccccccacctccgcttccatagcatccgagctaaggtcaactcctccgtcggcggagcgagagcggggaagagacgggagggtcccggatccgagccgagctgcgctccccgcgcgaccgacacccaggtctcgtcgtcccatgcagatctgctcctcctcctgagatctaaaccgaagcttgagctccggttgttggtggttggtcggcggcggcaggggaggctgcgaagatgtcgtcgagcacgatccgcaaggccctgggcgcggtgaaggaccagaccagcatcggcctcgccaaggtcaccagcaacatcgcgcccgagctggacgtgctcatcgtcaaggccacgagccacgacgacgagccggccgaggagcgccacatccgcgagatcctccacctcacatccggatcccgcgcccacgtcgctgctgccgtggcaggctgctcccgcaggctctcccgcacccgcgactacgtggtcgcgctcaagtcgctcatgctcgtgcaccgcctcctggccgatggcgacccgtccttccaccgcgagctcctccacgccacacgccggggcacccgcctgctcaacctctccgattttcgggacgaggcgcactctggatcctgggatcactctgcctttgtgcgcacctacgcgctctaccttgaccagcgcctcgagttcttcctccatgagcgcaagcaggggtcaaatgctggcagcagcagcagcaccaatggtccatcaccgcgggaccgtgaccgctggggttcacctgatccctatggccgccgctctccctcctactcgtcaccccctggggtatggcggatatgatgattaccgcgagagaaatggtggaaacaatgatgacaagagaccgcccaccccagtgagagatatgaagccagagcaggtccttgctcgtatgcaccacctacagcagctgcttgacaggttccttgcttgccgtcccaccggtggggcgaagcacagcaggatggtgctggttgcgctgtatcagattgtgagggagagcttccagctctacgccgatatctgcgaggtgctggcggtgctgctggacaggttctttgacatggagtatgctgaatgcgtgaaggcttttgaggcttatgctagtgctgcaaagcagatcgatgagctctgtgcattctatgcatggtgtaaagataccggagttgcaaggtcatctgagtacccagaggtgcagcgggtcaccgataagttgctggagacgctggaagaatttatgagggaccgggcaaagaggcccaagagcccatcaccggagcctgaacctgagcctgtcaaggaagaacctgagccagatatgaacagcatcaaggcgcttccagcaccagaagattataaggagcctgaacctgagaaggtggaggaagaggtgaagccagagccacccctgcagccacagggtgacttggtggatctcagagaagatactgttagtgcagatgagcaaggtaacaggcttgctctagctctcttccaggggccaccagctgctggtggaagcaacggttcatgggaggctttcccttcaaatggtggcaacgaggtgacttcggcctggcagaaccctgcagctgaacctgggaaggctgattgggagcttgcccttgtagagacagcaagcaacttgtccaatcagaagccagcaatgtcaggtggcatggacccgctgctgctgaatggtatgtatgaccagggtgttgtgcgccagcatgtcggtgcacaggtgaccaccgggagtgccagcagtgtcgcgctgcctgctcctggacagaagactcagatgcttgctctgcccgcaccggatggttcgatgcagactgttggtggtgatcccttcgcggcgtcccttgccgtgccaccgccgtcctatgtgcagatggcagatttggagaagaagcaacagctcttgacgcaggagcaaattatgtggcagcagtaccagagagacggcatgcaagggcaatcgagcctgaacaggctcgaccgcgcccccaacccggccatgccctacgggatgcccatggcatacaacacgaaccccatgccaatggcttacaccgggaacactgggtattactaccctacttactgaggaggcctgttctttaatcatccttacagttgctgtgaatttttgttctgtgttgtgatcttccccgccctgcggttgtgtccagcatcagctgttgttcccctgtccctggatcaaaccttttggtctgatatatgtaatgtaattttctttgtttggaaccaaatgcagcatccgagggtggtggctatagttgattacataatctcatgttgatctttacactgtt

SEQ ID NO: 92305 - DNA, 2359 bp, Zea Mays
gggtcgttggtacggatccgcgggcgtaatatacgcgtacgcgcgcgcgcgcgcacggcggcgccttgctggaagcgcagcggcgagcggcagcgccgatcccatcgccgaaccggtcaacacacccctcctccacccgcacgatctaaaccgaagcttgagctccggttgttggtggttggtcggcggcggcaggggaggctgcgaagatgtcgtcgagcacgatccgcaaggccctgggcgcggtgaaggaccagaccagcatcggcctcgccaaggtcaccagcaacatcgcgcccgagctggacgtgctcatcgtcaaggccacgagccacgacgacgagccggccgaggagcgccacatccgcgagatcctccacctcacatccggatcccgcgcccacgtcgctgctgccgtggcaggctgctcccgcaggctctcccgcacccgcgactacgtggtcgcgctcaagtcgctcatgctcgtgcaccgcctcctggccgatggcgacccgtccttccaccgcgagctcctccacgccacacgccggggcacccgcctgctcaacctctccgattttcgggacgaggcgcactctggatcctgggatcactctgcctttgtgcgcacctacgcgctctaccttgaccagcgcctcgagttcttcctccatgagcgcaagcaggggtcaaatgctggcagcagcagcagcaccaatggtccatcaccgcgggaccgtgaccgctggggttcacctgatccctatggccgccgctctccctcctactcgtcaccccctggggtatggcggatatgatgattaccgcgagagaaatggtggaaacaatgatgacaagagaccgcccaccccagtgagagatatgaagccagagcaggtccttgctcgtatgcaccacctacagcagctgcttgacaggttccttgcttgccgtcccaccggtggggcgaagcacagcaggatggtgctggttgcgctgtatcagattgtgagggagagcttccagctctacgccgatatctgcgaggtgctggcggtgctgctggacaggttctttgacatggagtatgctgaatgcgtgaaggcttttgaggcttatgctagtgctgcaaagcagatcgatgagctctgtgcattctatgcatggtgtaaagataccggagttgcaaggtcatctgagtacccagaggtgcagcgggtcaccgataagttgctggagacgctggaagaatttatgagggaccgggcaaagaggcccaagagcccatcaccggagcctgaacctgagcctgtcaaggaagaacctgagccagatatgaacagcatcaaggcgcttccagcaccagaagattataaggagcctgaacctgagaaggtggaggaagaggtgaagccagagccacccctgcagccacagggtgacttggtggatctcagagaagatactgttagtgcagatgagcaaggtaacaggcttgctctagctctcttccaggggccaccagctgctggtggaagcaacggttcatgggaggctttcccttcaaatggtggcaacgaggtgacttcggcctggcagaaccctgcagctgaacctgggaaggctgattgggagcttgcccttgtagagacagcaagcaacttgtccaatcagaagccagcaatgtcaggtggcatggacccgctgctgctgaatggtatgtatgaccagggtgttgtgcgccagcatgtcggtgcacaggtgaccaccgggagtgccagcagtgtcgcgctgcctgctcctggacagaagactcagatgcttgctctgcccgcaccggatggttcgatgcagactgttggtggtgatcccttcgcggcgtcccttgccgtgccaccgccgtcctatgtgcagatggcagatttggagaagaagcaacagctcttgacgcaggagcaaattatgtggcagcagtaccagagagacggcatgcaagggcaatcgagcctgaacaggctcgaccgcgcccccaacccggccatgccctacgggatgcccatggcatacaacacgaaccccatgccaatggcttacaccgggaacactgggtattactaccctacttactgaggaggcctgttctttaatcatccttacagttgctgtgaatttttgttctgtgttgtgatcttccccgccctgcggttgtgtccagcatcagctgttgttcccctgtccctggatcaaaccttttggtctgatatatgtaatgtaattttctttgtttggaaccaaatgcagcatccgagggtggtggctatagttgattacataatctcatgttgatctttacactgtt

SEQ ID NO: 92306 - DNA, 1379 bp, Zea Mays
gaggagggcaggatgtcgcaccgtaagttcgagcacccgaggcacggctcagtcattccctagggatgacgccaagaagccttgccatctcactgccttccttggctacaaggctggcatgactcacattgtccgtgaggttgagaagccaggatccaaactccataagaaggaaacttgtgaggctgttaccatcattgaaacccctcctcttgtcattgttgggctcgtggcatatgtgaagactcctcgtggcctccgcacactcaactctgtttgggcccaacatcttagcgaagaagtgaggagaaggttctacaagaactggtgcaagagcaagaagaaggctttcacaaagtatgctctcaaatatgaaaatgatgctggcaagaaggaaattcagctgcagcttgagaagatgaagaaatatgcttctgttatccgtgtcattgctcatacccagattaggaagatgaagggtttgaagcagaagaaggctcacctgatggagattcaggtcaatggtggtaccattgctgacaaggtggactatggctacaaattctttgagaaagaggtccctgttgatgctgtcttccagaaggatgagatgattgacatcattggtgtgaccaaggggaaaggttatgagggtgtggtcactcgttggggtgtcacccggcttccccgcaagacccacaggggtctccgcaaagttgcttgtatcggtgcatggcatccggctagggtctcctatacggttgctcgtgctggtcagaatgggtaccaccaccgcactgagatgaacaagaaggtttacaagatcggcaaggctggacaagagacccacgatgcctccacagagtttgacaggactgagaaggacatcactcccatgggtggcttcccccattatggtatcgtgaagggtgactacctgatgatcaagggctgctgtgtgggtccaaagaagagggtggtgaccctccgccagtccctcctgaagcagacttcccggctggcgctggaggagatcaagctcaagttcatcgacacatcgtccaaatttgggcacggtcgcttccagactaccgatgagaagcagaggttctttggcaagctcaaggcgtaaggtgctgcggtgcagcgaagtcccatttctcaaaatcatcaaactgtgatacttttgtttgtaaccttgctgtaccaagttttgtagccatggtccagtcgtctatggattgttccatgcttcagaactgcactgtctatgttttgtgctattttggttgtttaatgccccaatcattgcatatagattctaattgttttggtgtttgatgatcaatataactatttatactaattgtgtttccgaa

SEQ ID NO: 92307 - DNA, 1433 bp, Zea Mays
tttcggtccggcgggatcgaaactctcgcacccgagagccctttatatccgctagggtttacgcgcatttttgctcctcactgccgcgccgccaccctctacagataaggaagaggaggagggcaggatgtcgcaccgtaagttcgagcacccgaggcacggctccctcggcttccttcccaggaagcgctcctcccgtcaccgcggcaaggaactccataagaaggaaacttgtgaggctgttaccatcattgaaacccctcctcttgtcattgttgggctcgtggcatatgtgaagactcctcgtggcctccgcacactcaactctgtttgggcccaacatcttagcgaagaagtgaggagaaggttctacaagaactggtgcaagagcaagaagaaggctttcacaaagtatgctctcaaatatgaaaatgatgctggcaagaaggaaattcagctgcagcttgagaagatgaagaaatatgcttctgttatccgtgtcattgctcatacccagattaggaagatgaagggtttgaagcagaagaaggctcacctgatggagattcaggtcaatggtggtaccattgctgacaaggtggactatggctacaaattctttgagaaagaggtccctgttgatgctgtcttccagaaggatgagatgattgacatcattggtgtgaccaaggggaaaggttatgagggtgtggtcactcgttggggtgtcacccggcttccccgcaagacccacaggggtctccgcaaagttgcttgtatcggtgcatggcatccggctagggtctcctatacggttgctcgtgctggtcagaatgggtaccaccaccgcactgagatgaacaagaaggtttacaagatcggcaaggctggacaagagacccacgatgcctccacagagtttgacaggactgagaaggacatcactcccatgggtggcttcccccattatggtatcgtgaagggtgactacctgatgatcaagggctgctgtgtgggtccaaagaagagggtggtgaccctccgccagtccctcctgaagcagacttcccggctggcgctggaggagatcaagctcaagttcatcgacacatcgtccaaatttgggcacggtcgcttccagactaccgatgagaagcagaggttctttggcaagctcaaggcgtaaggtgctgcggtgcagcgaagtcccatttctcaaaatcatcaaactgtgatacttttgtttgtaaccttgctgtaccaagttttgtagccatggtccagtcgtctatggattgttccatgcttcagaactgcactgtctatgttttgtgctattttggttgtttaatgccccaatcattgcatatagattctaattgttttggtgtttgatgatcaatataactatttatactaattgtgtttccgaa

SEQ ID NO: 92308 - DNA, 1544 bp, Zea Mays
tttcggtccggcgggatcgaaactctcgcacccgagagccctttatatccgctagggtttacgcgcatttttgctcctcactgccgcgccgccaccctctacagataaggaagaggaggagggcaggatgtcgcaccgtaagttcgagcacccgaggcacggctccctcggcttccttcccaggaagcgctcctcccgtcaccgcggcaaggtgaagtcattccctagggatgacgccaagaagccttgccatctcactgccttccttggctacaaggctggcatgactcacattgtccgtgaggttgagaagccaggatccaaactccataagaaggaaacttgtgaggctgttaccatcattgaaacccctcctcttgtcattgttgggctcgtggcatatgtgaagactcctcgtggcctccgcacactcaactctgtttgggcccaacatcttagcgaagaagtgaggagaaggttctacaagaactggtgcaagagcaagaagaaggctttcacaaagtatgctctcaaatatgaaaatgatgctggcaagaaggaaattcagctgcagcttgagaagatgaagaaatatgcttctgttatccgtgtcattgctcatacccagattaggaagatgaagggtttgaagcagaagaaggctcacctgatggagattcaggtcaatggtggtaccattgctgacaaggtggactatggctacaaattctttgagaaagaggtccctgttgatgctgtcttccagaaggatgagatgattgacatcattggtgtgaccaaggggaaaggttatgagggtgtggtcactcgttggggtgtcacccggcttccccgcaagacccacaggggtctccgcaaagttgcttgtatcggtgcatggcatccggctagggtctcctatacggttgctcgtgctggtcagaatgggtaccaccaccgcactgagatgaacaagaaggtttacaagatcggcaaggctggacaagagacccacgatgcctccacagagtttgacaggactgagaaggacatcactcccatgggtggcttcccccattatggtatcgtgaagggtgactacctgatgatcaagggctgctgtgtgggtccaaagaagagggtggtgaccctccgccagtccctcctgaagcagacttcccggctggcgctggaggagatcaagctcaagttcatcgacacatcgtccaaatttgggcacggtcgcttccagactaccgatgagaagcagaggttctttggcaagctcaaggcgtaaggtgctgcggtgcagcgaagtcccatttctcaaaatcatcaaactgtgatacttttgtttgtaaccttgctgtaccaagttttgtagccatggtccagtcgtctatggattgttccatgcttcagaactgcactgtctatgttttgtgctattttggttgtttaatgccccaatcattgcatatagattctaattgttttggtgtttgatgatcaatataactatttatactaattgtgtttccgaa

SEQ ID NO: 92309 - DNA, 1693 bp, Zea Mays
tttcggtccggcgggatcgaaactctcgcacccgagagccctttatatccgctagggtttacgcgcatttttgctcctcactgccgcgccgccaccctctacaggtgaatgtaacgaatccgccgcgggcgtcatctcctcttcccacctcgactcgccttgctcgccggcggcggccttttcttcgccgagcggcgagccgcccatgttgagctcgtggctgatctgatgggcttgttgtgatctcctgcagataaggaagaggaggagggcaggatgtcgcaccgtaagttcgagcacccgaggcacggctccctcggcttccttcccaggaagcgctcctcccgtcaccgcggcaaggtgaagtcattccctagggatgacgccaagaagccttgccatctcactgccttccttggctacaaggctggcatgactcacattgtccgtgaggttgagaagccaggatccaaactccataagaaggaaacttgtgaggctgttaccatcattgaaacccctcctcttgtcattgttgggctcgtggcatatgtgaagactcctcgtggcctccgcacactcaactctgtttgggcccaacatcttagcgaagaagtgaggagaaggttctacaagaactggtgcaagagcaagaagaaggctttcacaaagtatgctctcaaatatgaaaatgatgctggcaagaaggaaattcagctgcagcttgagaagatgaagaaatatgcttctgttatccgtgtcattgctcatacccagattaggaagatgaagggtttgaagcagaagaaggctcacctgatggagattcaggtcaatggtggtaccattgctgacaaggtggactatggctacaaattctttgagaaagaggtccctgttgatgctgtcttccagaaggatgagatgattgacatcattggtgtgaccaaggggaaaggttatgagggtgtggtcactcgttggggtgtcacccggcttccccgcaagacccacaggggtctccgcaaagttgcttgtatcggtgcatggcatccggctagggtctcctatacggttgctcgtgctggtcagaatgggtaccaccaccgcactgagatgaacaagaaggtttacaagatcggcaaggctggacaagagacccacgatgcctccacagagtttgacaggactgagaaggacatcactcccatgggtggcttcccccattatggtatcgtgaagggtgactacctgatgatcaagggctgctgtgtgggtccaaagaagagggtggtgaccctccgccagtccctcctgaagcagacttcccggctggcgctggaggagatcaagctcaagttcatcgacacatcgtccaaatttgggcacggtcgcttccagactaccgatgagaagcagaggttctttggcaagctcaaggcgtaaggtgctgcggtgcagcgaagtcccatttctcaaaatcatcaaactgtgatacttttgtttgtaaccttgctgtaccaagttttgtagccatggtccagtcgtctatggattgttccatgcttcagaactgcactgtctatgttttgtgctattttggttgtttaatgccccaatcattgcatatagattctaattgttttggtgtttgatgatcaatataactatttatactaattgtgtttccgaa

SEQ ID NO: 92310 - DNA, 561 bp, Zea Mays
atgaagctggtcgacgacacgtcgttgaacgaccccacaacagtcgtcgatgtgagtgccctccgcgccaaccgtgctgctgggcagtcccaaattgcgccttccgacgaccatgtgcgaacacattgtacaagtcatgtcgaagggttaatactgaacctagtagatgtatcagaagatgttcctttggttgattggtctactctacatattgtggaatcttatgatgaagaaggtcgcctagcagtcatggccgatgagcaaatgtatgcttctttggggttgatgattgacgatgaaataggtgctaaccaggggggtgtcatccaagaaattgatgcccatttctcatcaatgatcatatttatggcaaaccaccacgaaagccaaggaagaacagtacaaaagcacgccaaactgaaccatcaacgccacaacggtgacttgcaatgttacgtggatagggaacttctagtcaaaatgatgatgttggatccgcaactcctcgtggcactatcatcagttcatctccaattacgaagacaacaacaaaaaggatga

SEQ ID NO: 92311 - DNA, 1164 bp, Zea Mays
atggtcttcccttcaccttcagtgcaggtctacctagatccacatccacctaattggaataaccagcagcagcaaggtcagcagccgagggcgaatgggggagctgatgcaccgttgctgcccctgggtccggcggcagctacatcggcggctccggagcaaggtgggttgcctagaagctcatcaatggctaatgccgccgtggctgcgcacgcgaggcccaactcaatggcggagcgcgcgcggctggcgcggatgccgcatccggagccagcgctcaagtgcccgcgttgcgaatccaccaacaccaagttctgctactacaacaactactccctctcccagccccgccacttctgcaagacgtgccgccgctactggacgcgcggcggatcccttcgcaacgtccccgtaggtggaggctgccgtcgcaacaagcgttcgtccaagtcctcatcctcctctgctgggtcttcctcctcaaagatgtctccctcaggaaggctactgggtggtccatcagctacaccgtccaccaccccaggcactaccggtgcgatcattactccgggtctcagctctttctctcaccacttgccgttcttgggctccatgcacccgtcagggcccaacctaggtctagctttctccgccggactgccgctagtcggcatgcagcacctggacacggtggatcagtttccggtggcaagcggcggcggcaccaccataggtgcatctctagagcagtggagagtgcgacagcagcagcagcagttcccattcatgactgggggaatactggatctgtcgcagccgccgacgtaccaattcggtttggaagctaaccgaggaggcagcggctcagctgcggtggcgttcaattcaggacagaccacgacgaccagtgctaccacgggaaggcaggaagggtcatcaaagaagatgggggatagtaaaggagaagatatgagcttacagaagcagtacatggtacctctacgccacggatcaggatcacacggtgtctgggatgggagtgctggtggaactggcagcaacggtggtggtactggcaatggcggttcaagttggccaatgaacatgattcctggattccattcttcgtccactagcggttgcaatgacagtggcttgtcgtag

SEQ ID NO: 92312 - DNA, 324 bp, Zea Mays
atgacatcgtcgtcttccgccaccgagccatcgtctctgacctctggtgtgtccctgctcccctccacgcgggaccgcacgccttatcgcggtcgcgtcttgctgtccatggagcgactctctacgccattcttgcttctctcgatggctcgctgttgcttgtggccaccatatagcttcctgcgcccgccatttcagcaactcaggcacggacgctccctattcttgtcgcatggagtgctccagcagttcgacctcatggccttcgccggcttaacctccaccgtgtgggtcgccgccgccactgctggagctgggaggtag

SEQ ID NO: 92313 - DNA, 1671 bp, Zea Mays
atcctgccgcactgccccattgtgtctgcgactgcgagtgcgcatccttcgtccttccccttcccagccgccctctccccccctctcccggtcgcctctaacgtcgctggtgactcacgaagacctccatcgacggcggtgaaactggggccgacttctggagggtttgacttgttggatacagcgctggctcttccaatcgccgggtgctctctgccactctgtcttgcggagccctcaccgcggaaaccagttggtgcgcgtggccatggcggtggcgaaggtcaaatcggtcgccctctccgtcagtcacaagtgccggaacatcttggccgccggttgggaagcccacctcaacactgtcaaggctgacaacaagggaagcaagaatgagatttacacgtcgagggtgcactacatgatccataagggcacgccctacttgattgtccccgagaacgacatgcacaacattaacattataatcgatgagcgggggtctcttgcagtattcagtccgatccgtggccgagttgcgagcttattgaagccatcgaagacacctcctcgtgttgctatgactggtgatgttctgcgcctgaaagactcaaaggttccaattattgccgatagcctgaagcaaactattctgaaggaacatgaagctgctagtaaagctagttatggagtgtcagcaatactgtcttcggcaggtgctacctgcaggtcccggagtgagggcctccttagtctactcagtgaggagagctcttacaacatcttaaaatttgacataggttcctgtgtctacatagacttcaatgggagcagccataatattgaattggacagctttgaagcaccaaaagcagatctgctaatgccattctctgcgaagcttgtggatggtatcaaccaaaatgactctaggaggagggcactggtgatgttctgttttgcgtattttaatgtgatagcaagaagcgctgtcatgctttccattgaccaccatggttttgatgtcctcgccaaagtgcctcaaggagacatccttactaatccacaataccactggaaggagttcaggttcacattcaaggaacctgccaaggatgctgaggacttctgccgcatgctggttgggttagaggaagagggtttgcagaccgtgaagagctgtagcggttacggttgacaacccacttgcaaggttcacattcaaggaaccagccaaggatgctgaggactctgccgcatgctggttcgattagagggattttgcagcgcgtgaagagctatagcggtctaggtgacagctcacttgccacaaaaccagtgagaaactatatatccgttattttggaactttgaaatatggttttagattgctatgttttattcgaagatctatggcttctcgaatttaatagagtagatgatgtttgaacatggagccgtaaactatcaatatctgtttgaatggtatttatataaataataaaactggtaacggtgaaaaccctggactgcaaaccaaaatttatatatagagttatttttattacggaatgcttgattggtttttgtgtgcatcttgttattgtagcgttgttctatgtgaagtcagtaattgttgctccagttgttaagcttcaggtttttttttttctg

SEQ ID NO: 92314 - DNA, 1649 bp, Zea Mays
ctgccgcactgccccattgtgtctgcgactgcgagtgcgcatccttcgtccttccccttcccagccgccctctccccccctctcccggtcgcctctaacgtcgctggtgactcacgaagacctccatcgacggcggtgaaactggggccgacttctggagggtttgacttgttggatacagcgctggctcttccaatcgccgggtgctctctgccactctgtcttgcggagccctcaccgcggaaaccagttggtgcgcgtggccatggcggtggcgaaggtcaaatcggtcgccctctccgtcagtcacaagtgccggaacatcttggccgccggttgggaagcccacctcaacactgtcaaggctgacaacaagggaagcaagaatgagatttacacgtcgagggtgcactacatgatccataagggcacgccctacttgattgtccccgagaacgacatgcacaacattgtaaaactcttaattcttcatttacttatggtgttcggtaaatagtagttgctgttcaaactgcattaaaatttgttgcttgtgtggaatcttgtgtttgatagaacattataatcgatgagcgggggtctcttgcagtattcagtccgatccgtggccgagttgcgagcttattgaagccatcgaagacacctcctcgtgttgctatgactggtgatgttctgcgcctgaaagactcaaaggttccaattattgccgatagcctgaagcaaactattctgaaggaacatgaagctgctagtaaagctagttatggagtgtcagcaatactgtcttcggcaggtgctacctgcaggtcccggagtgagggcctccttagtctactcagtgaggagagctcttacaacatcttaaaatttgacataggttcctgtgtctacatagacttcaatgggagcagccataatattgaattggacagctttgaagcaccaaaagcagatctgctaatgccattctctgcgaagcttgtggatggtatcaaccaaaatgactctaggaggagggcactggtgatgttctgttttgcgtattttaatgtgatagcaagaagcgctgtcatgctttccattgaccaccatggttttgatgtcctcgccaaagtgcctcaaggagacatccttactaatccacaataccactggaaggagttcaggttcacattcaaggaacctgccaaggatgctgaggacttctgccgcatgctggttgggttagaggaagagggtttgcagaccgtgaagagctgtagcggttacggttgacaacccacttgcaaggttcacattcaaggaaccagccaaggatgctgaggactctgccgcatgctggttcgattagagggattttgcagcgcgtgaagagctatagcggtctaggtgacagctcacttgccacaaaaccagtgagaaactatatatccgttattttggaactttgaaatatggttttagattgctatgttttattcgaagatctatggcttctcgaatttaatagagtagatgatgtttgaacatggagccgtaaactatcaatatctgtttgaatggtatttatataaataataaaactggtaacggtgaaaaccctggactgcaaaccaaaatttatatat

SEQ ID NO: 92315 - DNA, 840 bp, Zea Mays
tatgacttgaagccctcctccatgccaatcaaggaatgtcggacaccgctgtgccttgaagaggtacccccggttaccacatgtcgaagacctctcgaagcactttgcctacttgcttaacatcttcctagcatattgaaagtgatgcagcgattcatggtgaacgacatccataacagagacgggtttgtcctcggaacctcaagaggagggcatgacactacgaaaatcattgattgtcttcaggaccgtgatactaaccagatttatattattgaaggtgatggcattcagaaaggtgattgacaagtcatttggatttcacgctgctgtggaggaggcccaaagggccctcaatgccgctcatgtcgaggttgaaagtgtagacaatggcattggtgttgtgaagctaatgggtcgcaacagttgttttaccacagcgtgcttctctagctagacgttatgtggattgttgtttaatcctagagtcacccttctacctcgaagggaagagacggctcctcgagttcatttagagacgacgtgaggacaagggtcatgtggtcatcgtgctggctgagggtgctgaacaggacctcatcgtgagaagtatgaatttcatggacacccaagatgcttctggagataagctgcttctagatagctgcctttggctattctagaagataaaggccaggcttatggtccaaaccttcgtctccttccaatgtggtggcagagaacattgtctgtgccttcatctaccattcagtttgctttattattattattataaaatagatgatccctattgatcgatatatgtcttgactactaata

SEQ ID NO: 92316 - DNA, 1623 bp, Zea Mays
atggcggcttcgaaggtcgacggtccggcgatcggcatcgacctggggacgacctactcgtgcgtggccgtgtggcggcacgaccgcggcgaggtcatcgccaacgaccagggcaaccgcctcacgccgtcctgcgtcgcgttcaccaacgccgagaagctcgtcggcgaggcggccgtgaaccaggctgccctgaaccccaccaacaccatcttcgaagtgaagcgactaatcggccgccgattcaacgacgaatctgtgcaagaagatgccaagctgtggccttttaaagtcgtcgcaggtaatgacgaacgaccaatgatcatggtacagtatgaaggcaaggagaggcagttcatgcccgaggagatctccgccatggtgctcgccaagatgagagagacagcagaggtataccttggtaaaacggtcaagaacgctgtcatcaccgtgcctgtctacttcaacaactcccagcgccaggcaaccattgacgccggtgccatcgccggcctaaatgtcatgcgcattatcaacgagccgaccgctgccgccttggcatatggtctcgagaagatgcctgtcagcaacaaacgaaggacggtgctcgtctttgatcttggtggcggtacctttgatgtctcgctcctcaacattgatccaggagtcgatatggacaaggggctcttcgaggtggtggccatcgccggtgacactcaccttggcggggctgacttcgacaacgagatggtgaaatactgtctccgggagttcacacgcaaacacgggaagatggacatccacagcaaccagaaggcgctccggcggctgaggactgcctgcgagaaagcaaagaggatgttgtcttccaccgcacagaccaccattgaggttgactgtctccatgacggcattgacttctgtgccacaatcaccagatctcgattcgaggagctcaacaaggaccttttcagcaagtgcatcaaggctctggacaagtgcttatgcgatggcaagatggacaagggcagcgtccacgacgtcgtcctggtgggcggttccacccgcatccccaaggtacagagcatgctccggggattcttctctgggaaggagctttgccggagcatcaaccctgatgaagctgttgcgtacggcgctgccatccaggcctccattctcagtggtggaaccgaagatgggagattagtggatatgcttctccgcgacgtcacgccactctcgcttgggattgagactgaaaataattttacaatgagcgtggttatcccaaggaacacggccatcccgaccaagaaggtgcagaacttcaccacgctctacgacaaccagaaagtcgttagctttccagtgtacgagggcgagagtgcgagcaccaaggacaacaatctgctcggggagttcaagctcaccgatatacccccggcaccgaagcatgtacctagtttcgatgtcaccttcgacattgacgcaaacggcgtcatgaaggtgtccgcggaggacagagacactcggcggaagaacagcataaccatcgttaaccacggcggtcgactgcgcaaggaggaaatcgcgcgcttggtgcaggaggccgagaactaa

SEQ ID NO: 92317 - DNA, 1572 bp, Zea Mays
atggcagtggagaccgtggtcactaacgaagaagcaggaggcgccgccactgatggcaaagatggaaacctccctcctttttttcttcttttttgcgcatctggaagcatccacggcagaaaaatgccaataaacttgggttgtaacatcatatgcagcttctatgcagatgatgtgattttattcatggaaccagtcgtggaagaagtcgaagccatcaagagcctcctgctgctatttggagattccgctggcctgaagatcaatctggccaagtgctctgtgtctcctttgtcaggccgtgagacagatctcgccggcgttgtgtgctccttgggttgcaagatcgtcgagctgcctgtcacttacttgggcctgccattgcattcgggggccatccccaagaacaaagtacagggactcgtggacaaggtggcggccagactgccagcgtggcgaggatcgatgatgtcccgtggtggtcgccttgtgtggattaaatcagtcatgacggcggtgccgatctacgcgatgatggccaacggtattccaacttgggcacgagaggagattgaggcctgctgcagacgcttcttgtgggcgggcgcggacgcttctgtacgcggcaaatgcgccgtggcctggcccgtggtcgcacgaccgtatgagttcggcggccttggagtattggatttgcgcctcatgggcttggctcttcaggttcgctggctttggcttcaacgcaatcccgcggacgatggccgggcctggacggagctacctctgaaggtcgccccagaagtccggtgcctgttccatgcgtctgcgaactttgaggtcggcaacgggcagcggacgttgttctggaaggacaggtggatcgccggttcgtcggtcgaagacatcgctcctgcgctgattggcctcgtggccaaacggacaagatcgtcacagtccgtagccgtggccttgcaagggaatcaatggatcagagaactgaggggaggattttcggttcaagcgatctctcaatacctgaagctgtggacgctgtgcgagagatcaaccttttctccttcgaccccggacagttgttgtgcgtggatatccccgaccgttgagggaagaaaatcttcttgtggcttgcctggcggagtcggctctggaccgcagacaggcgacggcgtcacggactcgatgcgagaaccacttgctacctctgcaatacagcggaagaaacttgcgaccatctactggccacttgcagcttctcccttcgagtttgggatggcattttgtcgcaaattggggcttcacataccgtcgctaacagattgcagttcagtccttggttggtggcaaagagtgcgggagctgtggccaccgggcgccaggaagggcggtgattctctctttgcgttggtgacttgggaagtttggaaagagagaaatgcaaggtgcttccggagtgaggcatcctcagttgacgccgtagtttcttccgctcttggtgttgctagcgagtgggtgagagcgggcgcgaaagcccttggttgtattctgagcgagtag

SEQ ID NO: 92318 - DNA, 692 bp, Zea Mays
tattttttggacgctttaagattttttggggttagatggtgttggaaggcagttgagattaacgatttggtctctcgaacgaatccatcaatttctatgcacatgttatgtattagtaatatataatgatagagagccgaccgtctgtcttttccacacactagattttagggttttcctgtgagtctgtcaaaaaaccctttatgtgagaaaaaatatttcatgagtaagcatgccatatcaactaaatcgagtggatattgtgaattgtgaacttgtgatctttatgaacttgttatactgtgaacttgttatattgtgaacttgtgatctttataaactttttatattataaatttgtgatcttgtgaacttgttatattgtgaacttgttatatcatgaattgtgaacttgtggtatttgtgatgttttgtcaattttgttttattgtaaagtttgatatgtttaccgatcgtattttagatttcgaccgttaccggtgtattttccgcaccgaacttttgtttccgatgtttccgaaataccgatatcgtttccgtttccggagttaccgttttcgattttgtttccgataaaaaaatatgaaaacggtaatggttttagtgtttaccgaccgtttccgaccgttttcatccctattgaggagtgctactcagaccacctaaccaac

SEQ ID NO: 92319 - DNA, 1586 bp, Zea Mays
acttaagcccaacttggacatccacggtccagctccagctccagccccaccttccagaaactgctcgtacgatctcaagaacgccgcctccccggttcccgcacccccgtcgccgcgccggtagtctgcccgtcgccgtctcctcctccagatctgacccgcctgtcaacgtagtctgccgggagtccatcactgtgccggggcgttactcctcaccgccgctgtgttgcctcttctgcggggttgaggtattcccgcctgctgggacaagtttgcttgcgcctgcaagctgttcgaccaaatgcttcttcgaaggaaattagtctctcccacttgttttcagcactgctattttaaaactaggaagaacaccagaataggtaggaagaaaattgcactatgtcttgtcaaacaacttattattcgctgtaaccgaagcatttgtgcctccccaccagaagcaattagtgaaagcactctaaccttgtttatccacgcttgcgtgctataagtttgatactagtattcgtctacaatcgttctatcggtttaacgcttctacctgttagaaattggcccttgttatcagaatcacattgtctgatgctttggttgctttgtgctattcaaatcagtatgcttaaactggctaaacacgtgatgttcatgtagtccatgccatagctagtagacatttattcaagcaccatttgttctacttctacctcaggtttcttcaaacatttcatcttccacattgattttttgctccttgaataattgctcttctgtgtgtgttgtggtgctgaggtggaatttatggatacacgctgttgagctaatcacacctattggtcaaatccatgaaggtgaaggcgaaggtgaagcagcaggatgggtcggaaggccggtgctttgtacataaacccaaagaagtttggtgctatggcgaagccctgcatgccggaaatggttgccttcctcaactgcctagccttaaacaaacagaacgatgacaagtgcatcaagcagaaagatcttttggttgcatgctctcaggctcagaatgggaggccaaagaacgcagccaagaccatcaattaccatctccagcgacttgggcgaggcaagttcctctaggtgctgtgtgagatcatttcttcatccagctttatgccttgtaccgaagtagaattgctgaaatggggcattaatgtgtttgcttagattggacaatgatcagcaaataattttatgtcaaacagtaatgtatgagcagtatattgatactgttttcttctcatcctatgaaggcacattacagttacgttttccatctatactgcctgtttggatatgtttttgaactgtgtaagttttagggctgtttggtttggttcggacgaatggtaatgggatcccttctagctaggattttaacgatgggtggtccactttattttttacacaatataagtacaacagtcgataaataggcatgtaataaaaatcactaaatttaatatggtcaaataaaaataccgtacaatcatctaatattttagaaattaaaaagtataaaggtc

SEQ ID NO: 92320 - DNA, 965 bp, Zea Mays
acttaagcccaacttggacatccacggtccagctccagctccagccccaccttccagaaactgctcgtacgatctcaagaacgccgcctccccggttcccgcacccccgtcgccgcgccggtagtctgcccgtcgccgtctcctcctccagatctgacccgcctgtcaacgtagtctgccgggagtccatcactgtgccggggcgttactcctcaccgccgctgtgttgcctcttctgcggggttgaggtgaaggcgaaggtgaagcagcaggatgggtcggaaggccggtgctttgtacataaacccaaagaagtttggtgctatggcgaagccctgcatgccggaaatggttgccttcctcaactgcctagccttaaacaaacagaacgatgacaagtgcatcaagcagaaagatcttttggttgcatgctctcaggctcagaatgggaggccaaagaacgcagccaagaccatcaattaccatctccagcgacttgggcgaggcaagttcctctaggtgctgtgtgagatcatttcttcatccagctttatgccttgtaccgaagtagaattgctgaaatggggcattaatgtgtttgcttagattggacaatgatcagcaaataattttatgtcaaacagtaatgtatgagcagtatattgatactgttttcttctcatcctatgaaggcacattacagttacgttttccatctatactgcctgtttggatatgtttttgaactgtgtaagttttagggctgtttggtttggttcggacgaatggtaatgggatcccttctagctaggattttaacgatgggtggtccactttattttttacacaatataagtacaacagtcgataaataggcatgtaataaaaatcactaaatttaatatggtcaaataaaaataccgtacaatcatctaatattttagaaattaaaaagtataaaggtc

SEQ ID NO: 92321 - DNA, 868 bp, Zea Mays
acttaagcccaacttggacatccacggtccagctccagctccagccccaccttccagaaactgctcgtacgatctcaagaacgccgcctccccggttcccgcacccccgtcgccgcgccggtagtctgcccgtcgccgtctcctcctccaggtgaaggcgaaggtgaagcagcaggatgggtcggaaggccggtgctttgtacataaacccaaagaagtttggtgctatggcgaagccctgcatgccggaaatggttgccttcctcaactgcctagccttaaacaaacagaacgatgacaagtgcatcaagcagaaagatcttttggttgcatgctctcaggctcagaatgggaggccaaagaacgcagccaagaccatcaattaccatctccagcgacttgggcgaggcaagttcctctaggtgctgtgtgagatcatttcttcatccagctttatgccttgtaccgaagtagaattgctgaaatggggcattaatgtgtttgcttagattggacaatgatcagcaaataattttatgtcaaacagtaatgtatgagcagtatattgatactgttttcttctcatcctatgaaggcacattacagttacgttttccatctatactgcctgtttggatatgtttttgaactgtgtaagttttagggctgtttggtttggttcggacgaatggtaatgggatcccttctagctaggattttaacgatgggtggtccactttattttttacacaatataagtacaacagtcgataaataggcatgtaataaaaatcactaaatttaatatggtcaaataaaaataccgtacaatcatctaatattttagaaattaaaaagtataaaggtc

SEQ ID NO: 92322 - DNA, 883 bp, Zea Mays
tcagacatccttcatatcctctcttacatgccaaaaggtctcaattttattgagcacacaatcaatattggttggaaagagcatcaaagagctcgacctatcattgtagatccagcactgcaggtcccaaataaaactgaggttgtaacgacaaaggagaaaaggagtatgccctcatctttcaaaatatctgttcatcttgggtgatgcttagtcgatcgttcctggagttttgcttgcgatgggacaaccttcctcgcacactactgatgtatttcaccaacttcctctcatcctcagagggctacttccacacagtgatctgcaactcagagcactaccagaacaccactgtcaacagtgacctgcggttcatggcctgggataagccccctctgacgcaccctgttaacctcacaacagagcattttgatgcgatggcaaacaacggggcgccatttgcacactctttcgccaatgacaattcagtcctggatatgattgacgccaagttgttgggccgggcacctggccgcttcaccccgggtggatggtgtttgggtagctcagtaggcgggaaagatccgtgcaccttcttgggaagatcctttattctcaggccgaccaaaggttcggccaagctagagaagttgttgaaacttttggaacctgataacttcaggcctaaacaatgtaaataggactcattttgcatgtagcattttgtgggtactgttcagaagccaaagtttgacgaaatctttctagttattgcggcagttaggcatacatacaagtgtgttgttgtatacttgcatctggaaagcttatctcaaaagtgatttgagaccatacatgtactactgcggtttcatcgcttcca

SEQ ID NO: 92323 - DNA, 411 bp, Zea Mays
atggagcacgactttgatggcgagcggcggcgagcggcaactgtgcggtctgcggcgtcctcgactgctccccctgcgcacaggaagaagcaacgtgaagtctactcaaataatggcgtgtgggctcaaactattcagaagcctaatgacctttatcttggtagcaccggaactcgcaaacaactgcaaggttctattgatgacccatggagtcatagtgataagcggaagaaacagggattcaagtgtgcttattgcgggtgtgctaaggagagtggaggtaagacccgtctaaggtgtcatctagctgatttgtcaggagaagacaagtcatgcctgaatgtaccaaagcgtgtgaggaagataatgttgaatgactatgcaagagggaaaaaggagggcggattataa

SEQ ID NO: 92324 - DNA, 2632 bp, Zea Mays
cgatgcacggattgcagcacatcgagcagacaaccagtctttcgacacaacggaaacgaaatgtaacacactaggtgtatccccatacaagaactaaggtgctgtttggttcaaaaaatgtaacgcaaatggtaatggtaatggtttcagctcgattactggcggtaacaaatttgaataggctggtatcaaattttagtgtggtatctgattacggttggactaaaacaaacatgatttaatgttatccgttacccattacgttacaaatatgtgaaccaaacagcacctaagtaatgcaagcatgttccttgcgacccgtagcatatttcctaaaatgttccaaacgctgcggcggccaactaccagaatgcttcaatcaatcaaggactgtttcccatcaaaattagcaaaactgagctgcatttgttgtgcagtagccttagccttacggcaaacctccacaccgtatgtgtgtctccccccgcaagctatagggttaggagaaaacaaaacatcagtcaggtgccaacaagaatggactagtaataactactgcaagggcatccatcacacaccttggaaacaggtttcattggcaccaggacgagggtggcctcatggacacatgcacttcgtgttcttcagggccaacgcggaacttcgggacaataatctccagccctgtccctgtttcatcgcagtacgcttccagagtggcgtcttcagggattcgggtagggagtgggatctcccggacaaactctcccggcgggcaatgctcaggagcaggatccgccaacctgaaagtccgatcatgccttttcaggagtggcatccgaccaacgctagtgcatgataccttaacgatcccatttgtaagagtgttcttccatgaaaccttcaccttctgaaaatcagcgaaaggcaggctaacgatgatcaagtagcccttgctgtcctcgtatattgtttttgcagcggttactggtccagaagcatggcgcatcacacctgagaagtcattcatccatgatggctcgaaggtgtggatcacatccatgtcttgggccttgtccgaattcgaattgctgcagtcctcttccattgcggtcggtgaggaatccttcctgcgcttgttacaggtggctgtgatctccatgccatccccagaactgtgattggatggttgcgtcgagaggttaaggccagaaccgttcagcaacttcttgtggtgtccatgtgaactgctctttgcaggagccgcggttgctggcctctcgagctcaaagtctgtgctcggcagattcctccaggactcaaaatcactcgcctcagttgggaccgagaaattggcgtccctcccagtgagctgcatccacctctttaaatcagcctcaggtacacccgccaaatttggcgccctcacgatttcgatcccatgaagacactgtgggttagagaggccacggtagtgcttgcgctgcatccggtgtgagcgcacaaaccctttgtctgcgctgaatgggaactgtggctccccaaggcgtgagtgcccattcatgaagctcctcagctgcatcttccccagggcattctccggacgctccttaaacacccacatgtagatgttctccatgtcgtgctgcaccaggaaagcgtccagtgtggcgctattgccgttcccgccggtggtggtggctgccttcgctttgccagccttgtccgcagacatgactggcttgaagtagtgggtgaagaagaaccacgctccccagatgctaacattcctcttgacacacttgcgcgcagcactggaaccggagcccttggtgtgggacacggcgaccatggtggtcgctgctgctgccggggccgagactggcccagcggcagcgggcgaatccgagtcgtagtgctgcgagccgccgaggccgacatctagcatgtcaacgttggcgtcgagcgacgccagaggtggcggagacgggtcggcggctaggggaaggttgatgtcagggggggcgaccgccgcggcatgtaggcagcggcggaagggcccctgtggctggaggaagaggtcgaagtcgtcgtgggaggcggtgtccatggagaggaaggtggaggggccctggtgcgggtggtgggctgtggcggtgtccatggagagcgcggtgagcagcgactcgcccatggcggcggcggcggcggcggccgtcgtcctcctggcggctcgctcctcgtccgcctgctgctccccttccgtcgctgcgctgtccaaatcgtcggcgcttcctcctccaccgcctccgcacggcgcgctcctctcctccgaatctctccacgagcatcagttagcgaccaggcttcacacctccctcgcgtccatccgccggccgagagggaaatggggctggagcacgtacctacgcaggtccaagaaacccggtgccctcaaatcgacgaaccgcctccaccatccagccgaacgacggtccaacgatccctcccttcccctcctcctgctgctgcggtgctttgcaatcaaatcaaatgaaataaaaaaaataaacgtagtcgaatcggcgggcgggggctcgtcgcggtcgatggatgagcacagcggggtggg

SEQ ID NO: 92325 - DNA, 336 bp, Zea Mays
ggatatcctgggaaattctattgtccaagaatgaatagcatgaacaaaccagcttatgcagccatatgcactcactcacccaataaaccagttctcatttttgtgtcatcacgtcgacagacaagacttacagctcttgatatcattcagcttgcagcatcagatgaaaaaacaaggcagttcctgagcattgaagacaactccctagacatggttctttcacagccttctctactcgtcgtcgaggaacccgacagccgctgtattcgcctcctctcctgcaagctagagggatcactgctcgtggagtcgaggcatagaatgataaattctcag

SEQ ID NO: 92326 - DNA, 1213 bp, Zea Mays
cgtggaagctagcgggcatctcgccgcttgcatgcgtgccacctcgtcccacgccgtggaacctgccgcccgcgtgcataaaagggcggggcagggggctcaggccgtctggactctggactggagggcaccaagctaacatttagttgcaaaggagcgctaggaagaagaagcaacgagccatggcctccggtggcccgaaacccaaactggcctacatcatcttgtacgtgagggacgtggagaaggccgcctccttctacgacgccgccttcggctacaccgtccgccgcctcgaccagtcccgcaagtgggcggagctggagagcggggcgacgaccatcgcgttcacgccgctgcaccagcgggagacggacgagctgtcgggggcggtgcagctgccggactcgtcggccgccgggaggggctccgtagaggtctgcttcgcctacgcggacgtcgacgcggcgtacaagcgcgccgtggacaacggggccgtggccgtgagcgcgccggaggacaagccctggggccagaagtccggcttcgtgcgggacatggacggcaacatcgtgcgcatcgcgagctacgtgcgagagtagtcgcattccgctgcatcaccatcggtcgatcgatcagcctttcccatgcatgtctcgtatactacacgtctacacgtgtaccaaaaaaataaatataatcgttgtgcaggtcatgtttgtcttgggagaggtaggaccgtggaagatgtaaatggaaccgtggagcagtgaatacaaaaagcgccatctcgtccctgtttccattgatctgtacaattaatgaatagagacttctaaatccgtgtcttagttcttatatttcttcaaatacaatggtagaaaaatatatacttatatttgtttcaaatataatgtatatttgtttcaaatataatggtagactagtcggttgaccgtgcgttgcgacggcatacaacaatacccacgtaaactatccataaaaaaattcaagaatttttattgattgtctccgcccacgtaaactatccataaaaaaatttaagattttttattgattgtcttcattctctgtataatatattttttgatttggctaactgatgttattatttatttcatgcaaatatgtcttggtacaacacggtcaatgaagtgagcgattataagagagttcacaacgattaactgaa

SEQ ID NO: 92327 - DNA, 1304 bp, Zea Mays
cgtggaagctagcgggcatctcgccgcttgcatgcgtgccacctcgtcccacgccgtggaacctgccgcccgcgtgcataaaagggcggggcagggggctcaggccgtctggactctggactggagggcaccaagctaacatttagttgcaaaggagcgctaggaagaagaagcaacgagccatggcctccggtggcccgaaacccaaactggcctacatcatcttgtacgtgagggacgtggagaaggccgcctccttctacgacgccgccttcggctacaccgtccgccgcctcgaccagtcccgcaagtaaaacgcgtgcgcgcgcgcctgtgcccgcctgatccggatgcgcgcctaatctgccgcatctgcgcgcctttctgggtttactttgcaggtgggcggagctggagagcggggcgacgaccatcgcgttcacgccgctgcaccagcgggagacggacgagctgtcgggggcggtgcagctgccggactcgtcggccgccgggaggggctccgtagaggtctgcttcgcctacgcggacgtcgacgcggcgtacaagcgcgccgtggacaacggggccgtggccgtgagcgcgccggaggacaagccctggggccagaagtccggcttcgtgcgggacatggacggcaacatcgtgcgcatcgcgagctacgtgcgagagtagtcgcattccgctgcatcaccatcggtcgatcgatcagcctttcccatgcatgtctcgtatactacacgtctacacgtgtaccaaaaaaataaatataatcgttgtgcaggtcatgtttgtcttgggagaggtaggaccgtggaagatgtaaatggaaccgtggagcagtgaatacaaaaagcgccatctcgtccctgtttccattgatctgtacaattaatgaatagagacttctaaatccgtgtcttagttcttatatttcttcaaatacaatggtagaaaaatatatacttatatttgtttcaaatataatgtatatttgtttcaaatataatggtagactagtcggttgaccgtgcgttgcgacggcatacaacaatacccacgtaaactatccataaaaaaattcaagaatttttattgattgtctccgcccacgtaaactatccataaaaaaatttaagattttttattgattgtcttcattctctgtataatatattttttgatttggctaactgatgttattatttatttcatgcaaatatgtcttggtacaacacggtcaatgaagtgagcgattataagagagttcacaacgattaactgaa

SEQ ID NO: 92328 - DNA, 1039 bp, Zea Mays
agcacgcacttgcaaagaactcgagagcttgattcaatcataccctacactgccatggagtccagcaggatgcgctgctgcatgctgcttgttgtttccttggctctgctgctcccgctgggcatggccgcggactccatcggcagctactgctcaggaagcagctacgctggcagcagcaaggccgtggccaacatcaactccgtcctcgccgacctcgtcgcctcggcctcctccaccgggggctacgccacgtccaccgccggcaagggcaacaacagcatcatctacggcctcgcgcaatgccgcggcgacgtctccgccagcgactgcgcgtcctgccttgccgacgccgccaagcagctccccagcacctgcagctacagttccgacgcgaggatatggtacgactactgcttcatgcggtacgagaacgccaacttcttcgggcaggcggacacggacgcgggcgtgatcctggtgaacgtgcaggccatggacaacccgaaggcgttcgagaaggcggtggggaaggtgatgggcaaggcgacggcgcaggcgtcggcggcgggcagcgcggggctcgggcgggacaaggagcagtacacgccgttcgtgtccatctacgggctggcgcagtgcacgcgggacctcgcgccgctgacctgcgcgcagtgcctgtccacggcgctgtccaggttcggcgactactgcggcgcgcagcagggctgccagatcaactacagcagctgcagggtgcgctacgagatctaccccttctacttcccgctcgccggaaagggcggcggcctcgccaccaccgacatgacgaagaacaccaagatcgtcgtgcgtccttaattagcctgaagtgacttgtgtgccttaacgtagggtaaagtagccttgcgttagctagcaataaagatgtgcaactgtatgtgttaagagcttatgcagtgtaagtacatctctgcgtcgaagcaatagtattgatatgttaaactacgatcagtcaccaccaacttttatgttccca

SEQ ID NO: 92329 - DNA, 698 bp, Zea Mays
agtctcccacacgcagtcatggtctctctcacggtctcaccgtctctctcagccagtcaccaccagccgcctgaaaccaagcgccggcctccaaggctccaatccctccatggatccatctccatagttgctctgcggctgtacgcctgtaccgagcaaccgccggcgtcgaccctgccgtccaggcccgtcttgccgcggtgccgcctccgtccctgcccagctatccgaccgccagtctctacctcgttcccttctatctgccctgcaggtttctccaatctccaacactgccggccgcggcagtctgcaatctccttggcaccgtgccaaggtttggattactgaccttgtgttttggggtccatggctatagcactaaaagagcatccgccttgggccttgccgcacgacactccatgcatgctgccatgggttgatgtgattgcttgtgggtgttgattttcctctgattgtggttgtttactctgctctgtgctgcttctgctctatagtttatatgctgctagactgctgctgcttgtagtttaggtgttcgatgaaatgcccattcaaggtaaaattctagttaacgtgcccatgcttctttgtttttttggcaattatgctgtgatgttctagcttcatgttcgtgtaatagatgttgtgggtatgagaagcagaaaacaagattagtt

SEQ ID NO: 92330 - DNA, 2323 bp, Zea Mays
tgcacaacagaacgacttattgtgttgtccataaccacatctcaacacatcatccactatatagaacataaggacatctacgtgttctgttaaaatacgatgcataaaaaaattgacaaacattatagctaatttaatgtttaatagtaactaatacctcgatgcccttcttatcctaaatcctcaattagctggaaccttcctgttaggctcaaagacatatttgatcaaagaatccttgatggacatcagttgagagaactcggccttcaatttcgacgcatccatctcattgttgcttctaggtgcgactatgaccttggattgctcttcgagtgtgaagttggtccacttaaaatcaggattgatgtatttcttgtacatctccagaatctcattgtggctgacaacgccagggttggtgaagttccatatgcccctgcagtcccgttttgccatctcaatggagatgggcagaagctcatccaaaattgtcatgctgttgggaatgttcaccaccttgtcgtaacgagctatctttgtgatgaagttacgaggattgtttagatctgatgatataggcatcctgaccctaagagtacagacattatcatactccttcaacagctcttccacctgcaccatgatgaacagcacagaaattagcttcaggcataatgaagtaaaagaaaaatgcttgacaaaaaaagaacatcatcccgaacttaccattgcttttgttttggaataaaaggaacccgtaaagttgggtgtgtcttcctctttaaagccaataccagacctttccgggtgcttggcatcatactcaaatatacaacctgtagcataattaatcattagcagaccttgctcgcgacagacatcagcaagattcaatatgcctacaacattggtgcggatggtgtcctgtttatgggtctcacaccaatcaacatttggtctcccagtgactccggcagcattaaaaacttgagttggcttcacatttctaatgtcctccaacagctgagagcgctcctccaagcgtcctttcccatattcatatggtatcccttgcttgtcacaaatcttcccaaggaggccaccaatccatccagtcctgccatagattaagaacttgtacaaaggcttttgaggggcagcagtggtccttttggcactggttgcaggagctgttgtgctagcttcagctggtgaagaagtcagagatttgatatcctcagtccagttatgcctttcaactccaggaatcatcaacatccttgggtgagggagcaaagcaccagtgacatctccccagtaatcaggattggtggtgtaccactcgattgtcttcttcaagccctcttcccatggtgtgcgctctgcccatcccagtctcttaagcttctgatcatccaagaagtacctctggtcattgaagggcctgttctcaacaaacctgattactttctcagtatccaagccaaagagcctgcaaatgtctttggccacatcaatcaccctcctctccttcacagtaccaatattatacacatgtccaacctcccctttgtgaagaacaacctcaaaagcttcagccacatcctcacaatataggtagctcctgacattggaaccatctccatgaattggaagaggcagacctctcatggccaaaagaatgaatttgggaataagtttctcagggaactgatttggcccatacacgttgttgccccgagtggttatcacaggaagaccataagatcttccatatgccatcacaagcatttcagccccagcttttgtagctgaatacggatttgttggaagcagctgtgaggcctcatgattaccaaccacagcatcttcatcagtttctccatagacctcatcagtactgacatgaataaacctcctgatctggccagtgaccttgcaagcctcaagaaggacgtgggtaccatatatattgttttttgtgaactcaaatgaattgccaaatgaattatctacatgagtctgagcagcaaagtgcatgatggtgtcaatcgactctgtgaccagaaggtggttcaccagatcagcacttgcaatgtcacccttgacaaacttcaaatttggtgaagcccgtgaggggttgaggttctttaggctggagcagtaatcgagcttgtcgaggacaacaatcttgtagtgcgggtagttcctaaccagacagttggtgacatgcgatgcaataaaaccagcagcaccggtgatgagaatgttcttgggctcgtaagtcgccatccttgcggagacgcggagtcgcggacgc

SEQ ID NO: 92331 - DNA, 483 bp, Zea Mays
atgtcctctgaatctcgcccacacaatgtgaacatcggattactgccatcaaagcgacaaaagatgcacaggctgggaacatactttcctgttgtaattgatgatagaactatgcgagctttgattgcatcattcacaactgcagatgaacttcagttcccaaaggattcagctgtctctctctggaaggaggacgatgagcaggaagcggaagaagaaagtggggcgtcggccgccgaccgtcagggccaacgtgataagcaaggggtggacaggaaccgctctttcatccacgtcagcgggatagaaagggagtggaggaccaggccatatgcgtgctaccacgaccccgtggccatggcccacgtccgcgagtacaccctcaagccgctctcggagccggcggtggcgcccgtgtgcaccaggaacaactctgtccctggcttcctcttctccaatggtggcttctccggcaacctgtag

SEQ ID NO: 92332 - DNA, 2261 bp, Zea Mays
aatcagtggcagtgcccgtccgcgtcccgctctcgtgggccgtcgcggtgtccccgcctatattttatctggcgcccgcccctcccaccaaaaagatctccaattccccaccccaaagagctaccctgaccagatttggccgcttcctcctctgcctcccgctaaccctagtccagcaccccgagatctgctccgcgcgagcagccatggcggagacgctcgacatgaccctcgatgacatcatcaagaacaacaagaagagtaacccctcctccggcggggcccgccgcagccgcggcggatccgcccctggcggcggcagcggcggggtcgggccgaccaggcgctccttcaagagggctgggaacaggcaggcgccctaccagccgccgaaggcccctgacgctgcgtggcagcacgacatgtaccctgcggtcgccgcaggaggcggcggcggcgggagggtctcggcgctcgagacgggcaccaagctctacatctccaacctggactttggggtttcgaacgacgatatcaaggagctgttctctgagctaggtgatctgaagcgtttttcgataatatatgatcgaagtgggaggtctaagggaacagctgaagttgtatttgcaaggcgttctgatgctgtagcggcggtgaagaaatataacaatgtccaacttgatggtaagcccatgaagatagagatagttgggaccaatactccaactgcatctgctgctcttccagtctccaatggtggccatgctaggaatgctgtgaggagtgcaccgaggggtgctgccccagcaggtgtgccgcagcgaagacctcatcagaggggtgggaggcgtagtggtggatctgggggtggtcgtcgtggcaaggagcgcagcaagccaaagtcggctgaagaactcgacgctgacttggagaagtatcatgctgatgcgatgcagaccaactaaatgtgttcacaaatttgatattcaacatcaaatatcaagcacattagtccttccattccagctgtttgtgctactatgttcaggggacaacaaaccttatgtttgtgggggtattgctttactgaattttgtgggttttgtttacaatagaactagagttggatgatgctgagtacttccatggaaattacttgcttgcctttagtttctgtacctaatgccgaggagacaagaatcatccaagttactcgacatgtgaaagttgatgatgtatgaaggtacccacatttcctttgaccccccaccgtataatatatcttggaggtaaaagagactgggcttcagatgttccttggtgatctagttgtgcgctttcgatctggtattgctcagatgtttctccgctgtaggctggttcaagatcaagccatctaaggaggaggtggcctgttcatattgtgaaacatcatgatgcttattttgggcatcttaagctatcttctctggcacatcaatgatttcatgagcttcaaggcccctttattttaaaagttgattctttgcataatcctctctgtgggtgcctacaaagtttaaatgtggacatggctgtcactagtctcattgaagcatcatggtgcaaatcctgcttcaaggtctgctattgatagcttagagatggctgtgatgtcaatgcctcagcattaatttggacttctaggccttccttgcgtatttatgctttatataagcatatggggtatggtcgatcttgtctattgcccttcggagttcctttcaacttcgcttgagcctttgatggcacaattggagtcatgtgcctctgctcagaaaatcagtttttaactgaaacccttcccttttgcttgcttccttgcttcgtcaatggtgataccagctattttagcatcaatcttggcggtgtgaatcccaagtggctgtggttttaatcttcctggttttttttggcactgatgatattgatatagctatgatgttattgatatagtatactcccttcattcttttttatttgtcactgtttagttaaaaaatgaactagcagtcaacaaatattatcattttaggaattcataatctgttgttttgttccttctgataacatctggactggtggtaatagctgttgctcggatgacgttgtaggtcttcatttcccccctattattggttcagttctagttctatttcaaatatgtcaagctgcttttccttttactgcttaatgatgcatggttctatttggtgaaa

SEQ ID NO: 92333 - DNA, 2234 bp, Zea Mays
aatcagtggcagtgcccgtccgcgtcccgctctcgtgggccgtcgcggtgtccccgcctatattttatctggcgcccgcccctcccaccaaaaagatctccaattccccaccccaaagagctaccctgaccagatttggccgcttcctcctctgcctcccgctaaccctagtccagcaccccgagatctgctccgcgcgagcagccatggcggagacgctcgacatgaccctcgatgacatcatcaagaacaacaagaagagtaacccctcctccggcggggcccgccgcagccgcggcggatccgcccctggcggcggcagcggcggggtcgggccgaccaggcgctccttcaagagggctgggaacaggcaggcgccctaccagccgccgaaggtacgaacgactcgaacgggctgttgctccgcgtcgcccggcggaggatgcgtgggcttcggacttcgctgactcgggcgggaggagatggtcggttggttttctcactttggtgtgacgcgatcgatccaggcccctgacgctgcgtggcagcacgacatgtaccctgcggtcgccgcaggaggcggcggcggcgggagggtctcggcgctcgagacgggcaccaagctctacatctccaacctggactttggggtttcgaacgacgatatcaaggagctgttctctgagctaggtgatctgaagcgtttttcgataatatatgatcgaagtgggaggtctaagggaacagctgaagttgtatttgcaaggcgttctgatgctgtagcggcggtgaagaaatataacaatgtccaacttgatggtaagcccatgaagatagagatagttgggaccaatactccaactgcatctgctgctcttccagtctccaatggtggccatgctaggaatgctgtgaggagtgcaccgaggggtgctgccccagcaggtgtgccgcagcgaagacctcatcagaggggtgggaggcgtagtggtggatctgggggtggtcgtcgtggcaaggagcgcagcaagccaaagtcggctgaagaactcgacgctgacttggagaagtatcatgctgatgcgatgcagaccaactaaatgtgttcacaaatttgatattcaacatcaaatatcaagcacattagtccttccattccagctgtttgtgctactatgttcaggggacaacaaaccttatgtttgtgggggtattgctttactgaattttgtgggttttgtttacaatagaactagagttggatgatgctgagtacttccatggaaattacttgcttgcctttagtttctgtacctaatgccgaggagacaagaatcatccaagttactcgacatgtgaaagttgatgatgtatgaaggtacccacatttcctttgaccccccaccgtataatatatcttggaggtaaaagagactgggcttcagatgttccttggtgatctagttgtgcgctttcgatctggtattgctcagatgtttctccgctgtaggctggttcaagatcaagccatctaaggaggaggtggcctgttcatattgtgaaacatcatgatgcttattttgggcatcttaagctatcttctctggcacatcaatgatttcatgagcttcaaggcccctttattttaaaagttgattctttgcataatcctctctgtgggtgcctacaaagtttaaatgtggacatggctgtcactagtctcattgaagcatcatggtgcaaatcctgcttcaaggtctgctattgatagcttagagatggctgtgatgtcaatgcctcagcattaatttggacttctaggccttccttgcgtatttatgctttatataagcatatggggtatggtcgatcttgtctattgcccttcggagttcctttcaacttcgcttgagcctttgatggcacaattggagtcatgtgcctctgctcagaaaatcagtttttaactgaaacccttcccttttgcttgcttccttgcttcgtcaatggtgataccagctattttagcatcaatcttggcggtgtgaatcccaagtggctgtggttttaatcttcctggttttttttggcactgatgatattgatatagctatgatgttattgatatagtatactcccttcattcttttttatttgtcactgtttagttaaaaaatgaactagcagtcaacaaatattatcattttaggaattcataatctgttgttttgttc

SEQ ID NO: 92334 - DNA, 2134 bp, Zea Mays
tgataattgggaagaaatttgattaattctattattgaattgctgaaaatagatttttgtcatatccgatggatatccgaaacccaatggacatgagcatggatatgaatttctacccgcgggtatagtcctcccaccaaaaagatctccaattccccaccccaaagagctaccctgaccagatttggccgcttcctcctctgcctcccgctaaccctagtccagcaccccgagatctgctccgcgcgagcagccatggcggagacgctcgacatgaccctcgatgacatcatcaagaacaacaagaagagtaacccctcctccggcggggcccgccgcagccgcggcggatccgcccctggcggcggcagcggcggggtcgggccgaccaggcgctccttcaagagggctgggaacaggcaggcgccctaccagccgccgaaggcccctgacgctgcgtggcagcacgacatgtaccctgcggtcgccgcaggaggcggcggcggcgggagggtctcggcgctcgagacgggcaccaagctctacatctccaacctggactttggggtttcgaacgacgatatcaaggagctgttctctgagctaggtgatctgaagcgtttttcgataatatatgatcgaagtgggaggtctaagggaacagctgaagttgtatttgcaaggcgttctgatgctgtagcggcggtgaagaaatataacaatgtccaacttgatggtaagcccatgaagatagagatagttgggaccaatactccaactgcatctgctgctcttccagtctccaatggtggccatgctaggaatgctgtgaggagtgcaccgaggggtgctgccccagcaggtgtgccgcagcgaagacctcatcagaggggtgggaggcgtagtggtggatctgggggtggtcgtcgtggcaaggagcgcagcaagccaaagtcggctgaagaactcgacgctgacttggagaagtatcatgctgatgcgatgcagaccaactaaatgtgttcacaaatttgatattcaacatcaaatatcaagcacattagtccttccattccagctgtttgtgctactatgttcaggggacaacaaaccttatgtttgtgggggtattgctttactgaattttgtgggttttgtttacaatagaactagagttggatgatgctgagtacttccatggaaattacttgcttgcctttagtttctgtacctaatgccgaggagacaagaatcatccaagttactcgacatgtgaaagttgatgatgtatgaaggtacccacatttcctttgaccccccaccgtataatatatcttggaggtaaaagagactgggcttcagatgttccttggtgatctagttgtgcgctttcgatctggtattgctcagatgtttctccgctgtaggctggttcaagatcaagccatctaaggaggaggtggcctgttcatattgtgaaacatcatgatgcttattttgggcatcttaagctatcttctctggcacatcaatgatttcatgagcttcaaggcccctttattttaaaagttgattctttgcataatcctctctgtgggtgcctacaaagtttaaatgtggacatggctgtcactagtctcattgaagcatcatggtgcaaatcctgcttcaaggtctgctattgatagcttagagatggctgtgatgtcaatgcctcagcattaatttggacttctaggccttccttgcgtatttatgctttatataagcatatggggtatggtcgatcttgtctattgcccttcggagttcctttcaacttcgcttgagcctttgatggcacaattggagtcatgtgcctctgctcagaaaatcagtttttaactgaaacccttcccttttgcttgcttccttgcttcgtcaatggtgataccagctattttagcatcaatcttggcggtgtgaatcccaagtggctgtggttttaatcttcctggttttttttggcactgatgatattgatatagctatgatgttattgatatagtatactcccttcattcttttttatttgtcactgtttagttaaaaaatgaactagcagtcaacaaatattatcattttaggaattcat

SEQ ID NO: 92335 - DNA, 2003 bp, Zea Mays
attgtcggtgtcagaagtgggcccatgctcggttcggccacgccccaccagccagccagccagggacccgtcgctgccctctggcgatgagggatattacgggtctgccctgaccaccgcccacgcgcagccaggggtagaaacgaccgcgtcaccgtatttgacccctcaccgtcccacaccagtgtcggcgagtccctcctgtgcctcgtcctccccctttcccctccgagtccagcccggcgccacccactcagccgcggatccgaggcgcagatccgatccggcgatggcgtccacggcggcgaggcggctgcgggagctgcaggcgcagacggggaacaagacctgcgtggactgcgcgcagcggaacccgcagtgggcgagcgtctcctatggggtgttcatgtgcctcgagtgctcgggcaagcaccggggcctcggcgtgcacatcagcttcgtgcgctcggtcaccatggactcctggaccgaggcgcagctccgcaagatggaggccggtggcaacgaccgactcaacgccttcctcacagctcgcggcgttcctaaggagacgccccacgtcgccaagtacaactccaacgccgcagccgcctaccgcgaccgcatcgccgcgctcgctgagggaaagccgtggactgacccgcccgtggtcaaggagacgcccggatctggcgcccccgcccccgctaggaagccgcccgtgcacacatctgccgcctccggcggcggcgggtgggacgactgggacgacgattttcggccggacatgaggcggaatcagtcggttggatcgttcgccgccgcgggtgcgcagtcagggaggcagccgccgaggtccaaatcaacacaggacatgtacacgaggcagcaactggaggcgtcggcggcaaataaggaggactttttcgccaggaggatggcggagaacgagtccaagcctgacgggatcccgccatcccagggcggcaagtacgttgggttcggatccagcccaccgccgtcggctaacaggaacggcggtgctgcccagggcgatgtcatgcaggttgtctctcagggatttggacgcctttcattagttgcagcatctgctgcccagtctgctgccagtgctgtccaagttggcacaaaagaaatccaatcaaagatgagggatgggggctatgaccagaaggtgaatgaaactgtcagtgttgttgccaataaaactgcagagattggaagcaggacttgggggatcatgagaggagttatggcgctggcctcacaaaaggtagaggaatatgccaaggaaggaggagtgggtggctggggagaggattggcaacacagcgagcagaaaagtgagccttaccaaaggtttgagcatgagaccaacggcaacagttggaattcctcccaaaattcttcatcgaagaacaattccagttcttgggacgattgggacgacccaggcaagaaagatgagcctgcgaaaccgcaccagagcagtgactcctgggctggctgggatgatgggaaggatgatggttttgatagccctagttacaacaatcacagcacctccaacaaggggagcaaccaaaacgggacatccggtggcacattttggacagaaggcggcttccgctgaaaccagtctcttttccatagagctatactttcagagttgttacatgccaggaaacgtgagggtccagtggttggtattatttgggatacttaaacagtcgggtgaaagggtttgtgtgttttgtaccatgtctacaactgttattatatctagtgagatatatttctgtggtcagatgccattcaacactgcccaaatgactaagaaatgtcgatttgaaactgtaatttactcgactttgtcgcatactctttattggttttcgttggttttgtaccgggcagaggcttgccgatatttgccgtggtgggtgttctggcgactggtggcaagcttgtatcacagtagt

SEQ ID NO: 92336 - DNA, 682 bp, Zea Mays
cgagtccagcccggcgccacccactcagccgcggatcatgagaggagttatggcgctggcctcacaaaaggtagaggaatatgccaaggaaggaggagtgggtggctggggagaggattggcaacacagcgagcagaaaagtgagccttaccaaaggtttgagcatgagaccaacggcaacagttggaattcctcccaaaattcttcatcgaagaacaattccagttcttgggacgattgggacgacccaggcaagaaagatgagcctgcgaaaccgcaccagagcagtgactcctgggctggctgggatgatgggaaggatgatggttttgatagccctagttacaacaatcacagcacctccaacaaggggagcaaccaaaacgggacatccggtggcacattttggacagaaggcggcttccgctgaaaccagtctcttttccatagagctatactttcagagttgttacatgccaggaaacgtgagggtccagtggttggtattatttgggatacttaaacagtcgggtgaaagggtttgtgtgttttgtaccatgtctacaactgttattatatctagtgagatatatttctgtggtcagatgccattcaacactgcccaaatgactaagaaatgtcgatttgaaactgtaatttactcgactttgtcgcatactct

SEQ ID NO: 92337 - DNA, 159 bp, Zea Mays
ccctccccgcaaagctcattcccattcccggctgtcattgagctgccagtattctgtcattctcattcccccctccccacactgtctttctcattcccccctccccgcaaatcccattcccattcccacgtgcatcccacgcctagctaaaattaaatt

SEQ ID NO: 92338 - DNA, 761 bp, Zea Mays
gcctctgttatgcatttaatccttgcatttttatggttctgcgtgcagagtttacaaaaagagcacacataaactgcaaattgttagtgtcctcaaactgaggtttttttgttgctggtattcttacattttcccattttgattttattgcagcacacatgttgtctctgctgcgattctgaaagtgcgcatcgaacaaatcgcagaacttgtcctcattgctactcgtagcgagtgcagaaaaaagggttacttcatacttctcctaaagtcgatcgaggcaaatttgagagcctggaatgtaagccttcttactgcgcctgttgaccctgaaatggcacaaatctggtcagagaagctcgggttcaccattttatcagctgaagagaaggagtcaatgctggagtcgcaccccttggtgatgttcaagaacctagtcttggtgcagaaatcacttgcttgagcaaatctgatctatgtttgtttgtactactttagaaatgaaaacccggtttcgagagcttagacagtacggggttaggccgtgttaagtcattttgtttattatttagatttaaaatatttttaaactatttaaatatatattataaattatatctctacgcttgagcgggaaactggaacagtcccaaacactcccatagagtttagacggactagatgttcgtgtattgttacggttttatgtcacatggacacagatagattttgttttaataaataaaatatatgtgctctaa

SEQ ID NO: 92339 - DNA, 1266 bp, Zea Mays
aagcagaagcaattactattgcccgcttccccagggagtagggcgaacccctagctgccaccccttcttcctcctctcgcttgcagcccactctgaacagtaacgcgggttgtggcagagaaccttctactaccagtggacctattgttcctctgaaacggactttacaagaaagagtggtagaaacagagagttgctatttctgtgggtatggccacacaacgattggaaatatcaatccagacacgattattttctgtaaccagtgcgagagaccatgccacatcaaatgttacaacaatagagttgtaaaaaagaaggtgcctctggaaattttgaaagaatacatgtgttttcacttcttgtgctgccaagaatgtcaatcactccgtgcccgtctagaagaaggactggaaaagtgtgtagggattaccttccttagacggataagatctaatatttgttggcgacttttaagtggaatggatgcaagtagggatgtcaaactctacatgcctcaggtcattgatatcttcaaagatgcatttatggattctactgatgagcacagtgacatcatctcagacatggttaatggcaaaaatggagaccaagagaaggattttcgaggaatgtattgtgcactgttaactgcaagcacacatgttgtctctgctgcgattctgaaagtgcgcatcgaacaaatcgcagaacttgtcctcattgctactcgtagcgagtgcagaaaaaagggttacttcatacttctcctaaagtcgatcgaggcaaatttgagagcctggaatgtaagccttcttactgcgcctgttgaccctgaaatggcacaaatctggtcagagaagctcgggttcaccattttatcagctgaagagaaggagtcaatgctggagtcgcaccccttggtgatgttcaagaacctagtcttggtgcagaaatcacttgcttgagcaaatctgatctatgtttgtttgtactactttagaaatgaaaacccggtttcgagagcttagacagtacggggttaggccgtgttaagtcattttgtttattatttagatttaaaatatttttaaactatttaaatatatattataaattatatctctacgcttgagcgggaaactggaacagtcccaaacactcccatagagtttagacggactagatgttcgtgtattgttacggttttatgtcacatggacacagatagattttgttttaataaataaaatatatgtgctctaa

SEQ ID NO: 92340 - DNA, 3032 bp, Zea Mays
gtcggccgcctgccgccgccatctcacggcctcctaccttccctcgtggtgggctccaccgcggtctggttcgtcttcgatcgtgtgggatacagcttcctctccgtcctcttgaaagctatcagagcaagcaagccagccactttacctagctagtgttccggctgattccactggcgacgattcgagaaccttgtcctgtgtccgccattggtcggcgctgcagtttgagaagcacgtgggggcggagtcgaagaaccagaacggtaacatcctcctcatcaacgacaagttgctctacgacctgttccacgagctcagaaattggcccccttgtgcggaggagttttgggcgaccgccggggtactcatgactgtgcctgccaccgaagcctcatctgcgccgcaggggcagcaagcaggcgcgcccgctagctgggaacccaacggggttcaggttgacggcgtgacggtggatccccctttgcctggacggggagccatggtgatgctgaccgaggaggagaaagccagcttgtgtctgcttggtttgaagcaaagcagttccacggctgagttggacactatatgcggcattgaagggcctgctgcggaacagatcaaagatgaagcaggtggtgaccatgtgatgcacgatgctctagtgggagtgacagaaacagagtatcagctagacagtgaccttagagatgttagaggactgctgtccactggacttcttgaaggtttcagggtgacctacatgaaggatgaggtggaggaggttggacggataaatggacagggttattcttgtggctgctcaaagtgtaattacaatagtaatattatgaatgcgtgcgagtttgaggagcattatggtcagtcatttgacaaccagattgatcacatcttcttggataccgggatttctctattcagggtggtggaagcactgaaaccttgtaagcttaacatgcttggggatttcattgaagagaagattggtttccctcctaatttggatgagtataacaagtggaaagcttcatttcagaagagaaaagattatttagatgctgtggcttcagatggttgtttgactcagagttcacaggggttggctgcaggggagatgatttacagtttgagagattacttgaaagattctgtcagcaatagcatctcaaaccttaactggagtgcatctaaaaggcggtctgggagacggtttagacaaggagacactgggacttcaactccaacctttagcggaagcccaggcaaagggggttttggccactctactgacacctcagagaagaaaggcactgaagaaactcacagtgagaacacaggagaccctctcagcatcgatggtgttaagtctgattctccattacctactgcagtaaccactaaccactctaaacacgattcaacaaatttagggctttctttatcaagtccagtaaaaatcacgcaaaggccactccgaaactgcagcatagactcaaagtcaaaagaatcaaaaacaagggataccactttgcatccactgattttcaaggaggatggccttgcagataatactttgttgacttacaagttaaagaatggagaggctctaaagcaagggtataaacggggaacatgcatcatctgtaactgttgcaatcaagagttttctccttcccactttgaagaacatgctggcatggggagaagacggcaaccgtatcacaacatttatacattagaaggattatcacttcataagctagctctgcaactgcaagatcatttgaatccaaatggattcgacaatgctagtgtttccagcgtcagtgactaccataaccttacttcttcaggttgtggcagagaaccttctactaccagtggacctattgttcctctgaaacggactttacaagaaagagtggtagaaacagagagttgctatttctgtgggtatggccacacaacgattggaaatatcaatccagacacgattattttctgtaaccagtgcgagagaccatgccacatcaaatgttacaacaatagagttgtaaaaaagaaggtgcctctggaaattttgaaagaatacatgtgttttcacttcttgtgctgccaagaatgtcaatcactccgtgcccgtctagaagaaggactggaaaagtgtgtagggattaccttccttagacggataagatctaatatttgttggcgacttttaagtggaatggatgcaagtagggatgtcaaactctacatgcctcaggtcattgatatcttcaaagatgcatttatggattctactgatgagcacagtgacatcatctcagacatggttaatggcaaaaatggagaccaagagaaggattttcgaggaatgtattgtgcactgttaactgcaagcacacatgttgtctctgctgcgattctgaaagtgcgcatcgaacaaatcgcagaacttgtcctcattgctactcgtagcgagtgcagaaaaaagggttacttcatacttctcctaaagtcgatcgaggcaaatttgagagcctggaatgtaagccttcttactgcgcctgttgaccctgaaatggcacaaatctggtcagagaagctcgggttcaccattttatcagctgaagagaaggagtcaatgctggagtcgcaccccttggtgatgttcaagaacctagtcttggtgcagaaatcacttgcttgagcaaatctgatctatgtttgtttgtactactttagaaatgaaaacccggtttcgagagcttagacagtacggggttaggccgtgttaagtcattttgtttattatttagatttaaaatatttttaaactatttaaatatatattataaattatatctctacgcttgagcgggaaactggaacagtcccaaacactcccatagagtttagacggactagatgttcgtgtattgttacggttttatgtcacatggacacagatagattttgttttaataaataaaatatatgtgctctaa

SEQ ID NO: 92341 - DNA, 2945 bp, Zea Mays
gtcggccgcctgccgccgccatctcacggcctcctaccttccctcgtggtgggctccaccgcggtctggttcgtcttcgatcgtgtgggatacagcttcctctccgtcctcttgaaagctatcagagcaagcaagccagccactttacctagctagtgttccggctgattccactggcgacgattcgagcaatgtacagtgtacctctattgtaactaggctatgtgtcgtccattcagagtggtatactaaattatatcttcatggatgtttggtaacttagcgattggatttttattggtgattcggtacaaccaaaaaggatttccgaaccttgtcctgtgtccgccattggtcggcgctgcagtttgagaagcacgtgggggcggagtcgaagaaccagaacggtaacatcctcctcatcaacgacaagttgctctacgacctgttccacgagctcagaaattggcccccttgtgcggaggagttttgggcgaccgccggggtactcatgactgtgcctgccaccgaagcctcatctgcgccgcaggggcagcaagcaggcgcgcccgctagctgggaacccaacggggttcaggttgacggcgtgacggtggatccccctttgcctggacggggagccatggtgatgctgaccgaggaggagaaagccagcttgtgtctgcttggtttgaagcaaagcagttccacggctgagttggacactatatgcggcattgaagggcctgctgcggaacagatcaaagatgaagcaggtggtgaccatgtgatgcacgatgctctagtgggagtgacagaaacagagtatcagctagacagtgaccttagagatgttagaggactgctgtccactggacttcttgaaggtttcagggtgacctacatgaaggatgaggtggaggaggttggacggataaatggacagggttattcttgtggctgctcaaagtgtaattacaatagtaatattatgaatgcgtgcgagtttgaggagcattatggtcagtcatttgacaaccagattgatcacatcttcttggataccgggatttctctattcagggtggtggaagcactgaaaccttgtaagcttaacatgcttggggatttcattgaagagaagattggtttccctcctaatttggatgagtataacaagtggaaagcttcatttcagaagagaaaagattatttagatgctgtggcttcagatggttgtttgactcagagttcacaggggttggctgcaggggagatgatttacagtttgagagattacttgaaagattctgtcagcaatagcatctcaaaccttaactggagtgcatctaaaaggcggtctgggagacggtttagacaaggagacactgggacttcaactccaacctttagcggaagcccaggcaaagggggttttggccactctactgacacctcagagaagaaaggcactgaagaaactcacaggctttctttatcaagtccagtaaaaatcacgcaaaggccactccgaaactgcagcatagactcaaagtcaaaagaatcaaaaacaagggataccactttgcatccactgattttcaaggaggatggccttgcagataatactttgttgacttacaagttaaagaatggagaggctctaaagcaagggtataaacggggaacatgcatcatctgtaactgttgcaatcaagagttttctccttcccactttgaagaacatgctggcatggggagaagacggcaaccgtatcacaacatttatacattagaaggattatcacttcataagctagctctgcaactgcaagatcatttgaatccaaatggattcgacaatgctagtgtttccagcgtcagtgactaccataaccttacttcttcaggttgtggcagagaaccttctactaccagtggacctattgttcctctgaaacggactttacaagaaagagtggtagaaacagagagttgctatttctgtgggtatggccacacaacgattggaaatatcaatccagacacgattattttctgtaaccagtgcgagagaccatgccacatcaaatgttacaacaatagagttgtaaaaaagaaggtgcctctggaaattttgaaagaatacatgtgttttcacttcttgtgctgccaagaatgtcaatcactccgtgcccgtctagaagaaggactggaaaagtgtgtagggattaccttccttagacggataagatctaatatttgttggcgacttttaagtggaatggatgcaagtagggatgtcaaactctacatgcctcaggtcattgatatcttcaaagatgcatttatggattctactgatgagcacagtgacatcatctcagacatggttaatggcaaaaatggagaccaagagaaggattttcgaggaatgtattgtgcactgttaactgcaagcacacatgttgtctctgctgcgattctgaaagtgcgcatcgaacaaatcgcagaacttgtcctcattgctactcgtagcgagtgcagaaaaaagggttacttcatacttctcctaaagtcgatcgaggcaaatttgagagcctggaatgtaagccttcttactgcgcctgttgaccctgaaatggcacaaatctggtcagagaagctcgggttcaccattttatcagctgaagagaaggagtcaatgctggagtcgcaccccttggtgatgttcaagaacctagtcttggtgcagaaatcacttgcttgagcaaatctgatctatgtttgtttgtactactttagaaatgaaaacccggtttcgagagcttagacagtacggggttaggccgtgttaagtcattttgtttattatttagatttaaaatatttttaaactatttaaatatatattataaattatatctctacgcttgagcgggaaa

SEQ ID NO: 92342 - DNA, 2634 bp, Zea Mays
gtcggccgcctgccgccgccatctcacggcctcctaccttccctcgtggtgggctccaccgcggtctggttcgtcttcgatcgtgtgggatacagcttcctctccgtcctcttgaaagctatcagagcaagcaagccagccactttacctagctagtgttccggctgattccactggcgacgattcgagaaccttgtcctgtgtccgccattggtcggcgctgcagtttgagaagcacgtgggggcggagtcgaagaaccagaacggtaacatcctcctcatcaacgacaagttgctctacgacctgttccacgagctcagaaattggcccccttgtgcggaggagttttgggcgaccgccggggtactcatgactgtgcctgccaccgaagcctcatctgcgccgcaggggcagcaagcaggcgcgcccgctagctgggaacccaacggggttcaggttgacggcgtgacggtggatccccctttgcctggacggggagccatggtgatgctgaccgaggaggagaaagccagcttgtgtctgcttggtttgaagcaaagcagttccacggctgagttggacactatatgcggcattgaagggcctgctgcggaacagatcaaagatgaagcaggtggtgaccatgtgatgcacgatgctctagtgggagtgacagaaacagagtatcagctagacagtgaccttagagatgttagaggactgctgtccactggacttcttgaaggtttcagggtgacctacatgaaggatgaggtggaggaggttggacggataaatggacagggttattcttgtggctgctcaaagtgtaattacaatagtaatattatgaatgcgtgcgagtttgaggagcattatggtcagtcatttgacaaccagattgatcacatcttcttggataccgggatttctctattcagggtggtggaagcactgaaaccttgtaagcttaacatgcttggggatttcattgaagagaagattggtttccctcctaatttggatgagtataacaagtggaaagcttcatttcagaagagaaaagattatttagatgctgtggcttcagatggttgtttgactcagagttcacaggggttggctgcaggggagatgatttacagtttgagagattacttgaaagattctgtcagcaatagcatctcaaaccttaactggagtgcatctaaaaggcggtctgggagacggtttagacaaggagacactgggacttcaactccaacctttagcggaagcccaggcaaagggggttttggccactctactgacacctcagagaagaaaggcactgaagaaactcacaggctttctttatcaagtccagtaaaaatcacgcaaaggccactccgaaactgcagcatagactcaaagtcaaaagaatcaaaaacaagggataccactttgcatccactgattttcaaggaggatggccttgcagataatactttgttgacttacaagttaaagaatggagaggctctaaagcaagggtataaacggggaacatgcatcatctgtaactgttgcaatcaagagttttctccttcccactttgaagaacatgctggcatggggagaagacggcaaccgtatcacaacatttatacattagaaggattatcacttcataagctagctctgcaactgcaagatcatttgaatccaaatggattcgacaatgctagtgtttccagcgtcagtgactaccataaccttacttcttcaggttgtggcagagaaccttctactaccagtggacctattgttcctctgaaacggactttacaagaaagagtggtagaaacagagagttgctatttctgtgggtatggccacacaacgattggaaatatcaatccagacacgattattttctgtaaccagtgcgagagaccatgccacatcaaatgttacaacaatagagttgtaaaaaagaaggtgcctctggaaattttgaaagaatacatgtgttttcacttcttgtgctgccaagaatgtcaatcactccgtgcccgtctagaagaaggactggaaaagtgtgtagggattaccttccttagacggataagatctaatatttgttggcgacttttaagtggaatggatgcaagtagggatgtcaaactctacatgcctcaggtcattgatatcttcaaagatgcatttatggattctactgatgagcacagtgacatcatctcagacatggttaatggcaaaaatggagaccaagagaaggattttcgaggaatgtattgtgcactgttaactgcaagcacacatgttgtctctgctgcgattctgaaagtgcgcatcgaacaaatcgcagaacttgtcctcattgctactcgtagcgagtgcagaaaaaagggttacttcatacttctcctaaagtcgatcgaggcaaatttgagagcctggaatgtaagccttcttactgcgcctgttgaccctgaaatggcacaaatctggtcagagaagctcgggttcaccattttatcagctgaagagaaggagtcaatgctggagtcgcaccccttggtgatgttcaagaacctagtcttggtgcagaaatcacttgcttgagcaaa

SEQ ID NO: 92343 - DNA, 2207 bp, Zea Mays
gcggcaagcgctcttttgaccggtctcccgaccccgaagaccacttgccccctccaggccgaggccgccgccgccaactactgacacagtgacacgcaccaatgaccaacccggcggccggccacgaacgataacacgccggcccgcctcgccacgctcccaccctcctgcctccgcgcgccacgaccagccgccccagcagcagatgtcgcctccgtccgtcctgctcctccactcccgcatcccgcttcagccccgccccttcaggatgaactcccgggcagctccgagcagggtcgtcgtctgctccgtcgcgtctaccgaggggttcatctccgcagcgccgatcctcctccccgatggcccttggaaacaggtggaaggcggcgtcactgccgcgaaggggttcaaggcggcgggtatctacagtgggttgcgtgccaaaggcgagaagcctgacttggcactggtcgcctgcgacgtcgacgccactgtagcaggagcatttacaacaaacgtcgtagccgccgcacctgttttgtattgcaagcatgtccttagtacatcgaaaacaggtcgtgctgtgttaattaatgctggacaagcaaatgctgcaactggtgatcttggctatcaggatgcagtggatagtgcagatgctgttgccaagcttctcaatgtaagcacagataacatactgattcagtctactggtgtcattggtcaaaggataaagaaggaggcacttttaaattcactacctagacttgtgggctcactgtcttcttcagttcagggtgcgaattctgctgctgtggccattacaactacagaccttgttagcaagagcattgctgtccagactgagattggaggagtggctattagaataggtgggatggctaaaggttctggaatgattcacccaaatatggcaacaatgcttggtgttttgaccacagatgctcaagtcagcagtgatgtctggagagaaatgatccggatgtcagtgagtagaagtttcaaccaaattacagtggatggtgatactagtaccaatgactgtgttattgctatggcaagtgggttgtctggtttatctggaattcaaagtcttgatagcattgaggctcaacagttccaagcatgcctagatgcagtaatgcaaagtcttgcaaaatccatagcatgggatggtgagggtgcaacatgcctaattgaggttactgtaagtggcgccaacaacgaggcagaagctgctaaaattgctcgttcagtagcatcttcttctttggttaaagccgctatatttggaagagacccaaattggggacgaattgcttgctcagttggttattcaggcattcaatttgacgcaaatcgacttgatatttctctgggagttattccactaatgaaaaatgggcaaccactcccctttgacagattgaccgctagcaagtatctcaaagatgctggagatgcccatggtacagtaaacattgatatatcagttgggagtggaggaggaaatggaaaggcatggggctgtgatctgagctacaaatatgttgaaataaatgctgaatatacaacatgagatttatatttgccatgaagaaaaaaaatcttgaaatgatgaatgggtgcgactaccgtcaggagaatgtagtttcgtgttgcaatggcagccttgcggatgtattatttcacgtgagatcaatcagaccaatatttcataagtgtaataatgtgatgaataacgatgggcgcaataacaacactgacgatgccaccttgttcggttctgaatttctgatgatgagaaagcattggtcagacaaataattttggaattcggtatacaaagctctggttctgccgtcctgcgtatcaaactgaagctccacttttatgtcagttggactgatatggtgttaatttcaccactgatacctatatcaattggattccttgacggtttgccagccgcagttctcttgttttaacattttagccttacaaacacaacgtgatgttgatgtagtttgtaacgtggaatgtcagaaataatattgatacaatgttgtagatttgttgttttatttgaaattatgtacattgctttagacgaatctcactaagtcatattcgatttggaaaagccaacgtttctaggttcatgaatagttataatatgagagaat

SEQ ID NO: 92344 - DNA, 1461 bp, Zea Mays
ctatcttcttccgtcagcttaagcttttgggtcgaactggctagtacctccactctaacaatattgaggttttgtctcaaatgattgcctatcagggtgatcttggctatcaggatgcagtggatagtgcagatgctgttgccaagcttctcaatgtaagcacagataacatactgattcagtctactggtgtcattggtcaaaggataaagaaggctttggcattgtaggaggcacttttaaattcactacctagacttgtgggctcactgtcttcttcagttcagggtgcgaattctgctgctgtggccattacaactacagaccttgttagcaagagcattgctgtccagactgagattggaggagtggctattagaataggtgggatggctaaaggttctggaatgattcacccaaatatggcaacaatgcttggtgttttgaccacagatgctcaagtcagcagtgatgtctggagagaaatgatccggatgtcagtgagtagaagtttcaaccaaattacagtggatggtgatactagtaccaatgactgtgttattgctatggcaagtgggttgtctggtttatctggaattcaaagtcttgatagcattgaggctcaacagttccaagcatgcctagatgcagtaatgcaaagtcttgcaaaatccatagcatgggatggtgagggtgcaacatgcctaattgaggttactgtaagtggcgccaacaacgaggcagaagctgctaaaattgctcgttcagtagcatcttcttctttggttaaagccgctatatttggaagagacccaaattggggacgaattgcttgctcagttggttattcaggcattcaatttgacgcaaatcgacttgatatttctctgggagttattccactaatgaaaaatgggcaaccactcccctttgacagattgaccgctagcaagtatctcaaagatgctggagatgcccatggtacagtaaacattgatatatcagttgggagtggaggaggaaatggaaaggcatggggctgtgatctgagctacaaatatgttgaaataaatgctgaatatacaacatgagatttatatttgccatgaagaaaaaaaatcttgaaatgatgaatgggtgcgactaccgtcaggagaatgtagtttcgtgttgcaatggcagccttgcggatgtattatttcacgtgagatcaatcagaccaatatttcataagtgtaataatgtgatgaataacgatgggcgcaataacaacactgacgatgccaccttgttcggttctgaatttctgatgatgagaaagcattggtcagacaaataattttggaattcggtatacaaagctctggttctgccgtcctgcgtatcaaactgaagctccacttttatgtcagttggactgatatggtgttaatttcaccactgatacctatatcaattgga

SEQ ID NO: 92345 - DNA, 1934 bp, Zea Mays
gcatagcaagcggcaagcgctcttttgaccggtctcccgaccccgaagaccacttgccccctccaggccgaggccgccgccgccaactactgacacagtgacacgcaccaatgaccaacccggcggccggccacgaacgataacacgccggcccgcctcgccacgctcccaccctcctgcctccgcgcgccacgaccagccgccccagcagcagatgtcgcctccgtccgtcctgctcctccactcccgcatcccgcttcagccccgccccttcaggatgaactcccgggcagctccgagcagggtcgtcgtctgctccgtcgcgtctaccgaggggttcatctccgcagcgccgatcctcctccccgatggcccttggaaacaggtggaaggcggcgtcactgccgcgaaggggttcaaggcggcgggtatctacagtgggttgcgtgccaaaggcgagaagcctgacttggcactggtcgcctgcgacgtcgacgccactgtagcaggagcatttacaacaaacgtcgtagccgccgcacctgttttgtattgcaagcatgtccttagtacatcgaaaacaggtgatcttggctatcaggatgcagtggatagtgcagatgctgttgccaagcttctcaatgtaagcacagataacatactgattcagtctactggtgtcattggtcaaaggataaagaaggaggcacttttaaattcactacctagacttgtgggctcactgtcttcttcagttcagggtgcgaattctgctgctgtggccattacaactacagaccttgttagcaagagcattgctgtccagactgagattggaggagtggctattagaataggtgggatggctaaaggttctggaatgattcacccaaatatggcaacaatgcttggtgttttgaccacagatgctcaagtcagcagtgatgtctggagagaaatgatccggatgtcagtgagtagaagtttcaaccaaattacagtggatggtgatactagtaccaatgactgtgttattgctatggcaagtgggttgtctggtttatctggaattcaaagtcttgatagcattgaggctcaacagttccaagcatgcctagatgcagtaatgcaaagtcttgcaaaatccatagcatgggatggtgagggtgcaacatgcctaattgaggttactgtaagtggcgccaacaacgaggcagaagctgctaaaattgctcgttcagtagcatcttcttctttggttaaagccgctatatttggaagagacccaaattggggacgaattgcttgctcagttggttattcaggcattcaatttgacgcaaatcgacttgatatttctctgggagttattccactaatgaaaaatgggcaaccactcccctttgacagattgaccgctagcaagtatctcaaagatgctggagatgcccatggtacagtaaacattgatatatcagttgggagtggaggaggaaatggaaaggcatggggctgtgatctgagctacaaatatgttgaaataaatgctgaatatacaacatgagatttatatttgccatgaagaaaaaaaatcttgaaatgatgaatgggtgcgactaccgtcaggagaatgtagtttcgtgttgcaatggcagccttgcggatgtattatttcacgtgagatcaatcagaccaatatttcataagtgtaataatgtgatgaataacgatgggcgcaataacaacactgacgatgccaccttgttcggttctgaatttctgatgatgagaaagcattggtcagacaaataattttggaattcggtatacaaagctctggttctgccgtcctgcgtatcaaactgaagctccacttttatgtcagttggactgatatggtgttaatttcaccactgatacctatatcaattgga

SEQ ID NO: 92346 - DNA, 1791 bp, Zea Mays
gcatagcaagcggcaagcgctcttttgaccggtctcccgaccccgaagaccacttgccccctccaggccgaggccgccgccgccaactactgacacagtgacacgcaccaatgaccaacccggcggccggccacgaacgataacacgccggcccgcctcgccacgctcccaccctcctgcctccgcgcgccacgaccagccgccccagcagcagatgtcgcctccgtccgtcctgctcctccactcccgcatcccgcttcagccccgccccttcaggatgaactcccgggcagctccgagcagggtcgtcgtctgctccgtcgcgtctaccgaggggttcatctccgcagcgccgatcctcctccccgatggcccttggaaacaggtggaaggcggcgtcactgccgcgaaggggttcaaggcggcgggtatctacagtgggttgcgtgccaaaggcgagaagcctgacttggcactggtcgcctgcgacgtcgacgccactgtagcaggagcatttacaacaaacgtcgtagccgccgcacctgttttgtattgcaagcatgtccttagtacatcgaaaacaggtcgtgctgtgttaattaatgctggacaagcaaatgctgcaactggtgatcttggctatcaggatgcagtggatagtgcagatgctgttgccaagcttctcaatgtaagcacagataacatactgattcagtctactggtgtcattggtcaaaggataaagaaggaggcacttttaaattcactacctagacttgtgggctcactgtcttcttcagttcagggtgcgaattctgctgctgtggccattacaactacagaccttgttagcaagagcattgctgtccagactgagattggaggagtggctattagaataggtgggatggctaaaggttctggaatgattcacccaaatatggcaacaatgcttggtgttttgaccacagatgctcaagtcagcagtgatgtctggagagaaatgatccggatgtcagtgagtagaagtttcaaccaaattacagtggatggtgatactagtaccaatgactgtgttattgctatggcaagtgggttgtctggtttatctggaattcaaagtcttgatagcattgaggctcaacagttccaagcatgcctagatgcagtaatgcaaagtcttgcaaaatccatagcatgggatggtgagggtgcaacatgcctaattgaggttactgtaagtggcgccaacaacgaggcagaagctgctaaaattgctcgttcagtagcatcttcttctttggttaaagccgctatatttggaagagacccaaattggggacgaattgcttgctcagttggttattcaggcattcaatttgacgcaaatcgacttgatatttctctgggagttattccactaatgaaaaatgggcaaccactcccctttgacagattgaccgctagcaagtatctcaaagatgctggagatgcccatggtacagtaaacattgatatatcagttggtaagcattcagcttctttattgcaaattcgagtggaggctaacaatctttaatttattatggtgtttatttatctttgcacctgttcaaaacatctggtccgtcatggggcccccattacgtcgagcatatatttgtttcctgcatttgatctgcagtgacatttctcttgttcatggtagtttggctgatcctatgttatcacagtagccaggcagaccaaactggcatcatatgagttcaacaaatgattgcaacaaacatt

SEQ ID NO: 92347 - DNA, 460 bp, Zea Mays
atggtcatgcgacggacgctcgggcacgaggagcaacagatttgcagcaagtcacgttctccagcgtcacagcaggacacgggcgacgaagagggcggcgcgacgggtctgcgccggcgaggcctgtgcgtggcgtcgctgtccccggccgtcgtgcagctcgtgtcggccgaggccgcgctcggcaaccgcgacacggaagaccactggcgctggctcggcactctgtaagtctgtagccggggcggagaacgatgctgtgctgccatgcttcagttcgtagacggtaggagcacgagacatggccgcaggggttggtgtcatcaggccttcagatacagcgttagacctcaatttcactggggaaaaaataaatattactcacctgcttcgagaggttattagttagtacaatggatatattatatactacattaatacgtcaccttctgttttatcc

SEQ ID NO: 92348 - DNA, 1156 bp, Zea Mays
cctctccgctcgtctccgctagctagctgcaccatcgtgcatgcgttcccggccgccgcgccgcccgcctgcaggacccgcgctgccgatcgacgtcggtgcacaatgtggaactgctcgtcgctcctgctgcagtacggcgacgactacgcagccaggtgcgagagctctagttcaccggcaggagctgtgggcctggacaggatactagcggcggagtatggccggttcgattctctggacctgtcgccgccgccgccgcttcacggtcttcaggcgcagacgctttttgctattcacggttcttcagagaactgcctaggaataggcgcgaatccaatctacagcaccgaggcccggcccgcgttctcgcagctcagcttcacccagccagctgctgataccgctgcccactactcgatgaaatggacggcagcgggggagacggcgaccggtggcgggggaagccgtctcaggggatcgaagaggctcaagacaaagacgccagccacagcacaaggtccacagcaccacggccagcggtgcagtccgaaaccaacaacaagtcagtctatcaaggcaccaccatgtaagaggagccagaagctgggggacaagatcacggcgcttcagcagctagtctccccttatggcaagacggatacggcatcagtgctccacgaggcagccacctgcatcaagcacctccacgagcagatccagattctgacggcctcctaccctgaactcagttctccagcgtcacagcaggacacgggcgacgaagagggcggcgcgacgggtctgcgccggcgaggcctgtgcgtggcgtcgctgtccccggccgtcgtgcagctcgtgtcggccgaggccgcgctcggcaaccgcgacacggaagaccactggcgctggctcggcactctgtaagtctgtagccggggcggagaacgatgctgtgctgccatgcttcagttcgtagacggtaggagcacgagacatggccgcaggggttggtgtcatcaggccttcagatacagcgttagacctcaatttcactggggaaaaaataaatattactcacctgcttcgagaggttattagttagtacaatggatatattatatactacattaatacgtcaccttctgttttatcc

SEQ ID NO: 92349 - DNA, 101 bp, Zea Mays
ccgtttaacttgtggtttctcgcctctctctttcatattggcttagatctgccttttcttctcttgaacatgcaggagagctgggcttgtgtatcattatt

SEQ ID NO: 92350 - DNA, 1161 bp, Zea Mays
cgtggtcattccccaatccccaagtccccaacctgcagccctgcttccacacgaccacaaccacaggcaacgcaacccccaaacccaaaaccctaccacggcgcccatggcttcgccgccgcctcctcctgcccggcaccccacctccgcagcaaccgccgctgcggcgggcaatggccacgacacctccgcagcaaccgccgctgcggcgggaaatagccacgccacctccgcttcgccggtggacgccctcttcctccagaacctcatgacccgcgtccagctccgcccgcccttcctcgacaccaactcattcctcacccaggaccttgacgacttcctcctcaacgagttcgccgcgctatccgccgctgcaggggcgtcggatgatgacgaagacgtggaggatgaggatggtgggctcgctggcggggagggctccggggaggcgaggcggcggcggatgctggcgagggaggaggcgaagctggagaaggagattgtgcggatggtgctggccggggaggccgaggacaagctcaagcccaattcgggccagtccgtggctgtcggcgaccaccacctctgcgtcggtttccacgacgatgccagcggggagtatcgcatctgggaatggcatggccacgtcatgctgttcgacgacgaggaaggatactccgcagagtacatttatggcaaccacttcgagccgctcgctgctgccacagccagggccaagaagaaggagaaggagatgagagagaaggaattgagcatgggtcttcgggatttggtcgtggacactgacgacggtggcaatgccaatcgctccaaggagaacggtagcagcggagggcccagggtagtgcgcaggaatgtcgtcaatggcccaaccacgcctgctaggtaatggctttctagagcttgcagtgtgcttggtggaagaagcagtgccgcagtgcatcaatctgtgtgacaaaaacaaataaagatctgttgtccttttctcgcttatagctgtttaagctgtctattgtattctgttgagaaatcaatcacatctatactttgcttctgttaccacaggtacacgttacctcttggggttttaaatatattctttattcaatacttactctacatatatgttgtctgttgtgt

SEQ ID NO: 92351 - DNA, 700 bp, Zea Mays
aatagcactcgatcgatcgggctcaccacgtccagctctcggtcctcgtctttgctgctagcagctagctagcttcgcgatcgtgctcaagatcaacgacgatccatggcgtatggcaagaggtcacgccagaaggccgaggagatggtctggctgcccgacggcgccgatgtcgcgcgcttcctgctgctcttctcgggccaccagcactaccacggcgacggcatggcggcctcggcgcccgagcgggtgttcgagtgcaagacctgcaaccggcagttcccgtccttccaggcgctgggtggccaccgggccagccacaagaagccccgtctctcggacggcgtcgatgccgcagcggccgagccgcccaagcccaaggtgcacggctgctccatttgcggcctcgagttcgccatcggccaggcgctcggcgggcacatgcgccgccaccgggctgccgatcagacagacggcggcagcctcggcaccgggctcaccccgaaatacgacagcggcaagacggccgcatcgccggccgagctggttctggaccttaacgccgtgccggagctggaggaggagcaggatcacgccaagctggagctctccatcgaatttcccgtagcagtagttgactttcacgcacgctaagaaataacgtggaatagattgatcttctcggtttcatttttcaatt

SEQ ID NO: 92352 - DNA, 2440 bp, Zea Mays
atgagttcagtcgtatcctagggtttttgaattctgacggcttcgtcgagctgcgcaaggcgtcgagaaggagatggtgccgagtgggttgttcgggtgggcgtcgccccatgtacagccgctcacacccgtatccgaggtctccgagccgccggagtcgccgtcgccgtacggggacgggccggcgggggatgccggcgtggggacgagggagggggaaggcgctggcgccggagaggaggaagtggaggacgacgaggtcgagccgccgcccgcggcggtgtcattctggaggctttttgagtttgccgatggggtcgactgggcccttatggctgctggggcgcttgctgctgctgcgcatggcgcggcgctggttgtgtaccttcactacttcgggagggctctgaatttgctcgactctgagcgggttgggtcgtctctctatggacgcggcgaggaactgctccaccggtttaaggagcatgccttgtatattgtctttatagctgctggtgttttcgtcgcaggatggatagaggtatcttgctggattctcactggggaacggcagactgctgtcatcagatcaaaatatgttcaggttttgctaaatcaagacatgagtttttttgatacatatggtaacaacggagatattgttagtcaagtgctcagtgatgtattgctcattcagtcagctataagcgagaaagttgggaactacatacataatatggctacatttgttgttggtctcattgttggccttctgaattgttggcaaatagcacttctaactcttgccactggacccttgattgttgcagcaggaggaatatctaacatattccttcataggctggccgaaaacattcaagatgcatatgcagaagcggctagcattgctgaacaggccatcttatacatcaggactctgtatgcttttacaaatgagactcttgcaaagtactcctatgccacctcacttcaagccacacttagatatggaattttgattagccttgtccaaggaattggtcttggatttacatatggactcgccatttgctcttgtgctttgcaactttgggttggaagacatctgatccatcgtggaaaagctgatggtggtgaagttgtggtagctttattctctgtaattctgagcggccttggtttgaatcaagcagctacaaacttctattcattcgagcaaggacgcattgctgcttatagactatatgagatgattagtcgttcaacctccagcaccaatcaagaaggggcaaccttaccccaggtgcaggggaatattgaatttcgaaatgtgtactttagctacctgtctcgccctgagatcccaatattaagtggattcttcctcactgtaccggcgagaaaaactgtggcacttgttggtagaaatggctccgggaaaagcagtataattcctcttatggagagattctatgacccaacattaggtgaagttcttttggatggggaaaacataaaaaatttgaaagtagaatggttaagaagccaaattggtctggtgacacaagaaccagccttattgagtttgagcattcgggaaaacattgcttatggaagatctggtacctttgaccagatagaagaggcagcaaaaacagcccatgcccatgggttcatcagttcacttgaaaaggggtatgaaacccaggttggtctagctggtgtagccctcactgatgaacagaaaatcaaaatttctattgctcgtgctgtgctttcgaatccatccattctgttgcttgatgaggtcacgggaggacttgattttgaagctgaaaaggctgtacaagaagcattagatgttctcatgttgggaaggtcaaccattataattgctagacgtctttgcctcattaaaaatgctgattatatagctgtaatggaggagggtcatcttgttgaaatgggaacacatgatgaacttttaaacttggatggcctttatgctgaacttttaaggtgtgaggaagcaacaaaacttcccaaaaggatgcctaccaagaatagcagggagcgtaagtcgcttcaagcggaggacacatcgcggcagtcatctaagaattcagatcctgactcacccatatctcctcttttgacttctgatcctaaaaacgagcgttcacattcacagacttttagcagaccccagagtgaacgggatgatacgagttctgaacacagtgaactcgatgaggttcagcaccagaaaccgccatctttttggcgtcttgcaacacttagtattgctgagtggccttatgctcttttaggtacaattggtgctgctgtatttggctcatttaatccactgcttgcttacacaatagcacttatagtgtcagcatactatcaaattgaaatccgtgatatgcgccatgaa

SEQ ID NO: 92353 - DNA, 560 bp, Zea Mays
cagctctttctcctagcttgcaagtgctgtgctattgctgcgccgtctgctagaaacaccagcattcccaaatcccaatcgcacgatggcttcagccggcgcttccattccgaaggaggccagcgttgctgccgtcgtcgtattcttcctgctgatcctcggcaaggggatgccggcggcggcgggggtgacaaaatgcggcgattattgtcgcgccaagtgcagcttgggctgcgaggacagtgcctcggcttgcatcgcaggcaacatcatgtgcaaggactatcctgaaacatgtcacaattgcaaggccttggccatcggcgcctgcttcggagcctgctacagccgctgcaccgacgactgcatctgatcggcaggtattgacggatatagatggaaactgtatctccgcactgcaccgtgtgtgtgtttttactgtacatccgagatcgaaatgaagtgtatttagttttttttaatttattaactttcagatatgctctaaaagtcacatagttcgtgtttgtttgagattattgttagttcaaaataagttt

SEQ ID NO: 92354 - DNA, 104 bp, Zea Mays
ggcgtgacgcgggaccgtgacgagaatggcatgttccttgcttcgtccgttgggttctcgttaacatttatggttcagcagattgcagatggagaattccgttc

SEQ ID NO: 92355 - DNA, 1528 bp, Zea Mays
ggtgagcacaagacaaaccctggaatcattcatcatccagccactgagccagcctccaagacaagggcccacctgcctagacccaccaccacacacccccacccattctgttttcttggatccctccctgccacactgccggtgccgctgctactggccagtggccactgccattgcttgcccttgcccataaattttttcaaacccctgacgctgcctccccacatcttcttcttctccccaaattcgcccggcccgtcgtcgggagcaaggcagcaagcaatgtgccccagagccacggaccagctctgcggcgccgcgatggctagcgtgtgttcgttggtggaggaggagtacatcgacctggatctcagttcgtgcggggagctggagttccgggtgcgccggagcggcgcgtcggacgagctcctctgccgcggtagtaggctgcagccgccggcgccaccgaggcctggcggcaaggcgcaggaagttgacgtcggcggcggcggcggatgtggtggcgccggcaggaggagcgccgcgacggtggcgccgctgcagcactcgcactccgcggggttccgcgacgacacgcagcccgtggcggcgaggctgcgcaccgagtgctcccgccgcaggaaggcggcgcggacggtgcacgcgaagctgctggcgtcgcgggccttcttccggtccttgttcgccaggactaccccgtgctccgacgagcaatgccgcggcgccgaggtccgggccagcaccagagcggcgccaccacccggcgagacgaagagcgactgctgcaaggcggcgtttgcccagatcaataacggctacggctacggctaccacagcggcagggcggcgccgaccaccctgcggagcagcatcgagcaggagaagctgatggacgaggaggagctcgccgccgccgcccggcagcgcaagtccttctccggcgtgatcaagtggcggcacgcggcagcggcgcctcccgccgcggcgccggcgaagcctctgtcgtcgtcgtcctcggcgaggaggagctccggggctggcggcgggccggcgctgaagcggagcagcagcgcccggtcggagtcggaggggctgatccagggcgccatcgcctactgcaagcgctcgcagcagcagctggggctcgccaggaagagcgtcagcgacgccggcgcctccgcgccttcctggccggctcgatcggccgtaacagcagcagcctactgccactagccgtgagccccgtgacgtgtgcaaaaaaaaaaaaacaatggataccgaaagcgaagtgaccaccaccacatgagcagtaatgtgaagtttgtgctgtcttttcccgcatatatgcatccagacacgcgtgggatttcaactccagtttcttcttcttcgtccgtcagtcagtcatcgcggcgattcattcacgtatgcatttaggtttcgtagatgtcgccatcactgcaagtgttagcaacaagagaataaaaacaggaccacgggttgtctt

SEQ ID NO: 92356 - DNA, 4754 bp, Zea Mays
gagatacagagaaacagccgaggccatctgccatgagaaaggggtttttggccctcatgaagacatcagttcaaaaagcttcacagggaaggaattcatggcactttctgataaaaagaagctcttaagacaacagtgcggccttctcttctccagggcagaaccaaaacataagcaggagatagttagactgctcaaagaagatggtgaagtggttgcaatgactggcgatggggtgaatgatgcaccagctcttaaactggccgatattggagttgcaatgggcattacagggactgaggttgctaaagaagcttcagatatggtacttgcagatgataacttcagtactatagtcgcagcagttggtgaagggaggtctatttacaacaacatgaaggcttttattagatatatgatctcctcaaacatcggagaagtcgcgtccatattcttgacatcggctttgggtattccagaaggtctcatcccagtgcaacttctatgggtcaatcttgttacggatggccctccagcgacagctttagggttcaacccacctgataaagacatcatgaagaaacctcctcggagaagtgatgactcgttgatcacgccttggatcctgtttcgctatatggttattggcctttatgttggggttgccacagtgggaatcttcatcatctggtacacgcatggcagtttcctgggaattgacctggctagtgatggccatacccttgtgtcgtactcccagctctcaaactgggggcagtgctcctcatgggagggcttcaaggtgtcgccattcactgcaggagcgaggacattcagctttgatgcaaatccatgcgattacttccagggtggcaagattaaagcaacgaccctctctttgtctgtcttggtggcaattgagatgttcaactcactgaatgccctgtcagaggatggcagcctcctgagcatgccgccatgggttaatccatggcttcttctggccatgtccgtttcttttgggctgcatttcttgatcctctacgtgcctttcctggctcaagtgtttgggattgtgcccctcagtttgaacgaatggctcttggtgatagcagtggccttaccagtggtgctgatcgatgaggttctcaaatttgtggggcggtgcctgacagctcgtgcccgaaaacaatcagggaagaggaaggcagagtagatgctagtgatcatcggtattagaatctgtagcgccacgggaatcgatattggatgtgacaccccattgtttttgagttgctaaggtctttcgatcctttctgagtctttttagactgggaatatgacagtccaggacaggcaaggatattctataggactcataatcagatcgcattgaacacactgcattcttttcgttgtaacaaatgctggtgctgtgaacatgctggagatacagcaatggctatctgacgctttttagctatgatggtgcgctatatatgctactactgttctgttgcgaatcttctgacatgttgctcactgctcagtaatatatttgttagagtcgtatgttcagttatgtttgcttgtgagattcctcttgtgcagatgaaatccgcagcatggctattgatcatatactgctgtacacggaggatgcaacattattttagcttcacctgccctcctcgctgttgaccatctttgaaaaaactctcctcatggacataccatcgaggtcccccaagttcgctgccacggtggcctctgtcccgtcgctgacggtagactggttgcgatggaatttggacgtactcctgtgaactagctgcgtgttgtctgtgccagagctgtccggcgacgcctcctgcaactgcagcgcgaactcgaggcaccagagcacgtcccctattgcgggccgctccacgccgtactccgcgaggcacttctccgcggtgtcgacgaacttcttgagcgactccggccgtatcgacccagcgatccgctggtcgacgatgctgtcgagctcgccgtttttgagccgctgcgtggcccactctgccaggttgaccatctcccggggcagcgtcgggtcgatgactggacgggcgcagagcacctccagcaggacgacgccgaaggagtagacgtcggacttgttcgtcagcatctgccgccggaagtactccgggtcgaggtacccgaagctgcccttgacggcggtgctgacgtgcgtcttgtccagctccggcccggtcttggacagcccaaagtcggcgaccttggccatgaagctgtcgtcgaggaggatgttggcggacttgacgtcacggtggatgatcgccttggccgagccggtgtggaggtagtgcaggcccctggcggcgccgatgcacacgtcgagcctctgcttccacgagaggggaggcagctcggagtcgtagaggtggctccggagcgtgcccctggccatgtactcgtacaccaggatcatctcgccgcgctcgtcgcagtagccgatgagcgacaccaggtggcggtgccgcagccgggagagcagctcgatctccgtgcggaactcgttcagcccctgctgcgaccgccggttgccgcgcttcacggccacctgcgtctcgtccctcagcgtgcccttgtacaccttcccgaacccgcccacgccgatcaccatgccctcgtcgaacccgcacgtcgcctcctgcagcgccgcgagggggatccggtacccggcaccggcgctctgcccgagcgtgaccgtgttgttcctggcgcctgcgctgctgctcttgccgaagctgcgcgagtgcgaccgggatcccagcgcgctctccgagaacgcgacccaggtgctcgacggcttcttctctggcttcttccttcgtcgtcgcaacatgaggacaatgagcgcgacagccatcaccacggtgatgacccccgcgatggccgaaccagcgatgattgcggtgacggtcttcttctttgaaccgctctgcgacgagtccgcgccgccgccggtgctcccgaccattctcatgatctcgaggccgttgaggacgccgtctgggtacgcgttgcccagcgtggacgtcccgatgctcacggtgatgttgcccttggcgtccttggcgctgagcacgaagtccttgtataacggcacggccgggacgctgaaagtgtctctggagatctcgtagtccggcagcacattccacccgcctacgtagacgttgaagaccaacccgttcgccgccttgctgacgatgtcgcagaagtgtagccggagcaggtacgccgaccccggcgcggcctggagcttccacgtcatgttaaactgcacgcttatggtgctggcggacaccaggttggtgttgatctccgtcgctgtagcgtagaccatgcctggcgccgtctcgggcgtcgccaagcctggcgtccaccggagcttcgacggcgccacatccctgtgcaccgtgaccgaactgtcgaccaggaaggcttcgtcgggaagccacgtccttcccagcgtgtcgttcctgggcgtgatcttgggagagcccatgttgaccctgttaaccgtctcgagcgcctgcgtggacagccccgcgtagcggcccatggggctcaccgtctgcgccgtgtccgcgaacaggtcgtcggggtgcgacacgacctcgatggcgttgacgaacgccaccttccccgccgccgccggcgcgaacgcgaccgccagcgtgccgccggcgacgttgacggagaactcccggaccgcgggcgtgccgttggcgggcgcgtacccgtcgatgagcagcaggccctgcgcggacacgctgaactcggcgtccgcggcgaggtcgccggacccgtaccggaaggggaagaagtggaggcgcacgaagtggcgcccgggactcttgatcgcgaacgtgtacgaggacggcgccgcgaagacgcgcgcggaccggtacagcgccgcgtcgtcggagccgctggccgccgacgcgctggcctcggagccccggggcgccggcagcacggccgccgcggggaggccgtcgtccccgaggaacgtcctgccgtcgacggtggcgttcgccgccgtgccgcagagcacgaggtagtcgtccgccggggtgaacgcggcggccaccagcgcgggcagcagcagcagcacgacggcgacccgcaggagcgtgtcgaggacggcgcgagccatggacgtggcggaagggagtggctctagaagcagctcatggacctgtccctggaagtggaacagagacgtcgagggttgcagttgcaggcagcatgaatcaaggccccatgggagtcatggtggatggttggttacttagcacaggacaggagctgctgctgtttggcggcgtgctgagagtgaatctgcgaactggcaggacaggggcagcagctagtaggtaccctaagagctgcctacccacaggaacgcggaaccggtgctcggtgattggagatttggttagccatggaggtaatattggggagggaggtggtggagcttttggttagtggggaaagcatatcactgtcattttccgaggatctgagctagaggatggctttagatattttaccaggaccaggagcctttttttttaattctgccattttttcgtggtttacaggtccctcggccgcttgtgcgcttgctcacgtcgacctcagcgaatttcaattcagcagctacaaaatggcag

SEQ ID NO: 92357 - DNA, 1993 bp, Zea Mays
cgccttggatcctgtttcgctatatggttattggcctttatgttggggttgccacagtgggaatcttcatcatctggtacacgcatggcagtttcctgggaattgacctggctagtgatggccatacccttgtgtcgtactcccagctctcaaactgggggcagtgctcctcatgggagggcttcaaggtgtcgccattcactgcaggagcgaggacattcagctttgatgcaaatccatgcgattacttccagggtggcaagattaaagcaacgaccctctctttgtctgtcttggtggcaattgagatgttcaactcactgaatgccctgtcagaggatggcagcctcctgagcatgccgccatgggttaatccatggcttcttctggccatgtccgtttcttttgggctgcatttcttgatcctctacgtgcctttcctggctcaagtgtttgggattgtgcccctcagtttgaacgaatggctcttggtgatagcagtggccttaccagtggtgctgatcgatgaggttctcaaatttgtggggcggtgcctgacagctcgtgcccgaaaacaatcagggaagaggaaggcagagtagatgctagtgatcatcggtattagaatctgtagcgccacgggaatcgatattggatgtgacaccccattgtttttgagttgctaaggtctttcgatcctttctgagtctttttagactgggaatatgacagtccaggacaggcaaggatattctataggactcataatcagatcgcattgaacacactgcattcttttcgttgtaacaaatgctggtgctgtgaacatgctggagatacagcaatggctatctgacgctttttagctatgatggtgcgctatatatgctactactgttctgttgcgaatcttctgacatgttgctcactgctcagtaatatatttgttagagtcgtatgttcagttatgtttgcttgtgagattcctcttgtgcagatgaaatccgcagcatggctattgatcatatactgctgtacacggaggatgcaacattattttagcttcacctgccctcctcgctgttgaccatctttgaaaaaactctcctcatggacataccatcgaggtcccccaagttcgctgccacggtggcctctgtcccgtcgctgacggtagactggttgcgatggaatttggacgtactcctgtgaactagctgcgtgttgtctgtgccagagctgtccggcgacgcctcctgcaactgcagcgcgaactcgaggcaccagagcacgtcccctattgcgggccgctccacgccgtactccgcgaggcacttctccgcggtgtcgacgaacttcttgagcgactccggccgtatcgacccagcgatccgctggtcgacgatgctgtcgagctcgccgtttttgagccgctgcgtggcccactctgccaggttgaccatctcccggggcagcgtcgggtcgatgactggacgggcgcagagcacctccagcaggacgacgccgaaggagtagacgtcggacttgttcgtcagcatctgccgccggaagtactccgggtcgaggtacccgaagctgcccttgacggcggtgctgacgtgcgtcttgtccagctccggcccggtcttggacagcccaaagtcggcgaccttggccatgaagctgtcgtcgaggaggatgttggcggacttgacgtcacggtggatgatcgccttggccgagccggtgtggaggtagtgcaggcccctggcggcgccgatgcacacgtcgagcctctgcttccacgagaggggaggcagctcggagtcgtagaggtggctccggagcgtgcccctggccatgtactcgtacaccaggatcatctcgccgcgctcgtcgcagtagccgatgagcgacaccaggtggcggtgccgcagccgggagagcagctcgatctccgtgcggaactcgttcagcccctgctgcgaccgcc

SEQ ID NO: 92358 - DNA, 1385 bp, Zea Mays
atgggtaagggcgggcaggacgaaggcaagcggcgggccggatccgccgcctccgatccggaccccgccgcgccggtcttcccggcgtgggcgcgcaccccaagcgagtgcctcgcggagctaggcgtctcggcggaccgcgggctcagctccgaggaggcggcggcgcggctgcagcggtacgggcccaacgaactcgagcggcacgccccgccgtcggtctggaagctcgttctcgagcagtttgatgacacgctcgtgcgcatcctgctcctggcggccgtcgtctccttcgtgctcgcgctttacgacggcgcagaaggcggcgaggtgggcgtcaccgccttcgtcgagccgctcgtcatcttccttatcctcatcgtcaacgccgtcgtcggcgtctggcaagagagcaacgccgagaaggcgctcgaggcgctcaaggagatccagtcggagcacgcaaccgtcaagcgtcatgggcggtggtcgcatggcctccccgcgcgcgacctcgtccccggggacatcgttgagctccgggtcggggacaaggttcccgcggacatgcgcgtgctccagctcatcagctcgaccctccgcgtcgagcagggatctctcaccggcgagaccgcttctgttaacaagaccagccacaagatcgagttggaggacactgacatccagggaaaggagtgcatggtttttgccggcaccactgttgtcaatggcagtgctgtctgtgttgtgacgggcactggcatggcgactgaaattggcaagatccacgcccagatccaggaggcatctcaggaggaggacgacacgccacttaagaagaagctcaatgagtttggtgaggcgctaactgccataattggggtgatctgtgccttggtctggctcatcaacttgaagtatttcctttcctgggagtatgttgacgggtggcctaggaatttcaaattctcatttgagaagtgcacatattactttgagattgcagtggcactggccgttgcagcaattccagagggcttgcctgctgtgatcaccacatgcttggcactcggcacaaggaagatggcacagaagaatgcccttgtgaggaagctgccgagtgtggaaacattgggttgtacaactgtgatttgctctgataagaccggaactttgaccacaaaccagatgtcagcagtgaagcttgtggcaattgggaggtggcctgatactcttaggagctttaaggttgatggaaccacttatgatccaactgatgggaagatacatgattggccaagcttgagcatggatgaaaatctccagatgatcgcaaagattgctgcagtttgcaatgatgcaagcattgcccacgctgagcatca

SEQ ID NO: 92359 - DNA, 3902 bp, Zea Mays
cccacaccagaaggagccaaccccccctcaggccccaacccttttcccacttcccgccggagcgctctcctcttcgccgctccatcaccgcctcccaatcccatgggcgacccgcaccccctctcctccgcccacctcaccgctgctgcctcctcggctcgagaacaccgtggccccaccaacgagcgcctcgccgcgtccgatccttccacgtccttcgctaagcgtcctagggttgcggcggagccgtccgattccggcggctgcgttccatgcgtcgaggcggacgtacgagctcttgtgtcggtgtccggaggaatttacccgctggcgcgggcaggagcgctccgtggactcaccgcggtccttgagaaggtcgacaccagcagctgtgtcagcgcagcgatcacggactgttgctacaaatgcgcggtggagctcatgagggacgacgacaatggcgtcaggtggacgcgtgtgctcgaaatatttcagcgagattggattttgatgccaatggctatggtgacctgatggacatgattttcctacagctaagctccatggctagggacatgtgcacgcaggtgagaatggaagcattcgctgcacttggtaaaatgcaacgagtttctgagggtgttctgctacaatcgctagaaaagaaggtcatgaaaactgacaggatgggtgtttctatcatcaacggccaaaaattacctcctaaactaaaaattccctgtgctgctgggattttttcccatggagttgaagatgaattttacgaggtgagaagaactgcctgcaaatcattaggagcgctggcaaagttttctactcagtacacagagaaggccttggacttgttgatggacatgatgaatgatgatacagaagcagttaggctgcaggctctggaagcactatttagtatggcaacatatggatgtttgagtgtgcaggagaagcacatgcatatggtatattaactatgaacatagtttggcaagtaatctgcatatatatatatatatatataattggccactccttaggtaccacatgccgcatgttagtcctatggcactctttttaattcatagctagtcattttttcatactctgtttataagatatgccttgtaatgatatcacaggttcttggatagaatgaagatttttttctcaagcatgcaggagagctgcgtatcaggatatattttttatatcctcagtttatcatgcaaccatgctattcactgaaatattttgttgcaattgtaggaaaatattttgtagccactagccagagatcctcaagccaataccactgtaccagcgtattaaagaaagagtattggcacagatattattcagagaaatctttgctgatagtgatatgtacagttgaacatgtaattttcaagggaacaatataaaacaatatttgaccatgaacatatatgcaataatgcaaggataatggacttagccagaatatgaaacattcgtgcaaatataattttcggtcaaaacagttcggttttgtagttcctaaagtggcgggtccatatttttcgattcttgtgcattttactgtcacaaagcaaccttagctctagcttttaagtagatgaaaagcatgcataatcaaaagacgaagcaggtttgaatcttgtttttgttgaaagttctctctggattctgaatgacttataattgggtttgtacctgtttaaaaagatctttcaaataatctagacatatctttgctattgatattgctaaatgctagtaaaaatctctgaccttatgtatgtataactgtttttgtagtttcttgggttgctggttgatgccaatgtcttaattcgagatgcagcacgcaagatctttgggttagtcaacatgccaaaacttcaaatattcaaatctgcagttgatggtcttgttacaagtttggagaagtatccagaggaagaggatatatatggtattatgttttccattggtaagaaccatgggagcttttcagctaacatagctaaacatttggccaaagagattactatggcatctgacggagagcttatcttggacaaaccaagggtcaaagcattgttaatagtgtctatttcagcacctttttctgatgataagcacaagcagctgggtataccttcgattatcttctcgtatgcaattcccctactggagaagatctcatgcgcactaggagaggttgatcaggattcactcttatcttacttgtatcataaaggtggaatgccattttgggaaaacaggtcagtatctgcagagtttggagaatctgaaagctgcaatgttgaaacagtgaaaattggtgcccatatagaaaacactgcaaaggaagccaaatgtctagatgaagttctggtaatgaaatccatactagaaatagttgaaggagtctggactatgagaatgtcgtgcaatgtttgtgaagttcgaactattttcagaacatgcaaagaagagctgagattattggcagaaaattcttctggatcaattggtgcattattgagctttctgagtgagtatcttgatgcaatattattcattgttgaaatatggcagttgattcagttggacaagccttatacttgtggcctaacgtcacttgatattttactggagaggttggatatgtctgtaaggaggatgaaatattgttatattggattaaatagagtattggaggtccaagttttggagctttctttgatagctcatttatgtagactctcaaagattgcagtgtgttccaaggtagttctgggtaaggtgctctgggtaattaatcgcttagaggatctgtgtgctgatgggtcctgtgaactgtctgacttcagtggagaaattaagaaggcctgtgataccaaccgtattggagataatctgattggcaacatcaacaatttgtttcaactcttccatctgaaaccaacaacagactttggaatgcttaaagtgataagtgcaatgttgcgggtctgtgataacgattctgaaaatccattacaatacatttgtggattaccggtgggtgtcagctttaaaatatctctgtggaacatatctggtcaccatcgactgtggctccgcatgaccattggtgaatctgtgcaacataccttcctagaattttctcgttttgaaggcaatgatgaggtgatgagtggctctatggttgttcctttgtatgctactccaaagacatgttcatttgtgcttcgggtatgtctggtaatggaatgtccatctgcagggatcagcacccaccagggtggacatggaggaccgagtgattgtgtggttcaactctctgatgaactgaatgtttattttgttagtgctagccaatggtgatgattaaaataagcgaccatatgctttccatgctcatcgtcttaaaggcttttgcttgagtggacattcttgatccaggtctcttctggggaaaagggttcagttgtgctgaaatttttgtagttatggcaaaagcaatgcagatgagctgcatgctccatgaccgtatgcatagtgtggagtgcaagtgggttttaacctggtcgaagcactttgagttcgttaggagctacaacttcagacggaaagtgaaggcgtgaagctcaccaagtgacgatggagaaagtgcagcgtgggggtgaagctgacgatggagaaggtgcggcggaccacgctgcgcgggtttttttttgtcaccaatttgtgtggccttggccggcggtgagtgagaaacagccgggtcagaaattcgcaatcctgcagtacggttcatattatattaataatacttccgttttcgaaaatttatcttgtagttcatttcttca

SEQ ID NO: 92360 - DNA, 3329 bp, Zea Mays
cccacaccagaaggagccaaccccccctcaggccccaacccttttcccacttcccgccggagcgctctcctcttcgccgctccatcaccgcctcccaatcccatgggcgacccgcaccccctctcctccgcccacctcaccgctgctgcctcctcggctcgagaacaccgtggccccaccaacgagcgcctcgccgcgtccgatccttccacgtccttcgctaagcgtcctagggttgcggcggagccgtccgattccggcggctgcgttccatgcgtcgaggcggacgtacgagctcttgtgtcggtgtccggaggaatttacccgctggcgcgggcaggagcgctccgtggactcaccgcggtccttgagaaggtcgacaccagcagctgtgtcagcgcagcgatcacggactgttgctacaaatgcgcggtggagctcatgagggacgacgacaatggcgtcaggtggacgcgtgtgctcgaaatatttcagcgagattggattttgatgccaatggctatggtgacctgatggacatgattttcctacagctaagctccatggctagggacatgtgcacgcaggtgagaatggaagcattcgctgcacttggtaaaatgcaacgagtttctgagggtgttctgctacaatcgctagaaaagaaggtcatgaaaactgacaggatgggtgtttctatcatcaacggccaaaaattacctcctaaactaaaaattccctgtgctgctgggattttttcccatggagttgaagatgaattttacgaggtgagaagaactgcctgcaaatcattaggagcgctggcaaagttttctactcagtacacagagaaggccttggacttgttgatggacatgatgaatgatgatacagaagcagttaggctgcaggctctggaagcactatttagtatggcaacatatggatgtttgagtgtgcaggagaagcacatgcatatggtatattaactatgaacatagtttggcaagtaatctgcatatatatatatatatatataattggccactccttaggtaccacatgccgcatgttagtcctatggcactctttttaattcatagctagtcattttttcatactctgtttataagatatgccttgtaatgatatcacaggttcttggatagaatgaagatttttttctcaagcatgcaggagagctgcgtatcaggatatattttttatatcctcagtttatcatgcaaccatgctattcactgaaatattttgttgcaattgtaggaaaatattttgtagccactagccagagatcctcaagccaataccactgtaccagcgtattaaagaaagagtattggcacagatattattcagagaaatctttgctgatagtgatatgtacagttgaacatgtaattttcaagggaacaatataaaacaatatttgaccatgaacatatatgcaataatgcaaggataatggacttagccagaatatgaaacattcgtgcaaatataattttcggtcaaaacagttcggttttgtagttcctaaagtggcgggtccatatttttcgattcttgtgcattttactgtcacaaagcaaccttagctctagcttttaagtagatgaaaagcatgcataatcaaaagacgaagcaggtttgaatcttgtttttgttgaaagttctctctggattctgaatgacttataattgggtttgtacctgtttaaaaagatctttcaaataatctagacatatctttgctattgatattgctaaatgctagtaaaaatctctgaccttatgtatgtataactgtttttgtagtttcttgggttgctggttgatgccaatgtcttaattcgagatgcagcacgcaagatctttgggttagtcaacatgccaaaacttcaaatattcaaatctgcagttgatggtcttgttacaagtttggagaagtatccagaggaagaggatatatatggtattatgttttccattggtaagaaccatgggagcttttcagctaacatagctaaacatttggccaaagagattactatggcatctgacggagagcttatcttggacaaaccaagggtcaaagcattgttaatagtgtctatttcagcacctttttctgatgataagcacaagcagctgggtataccttcgattatcttctcgtatgcaattcccctactggagaagatctcatgcgcactaggagaggttgatcaggattcactcttatcttacttgtatcataaaggtggaatgccattttgggaaaacaggtcagtatctgcagagtttggagaatctgaaagctgcaatgttgaaacagtgaaaattggtgcccatatagaaaacactgcaaaggaagccaaatgtctagatgaagttctggtaatgaaatccatactagaaatagttgaaggagtctggactatgagaatgtcgtgcaatgtttgtgaagttcgaactattttcagaacatgcaaagaagagctgagattattggcagaaaattcttctggatcaattggtgcattattgagctttctgagtgagtatcttgatgcaatattattcattgttgaaatatggcagttgattcagttggacaagccttatacttgtggcctaacgtcacttgatattttactggagaggttggatatgtctgtaaggaggatgaaatattgttatattggattaaatagagtattggaggtccaagttttggagctttctttgatagctcatttatgtagactctcaaagattgcagtgtgttccaaggtagttctgggtaaggtgctctgggtaattaatcgcttagaggatctgtgtgctgatgggtcctgtgaactgtctgacttcagtggagaaattaagaaggcctgtgataccaaccgtattggagataatctgattggcaacatcaacaatttgtttcaactcttccatctgaaaccaacaacagactttggaatgcttaaagtgataagtgcaatgttgcgggtctgtgataacgattctgaaaatccattacaatacatttgtggattaccggtgggtgtcagctttaaaatatctctgtggaacatatctggtcaccatcgactgtggctccgcatgaccattggtgaatctgtgcaacataccttcctagaattttctcgttttgaaggcaatgatgagggatcagcacccaccagggtggacatggaggaccgagtgattgtgtggttcaactctctgatgaactgaatgtttattttgttagtgctagccaatggtgatgattaaaataa

SEQ ID NO: 92361 - DNA, 1910 bp, Zea Mays
gctccagtaccacagatctccagaagtcatcagctttgccaaaatctgcttctcctaaaatgcaacctactaagcaacctcctaagactttagatagccgtcttgggaagactagaagcccagatataaagtcagagatgtctcaaaatggtatgcaagctgggagctgtagtgagaaccatgcaaaacttgctgctttgaagacagagcatcagaatgaaagtgaagaggtcggtagacactctgatttgcacccaagagactctgtcctgggtgaagactcagaacttgatggtgcttcaagcagtcaacagcatagtgaatatagcaagaagacagcttctgaaaagtcagaacgtgacaaatccaaacctgactcttgtaacatatctgttcagaatgaaaaagatggacaacttggggcaaatttgagagaactggggtatgcttatgtgaacaggaatgaaagatgggagaggttcatggagtctgagagagaaaagagcaatggagaatgccatggtggcagacatgcatctgacgttatgaacaaacgaatgacaaaccaccgtggtggttggcggggtgctggatcccgtggccatctgaggaacttccgaggtccaagaatgcgcaatgagtttgctgatgaatctattggtggcaacaggcactcatttgaagatgaacctgggcacacccgaggtccacataggaggcggcattcaccaccacatggctgcctcatgagagatacggacattgacgaattctacggaagagagattccagagtataggctgccggcccgtggacaaatagaagatctcccagatagcatgatggacgacaggttttttatgccgtattcccatagacaccgtggtcaaggtgatcatgggttcatccacagagacagagacaggagtcattcgcctgctgcacagagaagggttggccatgtgcatttccatcgtggacgatcacctgaagcgatgcgcagatcaccaccgccggtaatgcgaactgacagaacatacatgcctcaccgccatcacaacggaagccatgacgagaggggtgccatgcaaagaaatgacaggaggtgcgccatggaaggtgatgcctcaggcttcgagccaccgctacatccctcccacctagctgagttccatacagtagaggaacttgtgggcagaaggaagtatagggagcggagaccatatcttcattcaacggtgagtgacgaagacgagatgctcccctaccgcacggaggatgacatggagtttgctgaaggaggtgctggtccacgagagcacaacggcggcttcaggaacaggatggggcacgacagggcacgaggggaacaagaggacgggtacaggcaccgccgtggcggtcatcaagggtggcgagacagtgacacaaatgacagaccaaagaggaggaggtactgacctactgcactcacagcttgaccggctaatgaagacgacgtcgttggcctttgggtggactggactggctgatgcatctgccacagatctcggtctcagacgaacccaacacctttttgccagcgtctcccattccatatattgctttgtttttgctgcattattttctcaggacatggtgctgcagcgtctaaagcatactgctccctccctctctctatagtaaccctgggtcctgctccgtttacaagccgagctgctagtacatgtggatgatgaagggtgggtggagacactgaacattttgaggccaaggtcaaagtgaaataagaacccccccggcatgtgctatttttgccctgggtgctagtgcggcccttgtattaaagaccgacttgtctctataatttggtttcgagttgatgtgagtacagctgctgtgggaccgac

SEQ ID NO: 92362 - DNA, 1593 bp, Zea Mays
agtttttcgtttgggaggagagggagggaaggaaggaatcagattggcgcagatgaggctggagggagaagggaggccagatcagttcaccagtcgacgaagcaagcggcaggaggaggcggactagggagtggttggcgcgtcgccgtcgcgagccagtgagctgcctaggagcgctcctttttagtcgctgcgacgcccgcgcctgcgtaggcgccgtgtgctcctgccggccgcactgagcgtggcgagctctgggccagactcgagcgatcttatcagaggacacagattatcagctgattgtcacggaagatgtcgctagccaagaaagaagaggtttgcagtcaccgacttgtaccgcgcttggacgagcctgcggttggtgtgcctattaagaagaggccatttttcttgtctgaccgatcggttgcatctgccataccgctctcgacaaagcccccatctccaacgaatacaatgcctgttgctgctacagggtcaggctgccgcgaggaacccttcttcaacatcgctaactcagacagaaaagtcatcaccaaagacagtgctacaaggacgtctgcacccgatgatgaattgcaacttcaaaattttttggctctggatttacagttaccatctcgtcaaagtggcaaaaataataactatagctctcttaggaaggatgagaaactgggccagagtcgttcggaacactacaataacgttcctgttgcaaatgaaatcaatgcttctgggaatagtattgttgggagattgcctaacttggatctgaatatacctccggacccagctgattcacttgaaggtttgcctaaaatgcatgaaagtgggagtgggttctatcatcatagaacaattcaacatcagaaagctcaggtgaccccagccgcagccatttctacgataaacagtgggataggtcgaaatatgtgcagtactctgaacatgtctaattcatatgggctttctcataagtctggaccagctgatgttaccttagatttacaacttaaaccaccaactagacctgagctagggataaactggaaaggacttgctcctgctccagaactgagtctctctctatttggtaagcctatggacgagcctgagtttcctagcacccccaatgccttatttcattctggaactgctggaagttccaaaaaggtcagtggggaggctgctgctacacttgggtcagataaggcaccagttgagaagattgtaacacctgttccctgcaatgtaaatcctctgaatactacatcagcaactgtttctggaattgatcagctgccatctaataatttggtgaagaaagaacctgaagaaatatcccagcagcatattattgacggcgctaaaaagccaaatccattagaacgacaaagtgttggacaagttatcggttgtgctgaatctgaaaagacggacagtgcaccccaaggtgctcgtaaaattgggtttgatttgaattctgacatctttgcaaatagtagtatccataatgagtctgatgtagcagcagttgatgccccaataccagctaaaactttacctgat

SEQ ID NO: 92363 - DNA, 1713 bp, Zea Mays
agtttttcgtttgggaggagagggagggaaggaaggaatcagattggcgcagatgaggctggagggagaagggaggccagatcagttcaccagtcgacgaagcaagcggcaggaggaggcggactagggagtggttggcgcgtcgccgtcgcgagccagtgagctgcctaggagcgctcctttttagtcgctgcgacgcccgcgcctgcgtaggcgccgtgtgctcctgccggccgcactgagcgtggcgagctctgggccagactcgagcgatcttatcagaggacacagattatcagctgattgtcacggaagatgtcgctagccaagaaagaagaggtttgcagtcaccgacttgtaccgcgcttggacgagcctgcggttggtgtgcctattaagaagaggccatttttcttgtctgaccgatcggttgcatctgccataccgctctcgacaaagcccccatctccaacgaatacaatgcctgttgctgctacagggtcaggctgccgcgaggaacccttcttcaacatcgctaactcagacagaaaagtcatcaccaaaggtaagggaatccctgacactcagatccaagaccatgtcaacacgtcgcttactgcgctatccatgaccaacggcaacggggtgctatttaatgcatcaagtgagatcccttctattgcagacagtgctacaaggacgtctgcacccgatgatgaattgcaacttcaaaattttttggctctggatttacagttaccatctcgtcaaagtggcaaaaataataactatagctctcttaggaaggatgagaaactgggccagagtcgttcggaacactacaataacgttcctgttgcaaatgaaatcaatgcttctgggaatagtattgttgggagattgcctaacttggatctgaatatacctccggacccagctgattcacttgaaggtttgcctaaaatgcatgaaagtgggagtgggttctatcatcatagaacaattcaacatcagaaagctcaggtgaccccagccgcagccatttctacgataaacagtgggataggtcgaaatatgtgcagtactctgaacatgtctaattcatatgggctttctcataagtctggaccagctgatgttaccttagatttacaacttaaaccaccaactagacctgagctagggataaactggaaaggacttgctcctgctccagaactgagtctctctctatttggtaagcctatggacgagcctgagtttcctagcacccccaatgccttatttcattctggaactgctggaagttccaaaaaggtcagtggggaggctgctgctacacttgggtcagataaggcaccagttgagaagattgtaacacctgttccctgcaatgtaaatcctctgaatactacatcagcaactgtttctggaattgatcagctgccatctaataatttggtgaagaaagaacctgaagaaatatcccagcagcatattattgacggcgctaaaaagccaaatccattagaacgacaaagtgttggacaagttatcggttgtgctgaatctgaaaagacggacagtgcaccccaaggtgctcgtaaaattgggtttgatttgaattctgacatctttgcaaatagtagtatccataatgagtctgatgtagcagcagttgatgccccaataccagctaaaactttacctgat

SEQ ID NO: 92364 - DNA, 1211 bp, Zea Mays
gattagcgaatcgctttctccacgaactcacgaatgcgttggccgctgggagaaggagcagttccgctctctcgtttgggtggacgacgaggaagaggaggccaacgcccacagcaacaggcgaccagcccgcgaagacgtggcaccaggataggtgctcctgtcctgagcttcaaatccgcaccccgcggccaagctgttacttgcgctgcggccttagcatgaggtggccgctggcgatctcgactcgccgccgccccctcctccttttcatccttctcgtcgtcctctacacgattcctgggacattttcatcgaggcaagtcacactcgatactgttgagatattttctactcatgaatggtttggcaaaccaacagtcgttttcgggtgcaatggagagaataaaacagatttgccagatgtgagggaggtgcacacgctatatacctttaagggtgaagaatcatggcagcccttaacagagcttccagaaaagaaatgcaagcgatgtggtttgtatgaggaggacacaattacacctgatgatgtctttgatgaatgggagatgtgttcgagtgatttcaagggtgggaaatacacccggtttaaggaaggccagttcaatgcaacattcctatgtccaaactgcactgcctcaactggacatggaaaccgtgaacctagtgaagatttggaaactaagaagacatctgttgtggtcatcataatagttagtgttcttgcatcagtccttctcaccattgccttgttcgggggctacaagtactggcagaagaagaagcgggagcaagaccaggcgcgattcctcaaactctttgaagagggagatgaccttgaagatgaactgggccttaccaatgaactctaaaacagtgctacagtcttacttcctatgttttcagatgtagtttccacgtatgatgtataggatgtttggttttcactgattttattgtgtatagcatccagtagtttatagagaaatgattccaacaaaactatgattcggttgaatatctgcacggaccgttcggtcgtgcagggctttgcctacgagacttgtggcaggcttagtgcgattccggactgttcggcgtaaggtgccggacgggccgttggaggacggttcggccgtgtccagagccgatgtaccatacagtgaggatggtgatatcattttccccgg

SEQ ID NO: 92365 - DNA, 980 bp, Zea Mays
tttctccacgaactcacgaatgcgttggccgctgggagaaggagcagttccgctctctcgtttgggtggacgacgaggaagaggaggccaacgcccacagcaacaggcgaccagcccgcgaagacgtggcaccaggataggtgctcctgtcctgagcttcaaatccgcaccccgcggccaagctgttacttgcgctgcggccttagcatgaggtggccgctggcgatctcgactcgccgccgccccctcctccttttcatccttctcgtcgtcctctacacgattcctgggacattttcatcgagatttgccagatgtgagggaggtgcacacgctatatacctttaagggtgaagaatcatggcagcccttaacagagcttccagaaaagaaatgcaagcgatgtggtttgtatgaggaggacacaattacacctgatgatgtctttgatgaatgggagatgtgttcgagtgatttcaagggtgggaaatacacccggtttaaggaaggccagttcaatgcaacattcctatgtccaaactgcactgcctcaactggacatggaaaccgtgaacctagtgaagatttggaaactaagaagacatctgttgtggtcatcataatagttagtgttcttgcatcagtccttctcaccattgccttgttcgggggctacaagtactggcagaagaagaagcgggagcaagaccaggcgcgattcctcaaactctttgaagagggagatgaccttgaagatgaactgggccttaccaatgaactctaaaacagtgctacagtcttacttcctatgttttcagatgtagtttccacgtatgatgtataggatgtttggttttcactgattttattgtgtatagcatccagtagtttatagagaaatgattccaacaaaactatgattcggttgaatatctgcacggaccgttcggtcgtgcagggctttgcctacgagacttgtg

SEQ ID NO: 92366 - DNA, 1083 bp, Zea Mays
tttcgattagcgaatcgctttctccacgaactcacgaatgcgttggccgctgggagaaggagcagttccgctctctcgtttgggtggacgacgaggaagaggaggccaacgcccacagcaacaggcgaccagcccgcgaagacgtggcaccaggataggtgctcctgtcctgagcttcaaatccgcaccccgcggccaagctgttacttgcgctgcggccttagcatgaggtggccgctggcgatctcgactcgccgccgccccctcctccttttcatccttctcgtcgtcctctacacgattcctgggacattttcatcgaggcaagtcacactcgatactgttgagatattttctactcatgaatggtttggcaaaccaacagtcgttttcgggtgcaatggagagaataaaacagatttgccagatgtgagggaggtgcacacgctatatacctttaagggtgaagaatcatggcagagcttccagaaaagaaatgcaagcgatgtggtttgtatgaggaggacacaattacacctgatgatgtctttgatgaatgggagatgtgttcgagtgatttcaagggtgggaaatacacccggtttaaggaaggccagttcaatgcaacattcctatgtccaaactgcactgcctcaactggacatggaaaccgtgaacctagtgaagatttggaaactaagaagacatctgttgtggtcatcataatagttagtgttcttgcatcagtccttctcaccattgccttgttcgggggctacaagtactggcagaagaagaagcgggagcaagaccaggcgcgattcctcaaactctttgaagagggagatgaccttgaagatgaactgggccttaccaatgaactctaaaacagtgctacagtcttacttcctatgttttcagatgtagtttccacgtatgatgtataggatgtttggttttcactgattttattgtgtatagcatccagtagtttatagagaaatgattccaacaaaactatgattcggttgaatatctgcacggaccgttcggtcgtgcagggctttgcctacgagacttgtg

SEQ ID NO: 92367 - DNA, 1225 bp, Zea Mays
ataatttttcctgttcgtatcaccgctggaggcagttgtagtatcaccggctgacaggtttgatatggaagcccttcctcctaccttgacatctgcttctgagcagccacctctctatgatggcacaaccagattgtatatgtcctacgtttgcccgtatgcgcaacgggcatggatcacgaggaattacaagggtttgcaggagaagatcaagctagtccctatgaacatggcagataagcctggatggtataaggaggtttaccccaacaatcaggtgccttcgttggagcacaacaagagggtcataggagagagcttggatctgataaagtacatcgatagcaacttcgacggacccaaacttaccatcaccgacgatcctgaaaggcaaaggttcgcagaagagctgctggggtattcagacgctttcaaccgggcgtttctcgacgcgcttagatctgagggggccatgaccactgaagctgttgctgctctggacaaaatcgacagcgccctgttaaaattcgatgatggccctttcttccttggccaacttaatctggtggacattgcatacgcaccattcatcgaaggttttcagatattttttgctggcatgaagaattgtgacatcacccaagggagagttcacatacagaaattcatcgaggaaatgaacaagattgacgcgtgcacgcagaccaagcaggaccctcaagtgctgcttgctctcacaaagaagaagtttgggatttaaggatgcatgaagcacctgatctgagctccacaaatggatcttcgtacgaataaaatgaaggagagtccgttttgaattgggaataatcaggacgagttgaacagcttgacagttgaatgctgtcagtgttctcgagcatgataaactgtaaagacttcgctattttatttaggtttaataatgactattaaacctggcgagtaaagcttcagctccaattgtccatgtcagtgcttgttgacgctttttcggagcgtcaaatactcaagaagaaccggcggcggtgctctctggtcaggcgcggacggtccgcggcacagggccggacggtccgcgacctggcgcgaggcggcggtgctctctggtcaggcgcggacggtccgcggcctggggccagacggtccgcgacctgatgcaggagcttgggtcctctgcctgacggccggacggtccgcgcgtgcacag

SEQ ID NO: 92368 - DNA, 1455 bp, Zea Mays
ccgccggcccagcgagagcgagccagcgaggtgcccaggaccaggacggctggggaccctgtcatccaatcagtccgtcacacgaacacgacacgattcacacatttcaatcactcgcttcccatgaattcgctcgctttccctagctgcccgtcagcattgacgcccgcctccaccaccgcccccgcgtcctctccctttccctcgccgcgtataaagattcgctgcccgcgacaagaagatgcagctcattaccacctccgcctccgcgatcgaagctcctcacaaaccgttatcgtcgccatggcagccgccgcgcctgcaagctccgtgaaggaagtgctgccatctcccctgacctccgcctccgagccccctcccctcttcgatggcaccaccaggctgtacgttgcctatcattgcccgtacgcgcagcgcgcttggattgccaggaactacaagggtttgcaggacaagattaagatagtcgccatcgatcttgctgacaggccaacatggtacaaggagaaggtttatccagaaaacaaggtgccttctctggagcacaacaaccaggtgaaaggtgagagtttggatctggtcaagtacattgacagcaactttgaaggcccatcgttgctcccagaggatccttcaaaaaagcagttcgctgaggagctgcttgcatatactgatgcatttaacaaagcattatacttttgtatagtctccaaggaagatgtgtctgaggaagctgtcgctgctttggataaaatagaagacgccctcgggaaattcaacgagggtccattctcccttggtcagttcagtctggtggacattgcgtatgtaccattcatcgagaggtttcagatattctattccaacataaagaactatgatattacaaagggcagacccaaccttcagaagttcattgaggaagtggacaagattgatgcatacacacagactaaacaggacccacagtttttacttgagcagacaaagaagcggcttgggattgcttaaagcttgcggccgaggatgactctcgacagaaataccagcatagtagatcgacacttgtttagtcatttgtgtgcttgaataatgaatactacatatatggttttcaataagacatggtcctctatactgggttgtacttctgaaaacaaactagttgtcctgatattatagctttcgtggtgtgtttacgtcactgtatatgaaagggtggggagagagaatgatatgccatgtattctgtcaaatgtttttttataatgtcaagagctctgacttttaattaagaagaaaaaggattatatataagggccaaccaaacacatgatgctgccaaacaatatattcgaatggctaacccacctatgcaatacggcaaagcattatcatgaatcatggttgctactaaaaaaaggaaaaaaaaaa

SEQ ID NO: 92369 - DNA, 1446 bp, Zea Mays
ccgccggcccagcgagagcgagccagcgaggtgcccaggaccaggacggctggggaccctgtcatccaatcagtccgtcacacgaacacgacacgattcacacatttcaatcactcgcttcccatgaattcgctcgctttccctagctgcccgtcagcattgacgcccgcctccaccaccgcccccgcgtcctctccctttccctcgccgcgtataaagattcgctgcccgcgacaagaagatgcagctcattaccacctccgcctccgcgatcgaagctcctcacaaaccgttatcgtcgccatggcagccgccgcgcctgcaagctccgtgaaggaagtgctgccatctcccctgacctccgcctccgagccccctcccctcttcgatggcaccaccaggctgtacgttgcctatcattgcccgtacgcgcagcgcgcttggattgccaggaactacaaggacaagattaagatagtcgccatcgatcttgctgacaggccaacatggtacaaggagaaggtttatccagaaaacaaggtgccttctctggagcacaacaaccaggtgaaaggtgagagtttggatctggtcaagtacattgacagcaactttgaaggcccatcgttgctcccagaggatccttcaaaaaagcagttcgctgaggagctgcttgcatatactgatgcatttaacaaagcattatacttttgtatagtctccaaggaagatgtgtctgaggaagctgtcgctgctttggataaaatagaagacgccctcgggaaattcaacgagggtccattctcccttggtcagttcagtctggtggacattgcgtatgtaccattcatcgagaggtttcagatattctattccaacataaagaactatgatattacaaagggcagacccaaccttcagaagttcattgaggaagtggacaagattgatgcatacacacagactaaacaggacccacagtttttacttgagcagacaaagaagcggcttgggattgcttaaagcttgcggccgaggatgactctcgacagaaataccagcatagtagatcgacacttgtttagtcatttgtgtgcttgaataatgaatactacatatatggttttcaataagacatggtcctctatactgggttgtacttctgaaaacaaactagttgtcctgatattatagctttcgtggtgtgtttacgtcactgtatatgaaagggtggggagagagaatgatatgccatgtattctgtcaaatgtttttttataatgtcaagagctctgacttttaattaagaagaaaaaggattatatataagggccaaccaaacacatgatgctgccaaacaatatattcgaatggctaacccacctatgcaatacggcaaagcattatcatgaatcatggttgctactaaaaaaaggaaaaaaaaaa

SEQ ID NO: 92370 - DNA, 1579 bp, Zea Mays
ccgccggcccagcgagagcgagccagcgaggtgcccaggaccaggacggctggggaccctgtcatccaatcagtccgtcacacgaacacgacacgattcacacatttcaatcactcgcttcccatgaattcgctcgctttccctagctgcccgtcagcattgacgcccgcctccaccaccgcccccgcgtcctctccctttccctcgccgcgtataaagattcgctgcccgcgacaagaagatgcagctcattaccacctccgcctccgcgatcgaagctcctcacaaaccgttatcgtcgccatggcagccgccgcgcctgcaagctccgtgaaggaagtgctgccatctcccctgacctccgcctccgagccccctcccctcttcgatggcaccaccaggctgtacgttgcctatcattgcccgtacgcgcagcgcgcttggattgccaggaactacaagggtttgcaggacaagattaagatagtcgccatcgatcttgctgacaggccaacatggtacaaggagaaggtttatccagaaaacaaggtatgtttggttaatctgctacccccttacgaccttttatgttcaatttttccaaggttcatggaaactttgttttacattctcttttaatgtaggattaacccttgtttttcttttcgggcaggtgccttctctggagcacaacaaccaggtgaaaggtgagagtttggatctggtcaagtacattgacagcaactttgaaggcccatcgttgctcccagaggatccttcaaaaaagcagttcgctgaggagctgcttgcatatactgatgcatttaacaaagcattatacttttgtatagtctccaaggaagatgtgtctgaggaagctgtcgctgctttggataaaatagaagacgccctcgggaaattcaacgagggtccattctcccttggtcagttcagtctggtggacattgcgtatgtaccattcatcgagaggtttcagatattctattccaacataaagaactatgatattacaaagggcagacccaaccttcagaagttcattgaggaagtggacaagattgatgcatacacacagactaaacaggacccacagtttttacttgagcagacaaagaagcggcttgggattgcttaaagcttgcggccgaggatgactctcgacagaaataccagcatagtagatcgacacttgtttagtcatttgtgtgcttgaataatgaatactacatatatggttttcaataagacatggtcctctatactgggttgtacttctgaaaacaaactagttgtcctgatattatagctttcgtggtgtgtttacgtcactgtatatgaaagggtggggagagagaatgatatgccatgtattctgtcaaatgtttttttataatgtcaagagctctgacttttaattaagaagaaaaaggattatatataagggccaaccaaacacatgatgctgccaaacaatatattcgaatggctaacccacctatgcaatacggcaaagcattatcatgaatcatggttgctactaaaaaaaggaaaaaaaaaa

SEQ ID NO: 92371 - DNA, 1261 bp, Zea Mays
ccgccggcccagcgagagcgagccagcgaggtgcccaggaccaggacggctggggaccctgtcatccaatcagtccgtcacacgaacacgacacgattcacacatttcaatcactcgcttcccatgaattcgctcgctttccctagctgcccgtcagcattgacgcccgcctccaccaccgcccccgcgtcctctccctttccctcgccgcgtataaagattcgctgcccgcgacaagaagatgcagctcattaccacctccgcctccgcgatcgaagctcctcacaaaccgttatcgtcgccatggcagccgccgcgcctgcaagctccgtgaaggaagtgctgccatctcccctgacctccgcctccgagccccctcccctcttcgatggcaccaccaggctgtacgttgcctatcattgcccgtacgcgcagcgcgcttggattgccaggaactacaagggtttgcaggacaagattaagatagtcgccatcgatcttgctgacaggccaacatggtacaaggagaaggtttatccagaaaacaaggtgccttctctggagcacaacaaccaggtgaaaggtgagagtttggatctggtcaagtacattgacagcaactttgaaggcccatcgttgctcccagaggatccttcaaaaaagcagttcgctgaggagctgcttgcatatactgatgcatttaacaaagcattatacttttgtatagtctccaaggaagttcattgaggaagtggacaagattgatgcatacacacagactaaacaggacccacagtttttacttgagcagacaaagaagcggcttgggattgcttaaagcttgcggccgaggatgactctcgacagaaataccagcatagtagatcgacacttgtttagtcatttgtgtgcttgaataatgaatactacatatatggttttcaataagacatggtcctctatactgggttgtacttctgaaaacaaactagttgtcctgatattatagctttcgtggtgtgtttacgtcactgtatatgaaagggtggggagagagaatgatatgccatgtattctgtcaaatgtttttttataatgtcaagagctctgacttttaattaagaagaaaaaggattatatataagggccaaccaaacacatgatgctgccaaacaatatattcgaatggctaacccacctatgcaatacggcaaagcattatcatgaatcatggttgctactaaaaaaaggaaaaaaaaaa

SEQ ID NO: 92372 - DNA, 750 bp, Zea Mays
ccgccggcccagcgagagcgagccagcgaggtgcccaggaccaggacggctggggaccctgtcatccaatcagtccgtcacacgaacacgacacgattcacacatttcaatcactcgcttcccatgaattcgctcgctttccctagctgcccgtcagcattgacgcccgcctccaccaccgcccccgcgtcctctccctttccctcgccgcgtataaagattcgctgcccgcgacaagaagatgcagctcattaccacctccgcctccgcgatcgaagctcctcacaaaccgttatcgtcgccatggcagccgccgcgcctgcaaggtgagaactgagaactgagcagaaccaagcgctgaatttctgcgaaggagattcttttctgagctttttaatggaacaattcttcctccttctcgtccagctccgtgaaggaagtgctgccatctcccctgacctccgcctccgagccccctcccctcttcgatggcaccaccaggtaggttttcgacccattaattataaatcttcaattgtgcagaccaggaactagaagttaacccttttttgagtctcgtgaaggctgtacgttgcctatcattgcccgtacgcgcagcgcgcttggattgccaggaactacaaggtgccatcaccagttcaccaccaccactgttcttcgattttcagaagcggttctcttttgtggtgtctttcttaaaaggaaaactgaaaccttttctgctcccgg

SEQ ID NO: 92373 - DNA, 1422 bp, Zea Mays
ccaatcagccatgccggcagccggcgtcgcgtttccaacaggccagtcccctcccactcccagtcccatctcgacgacatggccgcagccgcagggccatcaagctctgtgaaggagacgctcccgccggccctcggctccacctcccagccacctcccgtcttcgatggcaccaccaggctgtacatctgctacttctgcccgttcgctcagcgcgcctgggtcaccaggaacttgaagggtttgcaggacaagatggagctggtggccatcgatctgcaggacaaaccggcttggtacaaggacaaggtttacgcacagggcacgcaggtgccttccctggagcacgacagcgaggtcaggggcgagagcttggacctgatcaggtacatcgacagcaactttgacggccccgcgctgctcccagaggatgctgcgaagaggcagtttgctgacgaactgttcgcgtctgccaacgcgttcaccaaagccctctactcgccgttgctgtcccacgcggccgtgtcagacgaagttggtaagaagaccgttggccattgcttagacagaaaggattgcgatttgggatcattggcacagttgctgacatagctcgaactcgacgtttcttcttcgccagttgcggctctggataaactcgaagctgacctatccaagttcgacgacgggcccttcttcctaggccaattcagcttggcggatgtagcgtacgttacgattctggaaagggttcagatatactattcccatcttaggaactacgacatcgcccaaggcaggtccaacctacaggaattcatcgacgagatgaacaagatcgaagcgtatgcgcagaccaagaacgatcctctgttcttgcttgatcttgccaagaaccatcttaagattgcctgaagatgtgacaaagcagccttagtccgttgatcggtggaagaccactcgtcagtgttgagttgagtgtttgatcaataaaatacggcatgctgtaagggttgttttacgctattgataatacactgtactgttcagctgttgaactctatttcttagccatgccaagtgcttttcttattttgaatcacattacagcaaaaggttgaaggacacccaaaaaaacgaacagagtgctttgagtcgtccaagccaattttcctatttgggtcccaagcttatttagtctttgggccgaaaagatatctatagggcctgttcgatgcccatgatcccagttctcgatgtaacaggcttacaacaaaacgttttctctcaaaacattgtgattgatgtctaaacatgttttaaaaattcacaacaaaagcatggcatgtaacacgcacgaatacattcaacattaaactgatgttgtactcttgctgtgcatctcatattttgcctgaaaag

SEQ ID NO: 92374 - DNA, 1285 bp, Zea Mays
ccaatcagccatgccggcagccggcgtcgcgtttccaacaggccagtcccctcccactcccagtcccatctcgacgacatggccgcagccgcagggccatcaagctctgtgaaggagacgctcccgccggccctcggctccacctcccagccacctcccgtcttcgatggcaccaccaggctgtacatctgctacttctgcccgttcgctcagcgcgcctgggtcaccaggaacttgaagggtttgcaggacaagatggagctggtggccatcgatctgcaggacaaaccggcttggtacaaggacaaggtttacgcacagggcacggtgccttccctggagcacgacagcgaggtcaggggcgagagcttggacctgatcaggtacatcgacagcaactttgacggccccgcgctgctcccagaggatgctgcgaagaggcagtttgctgacgaactgttcgcgtctgccaacgcgttcaccaaagccctctactcgccgttgctgtcccacgcggccgtgtcagacgaagttgttgcggctctggataaactcgaagctgacctatccaagttcgacgacgggcccttcttcctaggccaattcagcttggcggatgtagcgtacgttacgattctggaaagggttcagatatactattcccatcttaggaactacgacatcgcccaaggcaggtccaacctacaggaattcatcgacgagatgaacaagatcgaagcgtatgcgcagaccaagaacgatcctctgttcttgcttgatcttgccaagaaccatcttaagattgcctgaagatgtgacaaagcagccttagtccgttgatcggtggaagaccactcgtcagtgttgagttgagtgtttgatcaataaaatacggcatgctgtaagggttgttttacgctattgataatacactgtactgttcagctgttgaactctatttcttagccatgccaagtgcttttcttattttgaatcacattacagcaaaaggttgaaggacacccaaaaaaacgaacagagtgctttgagtcgtccaagccaattttcctatttgggtcccaagcttatttagtctttgggccgaaaagatatctatagggcctgttcgatgcccatgatcccagttctcgatgtaacaggcttacaacaaaacgttttctctcaaaacattgtgattgatgtctaaacatgttttaaaaattcacaacaaaagcatggcatgtaacacgcacgaatacattcaacattaaactgatgttgtact

SEQ ID NO: 92375 - DNA, 1273 bp, Zea Mays
ccaatcagccatgccggcagccggcgtcgcgtttccaacaggccagtcccctcccactcccagtcccatctcgacgacatggccgcagccgcagggccatcaaggtgggtgatcgatcggtacgtcgtcgtcgaactcggaggaccgctagtagctagctaatggaatcgaacgcctgtgtctgtatgtgcagctctgtgaaggagacgctcccgccggccctcggctccacctcccagccacctcccgtcttcgatggcaccaccaggctgtacatctgctacttctgcccgttcgctcagcgcgcctgggtcaccaggaacttgaagggtttgcaggacaagatggagctggtggccatcgatctgcaggacaaaccggcttggtacaaggacaaggtttacgcacagggcacggtgccttccctggagcacgacagcgaggtcaggggcgagagcttggacctgatcaggtacatcgacagcaactttgacggccccgcgctgctcccagaggatgctgcgaagaggcagtttgctgacgaactgttcgcgtctgccaacgcgttcaccaaagccctctactcgccgttgctgtcccacgcggccgtgtcagacgaagttgttgcggctctggataaactcgaagctgacctatccaagttcgacgacgggcccttcttcctaggccaattcagcttggcggatgtagcgtacgttacgattctggaaagggttcagatatactattcccatcttaggaactacgacatcgcccaaggcaggtccaacctacaggaattcatcgacgagatgaacaagatcgaagcgtatgcgcagaccaagaacgatcctctgttcttgcttgatcttgccaagaaccatcttaagattgcctgaagatgtgacaaagcagccttagtccgttgatcggtggaagaccactcgtcagtgttgagttgagtgtttgatcaataaaatacggcatgctgtaagggttgttttacgctattgataatacactgtactgttcagctgttgaactctatttcttagccatgccaagtgcttttcttattttgaatcacattacagcaaaaggttgaaggacacccaaaaaaacgaacagagtgctttgagtcgtccaagccaattttcctatttgggtcccaagcttatttagtctttgggccgaaaagatatctatagggcctgttcgatgcccatgatcccagttctcgatgtaacaggcttacaacaaaacgttttctctc

SEQ ID NO: 92376 - DNA, 1006 bp, Zea Mays
ccaatcagccatgccggcagccggcgtcgcgtttccaacaggccagtcccctcccactcccagtcccatctcgacgacatggccgcagccgcagggccatcaagctctgtgaaggagacgctcccgccggccctcggctccacctcccagccacctcccgtcttcgatggcaccaccaggctgtacatctgctacttctgcccgttcgctcagcgcgcctgggtcaccaggaacttgaagggtttgcaggacaagatggagctggtggccatcgatctgcaggacaaaccggcttggtacaaggacaaggtttacgcacagggcacggtgccttccctggagcacgacagcgaggtcaggggcgagagcttggacctgatcaggtacatcgacagcaactttgacggccccgcgctgctcccagaggatgctgcgaagaggcagtttgctgacgaactgttcgcgtctgccaacgcgttcaccaaagccctctactcgccgttgctgtcccacgcggccgtgtcagacgaattgcggctctggataaactcgaagctgacctatccaagttcgacgacgggcccttcttcctaggccaattcagcttggcggatgtagcgtacgttacgattctggaaagggttcagatatactattcccatcttaggaactacgacatcgcccaaggcaggtccaacctacaggaattcatcgacgagatgaacaagatcgaagcgtatgcgcagaccaagaacgatcctctgttcttgcttgatcttgccaagaaccatcttaagattgcctgaagatgtgacaaagcagccttagtccgttgatcggtggaagaccactcgtcagtgttgagttgagtgtttgatcaataaaatacggcatgctgtaagggttgttttacgctattgataatacactgtactgttcagctgttgaactctatttcttagccatgccaagtgcttttcttattttgaatcacattacagcaaaa

SEQ ID NO: 92377 - DNA, 949 bp, Zea Mays
ccaatcagccatgccggcagccggcgtcgcgtttccaacaggccagtcccctcccactcccagtcccatctcgacgacatggccgcagccgcagggccatcaagctctgtgaaggagacgctcccgccggccctcggctccacctcccagccacctcccgtcttcgatggcaccaccagggtttgcaggacaagatggagctggtggccatcgatctgcaggacaaaccggcttggtacaaggacaaggtttacgcacagggcacggtgccttccctggagcacgacagcgaggtcaggggcgagagcttggacctgatcaggtacatcgacagcaactttgacggccccgcgctgctcccagaggatgctgcgaagaggcagtttgctgacgaactgttcgcgtctgccaacgcgttcaccaaagccctctactcgccgttgctgtcccacgcggccgtgtcagacgaagttgttgcggctctggataaactcgaagctgacctatccaagttcgacgacgggcccttcttcctaggccaattcagcttggcggatgtagcgtacgttacgattctggaaagggttcagatatactattcccatcttaggaactacgacatcgcccaaggcaggtccaacctacaggaattcatcgacgagatgaacaagatcgaagcgtatgcgcagaccaagaacgatcctctgttcttgcttgatcttgccaagaaccatcttaagattgcctgaagatgtgacaaagcagccttagtccgttgatcggtggaagaccactcgtcagtgttgagttgagtgtttgatcaataaaatacggcatgctgtaagggttgttttacgctattgataatacactgtactgttcagctgttgaactctatttcttagccatgccaagtgcttttcttattttgaatcacattacagcaaaa

SEQ ID NO: 92378 - DNA, 1084 bp, Zea Mays
agccggcgtcgcgtttccaacaggccagtcccctcccactcccagtcccatctcgacgacatggccgcagccgcagggccatcaagctctgtgaaggagacgctcccgccggccctcggctccacctcccagccacctcccgtcttcgatggcaccaccaggctgtacatctgctacttctgcccgttcgctcagcgcgcctgggtcaccaggaacttgaagggtttgcaggacaagatggagctggtggccatcgatctgcaggacaaaccggcttggtacaaggacaaggtttacgcacagggcacggtgccttccctggagcacgacagcgaggtcaggggcgagagcttggacctgatcaggtacatcgacagcaactttgacggccccgcgctgctcccagaggatgctgcgaagaggcagtttgctgacgaactgttcgcgtctgccaacgcgttcaccaaagccctctactcgccgttgctgtcccacgcggccgtgtcagacgaagttgttgcggctctggataaactcgaagctgacctatccaagttcgacgacgggcccttcttcctaggccaattcagcttggtacctcgctgcattcttcccggcctgaaacgtggtttgatcgcccaagatattttttttactctttctaataacaatatgctcgaccccccttttcaggcggatgtagcgtacgttacgattctggaaagggttcagatatactattcccatcttaggaactacgacatcgcccaaggcaggtccaacctacaggaattcatcgacgagatgaacaagatcgaagcgtatgcgcagaccaagaacgatcctctgttcttgcttgatcttgccaagaaccatcttaagattgcctgaagatgtgacaaagcagccttagtccgttgatcggtggaagaccactcgtcagtgttgagttgagtgtttgatcaataaaatacggcatgctgtaagggttgttttacgctattgataatacactgtactgttcagctgttgaactctatttcttagccatgccaagtgcttttcttattttgaatcacattac

SEQ ID NO: 92379 - DNA, 1060 bp, Zea Mays
ccaatcagccatgccggcagccggcgtcgcgtttccaacaggccagtcccctcccactcccagtcccatctcgacgacatggccgcagccgcagggccatcaagctctgtgaaggagacgctcccgccggccctcggctccacctcccagccacctcccgtcttcgatggcaccaccaggctgtacatctgctacttctgcccgttcgctcagcgcgcctgggtcaccaggaacttgaagggtttgcaggacaagatggagctggtggccatcgatctgcaggacaaaccggcttggtacaaggacaaggtttacgcacagggcacgcaggtgccttccctggagcacgacagcgaggtcaggggcgagagcttggacctgatcaggtacatcgacagcaactttgacggccccgcgctgctcccagaggatgctgcgaagaggcagtttgctgacgaactgttcgcgtctgccaacgcgttcaccaaagccctctactcgccgttgctgtcccacgcggccgtgtcagacgaagttgttgcggctctggataaactcgaagctgacctatccaagttcgacgacgggcccttcttcctaggccaattcagcttggcggatgtagcgtacgttacgattctggaaagggttcagatatactattcccatcttaggaactacgacatcgcccaaggcaggtccaacctacaggaattcatcgacgagatgaacaagatcgaagcgtatgcgcagaccaagaacgatcctctgttcttgcttgatcttgccaagaaccatcttaaggttaggtactacagaacagatagtaaaagtacggtaggttttcttttatttgccaatcggtaccaatggcttgctgcgacttttccagattgcctgaagatgtgacaaagcagccttagtccgttgatcggtggaagaccactcgtcagtgttgagttgagtgtttgatcaataaaatacggcatgctgtaagggttgttttacgctattgataatacactgtactgttcagctgttgaactctatttcttagcca

SEQ ID NO: 92380 - DNA, 1384 bp, Zea Mays
agcaggatgatcggactgccacgtggcttccctttctgccgtccgcgcctcccgcccggattgcatgttgcaaggcccaaggagattgccccacatgatcagttattttaggttagggcttgtgctttgcacttggcatcatccaagtatatttccgagctcaacacagtcgcagataagtacccagagcccgagcaccatcctgtatcgtatcacacgcacgcccatctgcgccaagcttgggtaaaagaaggatcggagaatggctgcgcagacgacggtgcaatgcagggtgatcggtggcggtggcatgcggacggtggagtgcctgaggggaaggcttctcgcggagcgggtggcatccaaggctgcaaaggaggatgccgaccaactgaccaaaaggctggacgagctagagaagaagctcgccggcgaggtcagggtgaggaacagggcggagaggaggctcaggagggccatcaagaagctggagtccctcaagatcctggacgtcgagctctcggaaggctccattgggtcgctgtcctccaacggccgttcggatcaccaggcgccggaggccgaggagaggaacggccctggctcgttgaccactcgtgggtctgtgctggcatccggtccttccggagaccccgacgccgacgccgacagggaatcgtcagagggatcatgcacccaggtgaattcgtcctcccgggacgggagctggtgctccgttgcgtcagagcaatcccggcctggttcttgcatggatcttgccggaaacaccaccaactgcggctcagaggggagttgcggtgaccatgattcagagagggaacaccttgatgcatccagtggctgtggctcagcaaaatcggaagaagcgttctacgaaagcgacgacaggctagcgctatcgcggggtctcgttgaaccaccaccagcagctgcaggcgaaggtccaagaacgcaggataacgacacgcatgcaggagaggtccgtgccatggatcacgaggaagaagaggagaccaacaagcttgcgatcgttctagccgacccccagccacagtcgcaaggcgacgtgtagtccgttctcctggcgctgcggcgggtgaaggagcagctgcgctacaccatgaaccaggaactcgccgcgccaaccaggagctctacgcccaccgagcgagcgtgccacactaggaaaccgtgtggctcacttctactacggtgtccaacattcggttccgtgaattattcgtagtgctgtttaggggagtggagtatctgtacagaatggaataaggtcgctcatgtggatgtggagtcactattttattaaaaagattgaatctctaggtgctttgcttgcttctgttta

SEQ ID NO: 92381 - DNA, 567 bp, Zea Mays
tttatcacatcggtggatgctacatagcttcccaaacgggaacaccttgatgcatccagtggctgtggctcagcaaaatcggaagaagcgttctacgaaagcgacgacaggctagcgctatcgcggggtctcgttgaaccaccaccagcagctgcaggcgaaggtccaagaacgcaggataacgacacgcatgcaggagaggtccgtgccatggatcacgaggaagaagaggagaccaacaagcttgcgatcgttctagccgacccccagccacagtcgcaaggcgacgtgtagtccgttctcctggcgctgcggcgggtgaaggagcagctgcgctacaccatgaaccaggaactcgccgcgccaaccaggagctctacgcccaccgagcgagcgtgccacactaggaaaccgtgtggctcacttctactacggtgtccaacattcggttccgtgaattattcgtagtgctgtttaggggagtggagtatctgtacagaatggaataaggtcgctcatgtggatgtggagtcactattttattaaaaagattgaatctctaggtgc

SEQ ID NO: 92382 - DNA, 2833 bp, Zea Mays
gtggaaggaggactagtctaatccactgccctgccgttaaacaagtacttgaagagcgaatgaagctcccggcgtggctcaccgccgtgccgccggaccctcgggcgtacggccacctcatccagctctgcgcggacaccggacacctcgctgctggccgccagctccacgctcgcctcgtcgcttcctccgttaccccgtccaacttcctcgcttccaagctcatttccctatactcccgcggagcccaccttgacgacgcacgcagggtgttcgacgccatcccgcggcccagcgtcttcgcctggaacgccatcctcatcgcactctcgcttcactcggccgatccctccgacgcggcccgcctcttcgccgcctccggcatctctcctgacgagatcacgctctccgcgctcctcaagtcgctcgccgactccggaccgaggttgtccgcactcgtcgcggaggtccacgccgtcgcggtccagcgcggctttggggacgacctgttcgtgtccaatggtctcatcaccgcgtacgcgaacgccggagattcacgctccgctcgcgcggtatttgacgaaatgccgcggcgagacgtggtgtcctggaactcgctgatatcgtcttacgctcgcgcagggtggtaccggcagtgcctagagctgtttcaggagttagcgagcgttcatggtgctggtggtgttagacccaacaacgtcaccgtggctagcgtattgcatgcttgtgcacaactcaaggctgtcgactttggggtaagagtgcaccgccttgctgccgagaatgggcttgattcggacattgcggtgtggaactcagcagttggattttatgccaaatgtggaaggctcaagtatgcaagagagttgtttgatgggatggctaagaaagatgcagtcagttacagtaccatgattgctggttacatgaaccatgggcatgtcgacatgggactggagcttttccagcgagcagatgttcaaggtatcagcatttggaacgcagtgattgctggattgattcaacatggtcgccagtccgatgtgcttggactactgaatgagatgattggttctggaatgctaccgaattcagccacactttcaatcctcattccttcagttcatttgttctccaccctactgggagtgaaacaagcacatgggtatgcgatcagaaacaactatgatcagagtatcggtgttgtgactgcattgattgatgcttactcaaaggctggatttcttgatgggtctcggagggtctttaaactgactgatgatagaagtgaaattgtatggacatcaatcatatctgccgttgcggctcatggagaagctgcagaggcattgcatctgttcaatgagatggtcaatgctggcatcagactggatactatagccttcactgctgtgcttacagcttgtgctcatactggcaaggttgctgatgctcgtaaaatttttaactccatgcaggctatgtttggtatcaatccagtgatggagcaatatgcctgcatggtttctgcattcagccgtgcagggatgctaaatgatgcacttgagcttgtcaacagtatgccatttgaaccaaatgcaatggtctggggtccattgcttaatggagcagcagaattttgtaatgtggagcttggtagatttgtattcgatcaactatttaaaattgagcctaagaacaccggtaattacattgtgatggctaatttgtactcaaatgctggcaaatgggaagaagctgatatcataaggaggaggatgtggggagttgggctcgagaaggttcctgggtgtagttggaattgagggttttcaatggtctgcatgctttgttgctgcatatacatcaagcaagcaagccgcgaaaactatgttgttgttggttgtagaaaatagtttgtcctcaaccactgctaggcgaagacaagttatattgatggactttaaaagatctaatagttgagatgtgattatcgtgcttaagagcacatctgacttttagagctgtttggaccacataagaattcaaaccaatgagagcaacattccagtcgtattgatttgattgattaactaatctaggcccaatacaaataaaaattcaaaccaatgagagccacatttcgtgatcttcttatctttgcaaggtgataggtacagaaacaacaggagattccgcaaatgtaaaaactttagaagcagtatcaatccaatttggattttcacgatcggaaggcatcagctatatccaaatcctggatggaacaccaaacaagctatgtgcagaatgttattcggtgcatcaacagaagttgctctagtgccagatgcgacaaagtttctaattcacaatgctaatctgctgttttcaatatctacattatagaaacaccatttgtgtaacgatgtagaatacgatgcgtttttctacagtctatcatgtgcttttctgaagatttgttctctctcatcaaatgcacacactgttctggtattagaatcagaactgcatggagctagcacaacaagatgtgtcttttagtgcccttgtgtgtctggatcatggttcacatgcttagatcattctacttcactacttcccaactcatgaactccaaagtggaaaagcaggttcacatgctcatcgcaggctgcgcagtcgcgcagatgtggtaatatgataatgtaaggtggcgtctttgatgagacaatgtgaatcattctggtggtccagctcgctctgtagtcttggagttcaagtggagctaagtaagtataatccctgcatctct

SEQ ID NO: 92383 - DNA, 1663 bp, Zea Mays
acgcgcctgcccacgtacgcctcctcccctcccacacccaaccccagcgcacccacaagaggaataggaggaatcaatccgccccatgcccacatccgtcgccacccacgcatccctcctcctcaaagccgcagccgccaagccttgcttctcagcccgcgcggcggcccggatccccgccccttctcaccgtcctcgcccgcccgctggccgtcgcctgccgaccacggtggccgctctcgccgccgcagcccgccggttccggtggccttcggcggccgcgtcggcacgggggctgtgcgccgcgccgcatttcggcggagaggggatgggatctgatgcgggggcggggggcaggaagaggcgggtgccagcggtgaacgggctcgccaaggacgcgcctgcggtgaacgggatgcgcaaggaggagcccgtggccgcgcctcccaggttgctcacgctgcccactgtgctcaccattggccgcgtcgctgctgtgcctcttctgatcagcactttctacatggagggtccatgggcagctatggccacaacaggcatcttccttgctgccgcagtcactgattggctagatggttatattgctagaaagatgcagctaggaacaccttttggtgcatttcttgatcctgtggccgacaagcttatggtagcggcaacattagttttgctatgcaccaaacctttggaatcatcactgctcaatgatgggccatggcttctaacagtcccttccattgccatcattggaagagagattacaatgtcagctgtgagagagtgggctgcatctcagaatagcaaagttcttgaggttcctctatcccccttttagtcttctgttccattgtatcgatagaagtcgaacaactaaagaaattacaacttgccacaacaggctgttgcagttaacaatttagggaagtggaagacagcgacgcagatgacagcattgactctgcttctcgcaagcagagacccaagtctacctgcgcaaggcgctctagttgcccccggtgttgctctactttacgtctccacgggactcgccgtatggtccctagtggtgtacatgagaaagatatggcggatactgctcaaatagtattagcacaatatatatatagtgtaatagaagaaacaagcaaggcgagcatccgttcgtgatcgtacaacttttggaaggctgttgggtggcctgagccctagagctggttgggatcctcattcatctgtaacttgtgcgtcagtttttggtggatttgccgctaaatttgctgaggcatgccaggatcctattagatttttagaaacaagacatggtgtgaccctccgtgcgtaatgagaattcttagaaacaagaagacatggtgtggccctgcgtgcgtaatgagatactagtctgcgatgcagaagattgtaaccttatacaaatacaatctggaggtttctgcgtgtggagttctaccgttgtactctacacataatatcataatataccaagagcgtacaattattctttcagggtgtgtttgggagcaacaagactgaagacgttaaaatctccttatattcaaagcctctttaattcactttaatccacttgctcccaaacaaaccctagttgacaatatcccgtctc

SEQ ID NO: 92384 - DNA, 1579 bp, Zea Mays
acgcgcctgcccacgtacgcctcctcccctcccacacccaaccccagcgcacccacaagaggaataggaggaatcaatccgccccatgcccacatccgtcgccacccacgcatccctcctcctcaaagccgcagccgccaagccttgcttctcagcccgcgcggcggcccggatccccgccccttctcaccgtcctcgcccgcccgctggccgtcgcctgccgaccacggtggccgctctcgccgccgcagcccgccggttccggtggccttcggcggccgcgtcggcacgggggctgtgcgccgcgccgcatttcggcggagaggggatgggatctgatgcgggggcggggggcaggaagaggcgggtgccagcggtgaacgggctcgccaaggacgcgcctgcggtgaacgggatgcgcaaggaggagcccgtggccgcgcctcccaggttgctcacgctgcccactgtgctcaccattggccgcgtcgctgctgtgcctcttctgatcagcactttctacatggagggtccatgggcagctatggccacaacaggcatcttccttgctgccgcagtcactgattggctagatggttatattgctagaaagatgcagctaggaacaccttttggtgcatttcttgatcctgtggccgacaagcttatggtagcggcaacattagttttgctatgcaccaaacctttggaatcatcactgctcaatgatgggccatggcttctaacagtcccttccattgccatcattggaagagagattacaatgtcagctgtgagagagtgggctgcatctcagaatagcaaagttcttgaggctgttgcagttaacaatttagggaagtggaagacagcgacgcagatgacagcattgactctgcttctcgcaagcagagacccaagtctacctgcgcaaggcgctctagttgcccccggtgttgctctactttacgtctccacgggactcgccgtatggtccctagtggtgtacatgagaaagatatggcggatactgctcaaatagtattagcacaatatatatatagtgtaatagaagaaacaagcaaggcgagcatccgttcgtgatcgtacaacttttggaaggctgttgggtggcctgagccctagagctggttgggatcctcattcatctgtaacttgtgcgtcagtttttggtggatttgccgctaaatttgctgaggcatgccaggatcctattagatttttagaaacaagacatggtgtgaccctccgtgcgtaatgagaattcttagaaacaagaagacatggtgtggccctgcgtgcgtaatgagatactagtctgcgatgcagaagattgtaaccttatacaaatacaatctggaggtttctgcgtgtggagttctaccgttgtactctacacataatatcataatataccaagagcgtacaattattctttcagggtgtgtttgggagcaacaagactgaagacgttaaaatctccttatattcaaagcctctttaattcactttaatccacttgctcccaaacaaaccctagttgacaatatcccgtctc

SEQ ID NO: 92385 - DNA, 669 bp, Zea Mays
atggagacctctttcctgcccaccacactccccaacacaaggcctctccccgcgctccgaacctacgccccagccgcctcgatccgttcccaacagcgccctcgtcgctccaccatacgcgcagccatcacccggggccggaaggaggagacggtgaccaccgtccgggagcaactggaggggtgctacctcctggcgggtatcaagtacgagggcctgacggtgaagcagctgcagggaatccgcgacgcgctccccgacacctgcaggctgctggtggcgaagaacacgctggtggggaaagccatcgagggtaccccttgggaggcgctcaagccgtgcatgaagggtatgaatgcctggctcttcgtccacactgaggaggtacccgcagcgctcaagccctaccgcgccttccagaaggaggagcgtgtcgaggagaccaacgacttcgtcggcgccgtctttgagggcaagttttacgggcccggcgacttcaaggcgctcgagactatgcccagccgcgcagaggtgtacgccacgctgctcggcgcgctgcagggacccgctacgtccctcgtcgccacgctgcaggcgccagccagagatgttgttgcggtgctctccgcctacgtgcgcaagctcgaggaggaggctggagccgcctag

SEQ ID NO: 92386 - DNA, 381 bp, Zea Mays
gtgacgtacaagcaacaattatggatccccacaggaggcccagcagtgtttagcacaatataccaggaaatgaggaaagaaggtgataatcaagatttttacaatttggatctacaacctaacaggaaagaatctttcaacctgtttcttgagaaagtcgttgaagctcgaattgttctatctgttcttcggaagatcaaagagcaatacctcctaggtcatgttgagctgccacttcgtattatcatcacggatcatgagaagacatcaagagctgaagctgaaactactgcagttgacatcgtgcaggcaataattactgaaactagtgcagttgatgtcgtgcaggcaagagctgaagttgaaattagttttgattga

SEQ ID NO: 92387 - DNA, 483 bp, Zea Mays
atgataatcgcccccaccaacgtgaactggggactcgtccaaagcatcaagttagatctttcagttctcttgattggatcaacctcttctgacaacggatactcgctgcgccgtgggttccaggtcacatacttgtctggtgagaaatcagaaaagagggtcctcttccctttcttcttgaacttagcccatgccttgtcccagtcagcagaggtttcacctttgtcgctgccgcttctgtcccgggagcctcgagagcagcgagggacgagcatgaggggagtccgtcgcgccaagaatctcccagaacctagcagtatatccatggctgccaggaatctatcagcctggcaggactccggtcagagattcttttctcgctcctgtactcctttccttttgccgcgcggtttctcttcctcttatcccggattcccggttgcaggggagactggtggcggagccgcggaggaggcggcgtag

SEQ ID NO: 92388 - DNA, 1938 bp, Zea Mays
gaagtaagaacactgagaagattcattaaccaacaagagcaataatatccacaagacagtggtgacctggaaaggaaacaccaaagggctaaggcactgaagttgccgctaaagaacacagacaagagcgtgcattacatatttacatagcactccagctgaagccggagttcagagaccccatccgaccacagaaagtccagacaattcactgccctgaccctgtctgaactctgaaccccataccattatacagattcagctaacccgataccaccccccgaagaccctcctccgctccgcgagttcaacgaccggcgccgcaggctgcagcgtttcacaacggggatcatcgcaacccccacatcgtcaactctccctgttatttataccttgactccttcgaaccgcatcagccaccgggggagacgcggcggtggctgccgccatctttgttcttgcagccgcggtggtggctgctgctgccatctttgttcgtgccgccttccttgcgcgcgggtgcctcgggggcgacgatgcaccggaacaggctcgcgaagatgcccgccttgatctgcccgcgccgaggaagggtccgcctcgccgccttctcctggtgcggcggcagccgctccatcgtcgccgcgggtgtcttcttgctcaggaaggcgcgggaatctggggactggagagccgtgtgggctgtgttgtgtctaatgtcagagtgggtgagtgacggggagcgggcgagagctccgccgttttatagctgcaggcagagcagatgggatggtccagatgagagccgagcaagagtggagccattggcaattttgccattatcatttgtgggcttcgtcattatgccatcgaatccataaatcatagacacagatggtcccaccagtcatagacacgggatggcataataacaagcagccaaatttgagagtggcaaaacagcaaatttctcgcaagagtgggggtggggggcagtttacttggagagcaaggatctcctctcccaagtttgagaccttctagaagtacgctgcagcactgtgtttttagcgcctgaaaccttgaaatacactggggcaaccctgtctcttagttcttactacggagaaaccgcgtcttggacgatgtgtcgtgtgcattgtgctgcttggcctctagtactattcaaaacctctgatgcactgctaagtgacagctgtgcaatgtgaagaataaataacaaaagtactactggcatgggaataaaaatcagccaccttctgttggttaccagcaatgaaatcagatttacaagaacaacgatgtccagccaatctggcgtttccgtgtttgggtagagtagtcacaaggctaatctgaaaaaaaaagttggactacgactggctagattctgcgataagcaatccatctggctagccatagaaaactatagcccttgtccggctgcccaaattgcccatgctgactgtacatggtctaacaagtactgaaatcaatatctagcaatgggattaggtctccagacaagaacaggagaggaagatagagattcactaacgctatgcagctctggttctttgttagtcacggacctggcaagtgccccagaactagacgtcacctaaaaggcatctgctgataatctgtacaataatgcacattcaatgagccactgaaatacaggtgcagaccggccaaagttgttagaagaaattgtctggtcatccagagagcagttgacttggatgccacactatactatatgaccccatctattccgttcacacagggggaagaaagtcttggtgtcagcagcatggaccactgttttgctactgtttggaatcaaaggcaatgcaagagcttcagaagcaggggacatgtataagtatcacggtaacgattcataaaaaaaac

SEQ ID NO: 92389 - DNA, 1686 bp, Zea Mays
gcacacggccccccgcccggtcgtgggcagagcacccggcggcagcgatcgaggctttgctcctgcttcggcttcagcccccccaattctttataaaaatccctcgccagcgcttccctcttttgacaaatcggccgcgggggagagagatatatagagccaatttttgcccgatttgcctgtctgctcgggactgagccggtattcctcttcctcgtcgacgagaataaataagctaagccagggccccggggaagaagaagatgagctccgccggaggcatggacgggtctccgccggtcgccgaattccagccgacggtgacgcacggcggccggttcctccggtacaatatcttcggcaacctgttcgagatcacgcgcaagtaccagcctcccgtcatgcccatcggccgcggcgcctacgggatcgtctgctcggtgatgaacttcgagacgagggagatggtggccatcaagaagatcgccaacgccttcgacaaccacatggacgccaagcgcacgctccgggagatcaagctgatgcggcacctcgaccacgagaacatcatcggcatcagggacgtgatcccgccgccgatcccgcgggctttcaacgacgtgtacatcggcatggagttcatggagacggacctccaccagatcatccgctccgggcaggagctgtcggaggagcactgccagtacttcctgtaccagatcctgcgcgggctcaagtacatccactccgccggcgtgatccaccgcgacctcaagcccagcaacctgctgctcagcgccaactgcgacctcaagatctgcgacttcgggctggcgcgcccgtcctccgacagcgacatgatgacggagtacgtggtgacgcggtggtaccgcgcgcccgagctgctgctcaactccaccgactactcggcggccatcgacgtctggtccgtcggctgcatcttcatggagctcatcgaccgccgcccgctcttccccggccgcgaccacatgcaccagatgcgcctcataaccgaggtgattggaacgccgacggacgacgagctcggcttcacccggaacgaggacgcgcggaagtacatgcgccacctcccgcaattcccgcgccggccgttcgcgagcctgttcccccgggtgcagcccctcgcgctggacctcatcgagcgcatgctcaccttcaacccgctgcagaggatcacagttgcggaggcgctggcgcacccgtatctggagcggctacacgacgtcgacgacgagcccgtctgcacggagccgttctcgttcgacttcgagcggcaggctctgacagaagaccagatgaagcagctgatattcaacgaggccatcgagctgaaccccagtttccgatattagagatggatcggatccgtgcacgattcctcgttaatgcacggtgtttgtaaataggcgtaatataagattgaaggctgcatttgtttgtttgtttgttttgatgttcgaaccaaggcaaccatcctgtgtctgtgaggccgtgtaatctgtcgctgcaggtttcaggcgtccctgtaatgactaatgagttgtaccaaacataaaaggttcggatcaaaaggcgatgagttgtaccaactaccaagataaaaaaggtgatgtgatggttaatggtatcattttcaagttatat

SEQ ID NO: 92390 - DNA, 849 bp, Zea Mays
tcacagtcaaaacagctgggcagttgcatgcaaatctgaaccaacaatgtagctatgtagtcatgtagactttacattggcagtcatgatgggacaacattgtgtcaccaaaagtccgctaactgagcatcaattcagtgtcacaatatattaattaggtcccggaacctggatcaaagtgtggtataggtggtcttcacaacaaaacaaaatggaaactgcagcagcagaagatgaatacaagaggcaatttcccaagagctaaacgtatcaaccaatgctggcagtgtgagccatagttctctaacacacacaaaaaaatatttatattctatccatcaacgccataaaacaaaatgcctcccatatgccaaggtagttattggacttctatccttgatgtccaattgctgaggcagtatggcataggatttgttgtggtcgccaccgatgtgatttctcatcatatattagctctaggcactgacaggacaaagaaatgatttcccatatttactgtctcctagggtattcatggcttgttgctgcgctttttcgattcactgtaaagaatgacgccaaaaactgtgagagtataaccgagcattcctgttatggacacgggattcctgaatatcataatcgagacgacaactgccaccgcaccctttgcatttccgagaacctgaaggggcatggatatggatgtcaatagctgaaggatttaaaatcttaaaacaaaacaacgatggtaaggtaacatggtaaacaaacgactaccataccaagtgatcaacaaaaccaagatagagtagtctgatgcttatgcatctaaaatacaaagatggg

SEQ ID NO: 92391 - DNA, 1477 bp, Zea Mays
ccccatcttgtgacccagtcgcctcgcctctcctctccgtttgctttgcattcaccccttgccgcacacatcaggaaggcgggcaggcgacgacaatgacgatgatggcgccgcatccgcagccactgccgctgccacagccgccggcgccgttcggggacaccacgctcaccaaggtgttcgtgggcgggctggcgtgggagacccacaaggacgccctccgcgagcacttcgagcgctacggcgacatcctcgaggccgtcatcatctccgacaagctcaccggccgctccaagggctacggcttcgtgacgttcaaggaggcggacgcggccaagaaggcgtgcgaggacgccacccccgtcatcaacggccgccgcgccaactgcaacctcgccgccctcggcgccaagccgcgccccccgccacacatcctccgcccttcgccgccggccaccccggcgccgcacgcgcccgcgctcccctcgcaacaccagcccacgccagccatcgccgtggggtccaggggcgtgtcgccggtgccgtggtactaccacccctccacgacgccgccgccaccggccgcgcaccactacgcccacggcgcgcaccagcagtaccacggcgtgctcccgttctaccccgccgccgccgccacctacgggtacgccccgaattacgtcgcggacctgagctacaatgcgaaggtaggccaggcggcagctggcggcacgggcgggtcctacctgcaggggcacttcgcgtacccggcggcggcggcagcgcagggcggcatggtggcggcggcgcccaacggcatggtgccggtgtacccgttctaccactaccaccagtaccacgcctcgcaggggggagtcgccgccgcgcacttcttccccccggtctccgccgccgccgtccccgccgtcgtctccaagcacaccgtcatggccgctcccaaagtggagcaggtgacaggctgcagctgaaggcacgaggcgatcgatgatggcgacgacgagcggcggaacgaaaggagcaggccaaacaggctgagctgcacatgaagggtgtcgtccgtctgtcgggagggcccgaagcgacgcaaggcccgggcccccattaggccattgctacatcccccctctgacttcgtgcgtggctgcacggccaccgtgccgggcaagaacagtctgtaacaaatgattcgattcgtctctctctcgtttaccaaccgtatttttttccaatggtaaacccgttaccagtgtctgtagggggcagcggaccccaataataatcgtcataatatttcgccgttcatctctgtgctgctttgcgtgcatgtatgtgcgtcagcagaacactaatggttcgccggcccatcccgtcggttctgtgggctcgcagtcccacgcccgcactccgaccttcttctccacgggctgagaaagtcgagcgttgctctttcaattcc

SEQ ID NO: 92392 - DNA, 2154 bp, Zea Mays
ccccatcttgtgacccagtcgcctcgcctctcctctccgtttgctttgcattcaccccttgccgcacacatcaggaaggcgggcaggcgacgacaatgacgatgatggcgccgcatccgcagccactgccgctgccacagccgccggcgccgttcggggacaccacgctcaccaaggtgttcgtgggcgggctggcgtgggagacccacaaggacgccctccgcgagcacttcgagcgctacggcgacatcctcgaggccgtcatcatctccgacaagctcaccggccgctccaagggctacggcttcgtgacgttcaaggaggcggacgcggccaagaaggcgtgcgaggacgccacccccgtcatcaacggccgccgcgccaactgcaacctcgccgccctcggcgccaagccgcgccccccgccacacatcctccgcccttcgccgccggccaccccggcgccgcacgcgcccgcgctcccctcgcaacaccagcccacgccagccatcgccgtggggtccaggggcgtgtcgccggtgccgtggtactaccacccctccacgacgccgccgccaccggccgcgcaccactacgcccacggcgcgcaccagcagtaccacggcgtgctcccgttctaccccgccgccgccgccacctacgggtacgtacacgcacgccgctcccagctccgaattccaatcccccgcccgcgacaaggtacgtttcgctagcccaattgaaaaagaaaccggcacggcacggcgttcgcgcacctcgagcgccgccaaactatctgcactgcacgtcgcgcgaggctacgaggatttcgtgtcctctgctcgttggcttcgggttggctggctccttgcgagcttgcggcgggcggggagggggaccagtcaccagtccagtgggcgcgcgcacacatgcgtggcagagcggctgctttggtttggaattggagcagccgagcacgcgaggcgggactggcgggaggcactggcgcaggcacagccgcgcacaggctggacctggaccggaccgcgctgcctcgtcgtgctcgcacgtgcccacgtgccggcctgcacggcggcacaaaaaaaaagagagaggaggtggacatttcaatgctacgtactggacatggccatgtgttaagactcggcacattaattaccctagttataaacaattactactataaaagtagtagacgactgatctgtccctgttctctgccattttttatcgggttctactgtgcgcggcgcgccactgttacgtgcccctcccccaccccactcgtactgatcgatcgatctgtgctgttccgttcaggtacgccccgaattacgtcgcggacctgagctacaatgcgaaggtaggccaggcggcagctggcggcacgggcgggtcctacctgcaggggcacttcgcgtacccggcggcggcggcagcgcagggcggcatggtggcggcggcgcccaacggcatggtgccggtgtacccgttctaccactaccaccagtaccacgcctcgcaggggggagtcgccgccgcgcacttcttccccccggtctccgccgccgccgtccccgccgtcgtctccaagcacaccgtcatggccgctcccaaagtggagcaggtgacaggctgcagctgaaggcacgaggcgatcgatgatggcgacgacgagcggcggaacgaaaggagcaggccaaacaggctgagctgcacatgaagggtgtcgtccgtctgtcgggagggcccgaagcgacgcaaggcccgggcccccattaggccattgctacatcccccctctgacttcgtgcgtggctgcacggccaccgtgccgggcaagaacagtctgtaacaaatgattcgattcgtctctctctcgtttaccaaccgtatttttttccaatggtaaacccgttaccagtgtctgtagggggcagcggaccccaataataatcgtcataatatttcgccgttcatctctgtgctgctttgcgtgcatgtatgtgcgtcagcagaacactaatggttcgccggcccatcccgtcggttctgtgggctcgcagtcccacgcccgcactccgaccttcttctccacgggctgagaaagtcgagcgttgctctttcaattcc

SEQ ID NO: 92393 - DNA, 681 bp, Zea Mays
gcttgcttatataaacgtacgggcgcgtgccccctttcgccaggcgcgcggtttccaggcggttcctcctccagactctagagaaagaaggcgcatcgtgagcgagagagagagaggcaatggcgtcggcgacgttcctggaggtgctcctcgccatcttcctcccgccggtcggcgtcttccttcgctacggctgcggcgtggagttctggatcgacctcttgctgaccgtgctggggtacattccggggatcatctacgccgtgtacgtgctggtggcttaagttgtgcgaagaggaggacatgaagactctcgatctgtccagaagtacgtagtgatgtgaggacttctcccagtcccagtgtgcatgtctgtctcgattacgcgaattaggagtgactatcggctgatgttgttaataaaacgtgtgtgggtgctgcaagcaaagttgtgtagttgggggcagaaatgtttatcacagcattgtttttttttttgtttctttcttttaccggaggaaccgcactgcgattgctggaacgtaattgctgttgtgtcaacagttgcttgcggtttgtgatttattagaacttttttttagctagggcctatcttcatgcgaacgaaattcggcagaaaccaaggctcagtggcggcgggcctcctttacggccactatt

SEQ ID NO: 92394 - DNA, 1212 bp, Zea Mays
attgcctttcttcatcaagcaacaaacaaaaaaacaacaggagaacaggcaaaggcctccctccctcaactcaggaaaccatccaacttgtcgatcggccttgcttgccttggtactcctgcttccgccatggttcagatcaaagagttccggatcgtcatgcccatgtccatggaagagtacgagatagggctgagctacaccatcatgaagatggagcagcagaacaccaacagcaaggagggcgtggaggtgctgcagcaggccccgttccacgaggatgccaagcttggcaagggccacttcacttccaaagtttatcatctgcaaagggctttgcacctgccagcgccctcgcggtgcacgaggactcgtggtgtgcgtttccaaagagcagaacagtgcccgctcttcagcaagtgctcactcaccattgacactgtcaccaggcccgacaacggttgctctgaaaatgcgcacggtttgagcggcgagcagttagccgcgagagaagtcgagatcatcgacatcgcttccgtgtcgcgggactactggagcaaggcgatcggcgctccgagcgtcgacctgactgccttcaagtcacagcggacagaacgaggccctcttctcaagggatggatggactcgtgccatccggtgatgaccacgtacaagctggtgaccatggacgctcccatatggggcctcggcgaacgcctggaagactgcatcattgcgggggagagggcgttgttcttggcatgccaccggctgtgcttcgcgtggatcgacgagtggtacggcatgaccgtggagcagatccgcgagatggagcggcagacggacatgctgctcaagaagacgctgaagaaggccgggagcaataagcacgagggcaacacgaagacgctcaaagacgagctagtggccgtggggagctagtggccgtggggcatcaaacatgtcacagattaggcatgtgcaagtgtaatgtgtccacaattaactgaagaaaatatgcatcgctgtatgtatctatataggagtacaatgaaggcagccatctgtggtttgtctttaaccccctaaaactagcaagctagctcgtgcaaatagtattatttcactgcttcctgcattctatttctatcttttattaggtgagtgcccgtgcgttgcaacggaaccgtataataacacaataacttatgt

SEQ ID NO: 92395 - DNA, 1008 bp, Zea Mays
accacccctgctgatctcgtacgtacaactagctagcaggctctactactccatagccaacactagctgcagcagcactgctgctccggcctccggtcatggacgactacggcaacgcgagcgcgggcacggcggcgccgcagccgcagcaatattactgccgctccgtgtcgccgccgtccagggtgtcgtcgtcgtgctcgccgccaccgcctcctcctcctcccgctgtcctgcaggtggtgggcaacgtgccgccgccgaccgtcgtcctgagcccgtgcgcggcgtgcaagatcctccgccgccgctgcgccgacggctgcgtgctggctccctacttcccgccgaccgagcccgccaagttcaccacggcgcaccgcgtcttcggcgccagcaacatcatcaagctcctccaggatctgccggagagctcgcgcgcggacgcggtgagcagcatggtgtacgaggcggaggcgcggctgcgggacccagtgtacgggtgcgcgggggcggtgtgccggctgcagaagcaggccaacgagctcaaggtgcagctggcgcgcgcgcaggccgacctgctcaacgcgcaggccaagcacgccaacctgctcgccctcttctgcgtcgagatggccaatcgccgcggcaaccagcagcacccgtcgccgctgacgacgatgatggacggcggcggcggcggcggattcggcgcggcggcgtactaccagcagacgacgttgtacgactcggacctggactcggcgacgacgtggccggatcacgaagcccagctctggacctagctcatgcttctatcgatctcgactactacaagtactttttgttgcataaacaaatactagctagtacgtagcacatgcatgtgcgttctgcaacggcaacgtttgcatcttgtcggatgctgctgcaagaacgctgtgcagccggccgtaattacgaagtatacccccgtcaatatacgattagttgctcttgatgaatgaa

SEQ ID NO: 92396 - DNA, 373 bp, Zea Mays
gttgcaagacgcgcaactgcgcaagtgacataaacaggcctttgtatggttgcgttccaatcgttacttcagttttttgtcaatgtgataaaaactatggaatggagtacagcttctatgaactgattcggagttactttggaagaggaatactctgatacgagctcataaggtcatttctttcctgtaaactggctttgtaaatgacaggatagaagacaatgttgcaaagcattgttccttgtctacgccactcgccacatgcttgctgaaactcccctgcctcaatcagcttcaagctttgcctcgcctgctttctcagcttcattcaacacgaagttcttcagcgattccacatccctaggtcctgcag

SEQ ID NO: 92397 - DNA, 565 bp, Zea Mays
ccaccctcaactcttcttttcccctctccctcccctcgccgtcgctgtcgtcgccgtccgtgctagccatggatctaggcgctcccgcccgacggcgcctaccgatccgcctcttgctggtgtcgctcaccgtcctcgtggtcctcaccgcgcgctccagtgccgaagtcatcaccctcaccgaagagaccttctccgacaagataaaggagaaggacacggtgtggtttgtgcaattctgcgtcccctggtgtaaacactgcaagaaccttggaacactatgggaggacctgggaaaggttatggaaggtgcggatgaaattgagattgggcaagttgactgtggtgtcagcaaaccagtatgctcaaaggtcgatatacactcctacccaacattcaaggtgttttatgaaggcgaagaagtagtaaaatataaagcatctatggattatactcggacgaattgcagtgtggtggggacgctgagaacccgaacgtcaccggcagcgacacgctcgcggacgaagtgcaggtcaatctccacgtgcttcgtgcgctgatgctg

SEQ ID NO: 92398 - DNA, 591 bp, Zea Mays
cgctgtcgactttacttccccaccctcaactcttcttttcccctctccctcccctcgccgtcgctgtcgtcgccgtccgtgctagccatggatctaggcgctcccgcccgacggcgcctaccgatccgcctcttgctggtgtcgctcaccgtcctcgtggtcctcaccgcgcgctccagtgccgaagtcatcaccctcaccgaagagaccttctccgacaagataaaggagaaggacacggtgtggtttgtgcaattctgcgtcccctggtgtaaacactgcaagaaccttggaacactatgggaggacctgggaaaggttatggaaggtgcggatgaaattgagattgggcaagttgactgtggtgtcagcaaaccagtatgctcaaaggtcgatatacactcctacccaacattcaaggtgttttatgaaggcgaagaagtagtaaaatataaaggtatacattgtttcaccagttcaccatactttttaggcgaatgttccaactgaaaaccatgtttgttcttctagttttggcccacacccccttatgagcatctatggattatactcggagtgggagtggggtct

SEQ ID NO: 92399 - DNA, 2123 bp, Zea Mays
ttctggcacgttcccggttcaacggaccacgacgcattcccgtcccccaactcagcagcaataacacgccgagggcgcaaatccccgcgatccccacgccaatcggagaagcgagccgtcgccgatcgattcaccaccggacccaatcacaagtaaacctgcgccgggaaaccaaatccttctaaattccttcgcgacgcggaccgcaagccgaaggcgcgacgatgtccggagcggcggactaccaggagatggtggcgtcggtgccgccctcgctgaaggccatcacgctgacgcacgttcgctacagccggggcgacccgctgggtctcttcctcgcgtgggtctccctcgtcccggttttcatcagcctcggcggtttcgtctcccacttcctcttccgtcgggagctccagggcctctgcttcgccgcagggctcctcgtctctcaggccctcaatgagctcatcaaacactccgtcgcgcagtcccgcccctcgtactgcgagctgctggaggcctgcgactcccacggttggccgtccagccactcgcagtacacgttcttcttcgccacatacctgtcgctcctctccctccgccggtcgcgcgcgcgccaggtgatcgccgccgtgccatggccgcttgccttcctcaccatgctgtccagggtctacctaggttatcataccgtcgcgcaggtgaggacccctgaatttcggatccgatctgactagatgtgtttttttttgttcagaaatggtgcacccctacattaatcagtggaggttgtcctcctgcctcgcttgatgttttaaactgtggtgccctgtgacagatgaaatgaaaaattggaaacgtttatgtgctttaaggaaatgttgctacttcagacatttttaagggggtggggcttctttggtttcaagtgaaagttcgctaaggttgaaaatccacatgtgtgtttactaatgaactaaggacagaagtactaaagatcagcagtataacaaaaaagtgataacaaacccttgtagtctgagcaagttagaccatgccaccagggaaactactctacatttaaattgtaagtcattttagctttgtcctaagtcattttagcaaatgagtcaacactgtttcactatcttgaaagaaaactgtgaaaggttaatctccataagtatatatgaaatgagcatacgaattctagcaaatcattgtttaggtcggaatcatgaactgtctctctgtttttctgaatacaactgtgcatgtatacccaattggatgcatttatctgtattgaaaagtttttatgtctttttctctatcaaaaaactgtttgacatttgtttctgcgggtgtttaatagtgcttaactctgtataaatgcattaggtatcatttagtgagatgtcaataacaatgtgttcgttacatcagttacctgcctcaaaaacctgcttatttgaaagagaagtggttcaatgtgattgtttttgttctagccaaagtacggcatatagcttctcaaaactgaaatgggtttcaattgataaatttccatcaggttttcgcgggagcagtagtgggcctcgtgtttggtgctatctggtactggattgtcaataccatgcttgttaattacttcccaatgattgaggagagtgcaatcgggaggtggttgtacatcaaggatacatctcatattccagatgtgctcaaatttgagtatgataacgcaagggcagcacggaagaaagttgctactgattgatcttgttatgcttctggattgcattttgctgttgttaaggcgccttataagaattgtgcatgatatttccttcagttatgctacacacgggcacatctgcacatgtagcagcagcaacattcagagaagaaatgctcaccggagcttgtttgatttagctcttcctgggcatacgccactttgtttttccccgtatcagtcactagccagacattattttattaaaggttgttcgactataacttgataattgcttacatttgaaaaatgacgtgaacaatacatgagttcatctctgcagtctagtgtctatacataactgtttcgtgggctctgtgagcaa

SEQ ID NO: 92400 - DNA, 1306 bp, Zea Mays
cgtgtgctcgctctagccttttccttctccctcgcgacgcggcttcgcctccctattctggcacgttcccggttcaacggaccacgacgcattcccgtcccccaactcagcagcaataacacgccgagggcgcaaatccccgcgatccccacgccaatcggagaagcgagccgtcgccgatcgattcaccaccggacccaatcacaagtaaacctgcgccgggaaaccaaatccttctaaattccttcgcgacgcggaccgcaagccgaaggcgcgacgatgtccggagcggcggactaccaggagatggtggcgtcggtgccgccctcgctgaaggccatcacgctgacgcacgttcgctacagccggggcgacccgctgggtctcttcctcgcgtgggtctccctcgtcccggttttcatcagcctcggcggtttcgtctcccacttcctcttccgtcgggagctccagggcctctgcttcgccgcagggctcctcgtctctcaggccctcaatgagctcatcaaacactccgtcgcgcagtcccgcccctcgtactgcgagctgctggaggcctgcgactcccacggttggccgtccagccactcgcagtacacgttcttcttcgccacatacctgtcgctcctctccctccgccggtcgcgcgcgcgccaggtgatcgccgccgtgccatggccgcttgccttcctcaccatgctgtccagggtctacctaggttatcataccgtcgcgcaggttttcgcgggagcagtagtgggcctcgtgtttggtgctatctggtactggattgtcaataccatgcttgttaattacttcccaatgattgaggagagtgcaatcgggaggtggttgtacatcaaggatacatctcatattccagatgtgctcaaatttgagtatgataacgcaagggcagcacggaagaaagttgctactgattgatcttgttatgcttctggattgcattttgctgttgttaaggcgccttataagaattgtgcatgatatttccttcagttatgctacacacgggcacatctgcacatgtagcagcagcaacattcagagaagaaatgctcaccggagcttgtttgatttagctcttcctgggcatacgccactttgtttttccccgtatcagtcactagccagacattattttattaaaggttgttcgactataacttgataattgcttacatttgaaaaatgacgtgaacaatacatgagttcatctctgcagtctagtgtctatacataactgtttcgtgggctctgtgagcaa

SEQ ID NO: 92401 - DNA, 98 bp, Zea Mays
gccggcgagggccgggagcacggagcagtcgcgagctcgtcgaggagagagcaggagcgcccagttcagtcgaggagacgagcagcgctcgggtagac

SEQ ID NO: 92402 - DNA, 1333 bp, Zea Mays
agtccacgtcgagcggctatgtgttccagagcgacagggtgtccttctccggctcctcatcgtttgacggctccaattccttctcgttccagacgctccagctgtgccagtactcgaccgctggacggtggcgcctacttcttcgtgggcgccaactcgcaggtgttcgccaacacgggcacgctggtcacgtgcgtcaacaacttccccaagacccgcgacgtggggctcggcatcctcaagggattcgtcggcctgtacggcggcgaggacgctgagtcgctcatcctgctcgtcgcctggctccctgcggccgtgtccgtcgcgttcgtccacaccgtctgctacatgttgtacccgcggtggtgggcaggagacgagctccgacccttcttctgcttcctctacctgtccatcgcgctggcgtgcttcctcctcgtcatgatcgtggtgcaggggcaggtgcccttctcccgcgccgcgtacggggtcgccgccgcgccactgctcatcctcctttatgaccacgaacttggagaggactatcaagtcctaagtgatctgggaaaaaggagacttatgataagtgtggaaaggtgggtattcccattgttttacaacacattctgggataacatggtggatcttgctgttgtctttgagatgctttttggaagtgactattttgaagattacgttggccagcttgctctagcatctatagcttcggtggaggttgaagaaaactcaaacagacaagaagcaagagcaaaagttcaagaaaagataaaagaaagcaaatggtggaaggaacttttagatgagaatacttatatgaaagcactaatgggtggaatactttgcatgaaaaactaagcatttggttctgattacactttttgtgtctttttcatatttattgtatgaaagcaaccggcgggaggaacttttagataagaatacttatatgaaaacagattatagtggcaaaatgaccttgctccttgatgtcctgtcaaaaaattctgaattaggtgacaaagtacgtgtttagctagagcctgaccactctggatttggtggagttttatctagcaaaattacaaatcaatggaaaagaaggcaaacaatggaagcaagggaaggatcgatacatgtatgcttccacactttaagttttttttacagaaaattgcaggtactgttgtggtattttcacaagtatttgttttcttttggtttcttatagttagtatctacatgttcatgagataagttgtccagaacctactgcctcaacaagatcctggacctattgctttgtatgcatgtg

SEQ ID NO: 92403 - DNA, 110 bp, Zea Mays
ccttttctggacttttctcctcttaatttaatgatgtgcagctctcctacgcgtttgagaaaaaaatcaatgtcatgtcatcaaaaccgcaaagtaaagttgtccaagcg

SEQ ID NO: 92404 - DNA, 172 bp, Zea Mays
gtggcgacacttggtggcgaggttcgcggcgggatggatctacaagcaggaggggttgaggcggcccacgaggcgagaggaggagttcttggggtggaagactgggacaacagaggcggacggggaggatgtgctgccccttggacatctcgaacgggatcccgccctacag

SEQ ID NO: 92405 - DNA, 579 bp, Zea Mays
atggcgttcctgccccggcccctgacctgcccccacggccggccatcctcgccactgggaccgcaagcgttctccgtcgctggcggcgcccaagaggggcagagcctcatggcgagcctatccctggttacccaggacggggaggagaacggacaggctcgttcaggcttgctagcggcgggcgccctgggggcgtcgtgcgcgtgggcgccgctgcctggctcgctcttgctgcgatggaggagcatgtccttgatgaacacccagcaccgggacccgtgggctgatgacgtgcccgacgaggacaaggaggacgtggaggaggatgaggacgagtgggacgaggcggttaccggcgggactgcctctccgtgcgttcccgtcgcgtcggggtcggggccaagatttggcgccgggacgacaagcacattgatcagcttgagccgcggtgacgcgctgcggagcgggggacatggaccgcgcgcggcggtgcacagacacgcgtcggcgcacggccgcccacgcagtccacgtcgtcgtcgcttccggggtcgagatccgggagtgggggcagggtga

SEQ ID NO: 92406 - DNA, 1459 bp, Zea Mays
ccgcggccacccgcctcacctccgccgtcgaggaggacaagaggagctccccccttggggagggcgacgagcacgtggcggccagcggcgccgcgggcggggagttcgacccgggggcgccgccgccgttcgggctggcggagatccgcgcggccatccccaagcactgctgggtcaaggacccctggcgctccatggcctacgtgctgcgcgacgtcgtcgtcgtcctggggctcgccgcggccgccgcgcgcctcgacagctggctcgtctggccgctctactgggccgcgcagggcaccatgttctgggcgctcttcgtcctcggccacgactgtggacacgggagcttctcgaacaaccccaagctgaacagcgtggtcggccacatactccattcctccattcttgtcccctaccacggatggaggattagccacaggacgcaccatcaaaaccacggccacgttgagaaggacgagtcctggcacccgctaccagagaggctgtacaaaagcctggactttatgactaggaaattgcggttcaccatgccgttccccttgctcgcattcccgttatacttgttcgcaaggagtccagggaagtcaggatcacacttcaacccaagcagtgatttgttccaacctaatgaaaagaaggacatcataacatcaacggcatcctggctggccatggttggtgttctggctggtctcacctttctgatgggtcctgttacgatgctaaagctctacggagtcccatactttgtatttgttgcttggctggatatggttacatacttgcaccatcatggccacgaagacaagcttccctggtaccgtggacaggaatggagttatctgcgtggaggactgacgacgctcgaccgggactatggactgattaacaatatccaccatgacatcggaactcatgtcatccatcaccttttccctcaaatcccacattaccatctcattgaggcgaccgaggcagcaaaaccggttcttggcaagtactacaaagaaccaaagaagtcgggtcctctcccgtggcacctgtttggggtgctagcacaaagcttgaagcaagaccactatgttagcgacaccggagacgtagtgtactaccaaactgactcgaaaacgaacacctctgcacaaaaatctgattgacacagactatagaacgtagcgtattcttcatttttctcaggcgggctgtgcctgaagacctggccagcctcctgagacctctgattggtgtgtgtgtgaccgggttcgtcaattcaagaatgtaaggtggcgaagtattatcatgtatttgagtgagggtataattctttccaatggtcgaagtcggatgctgcttccgatgtaacgaactgtgattctttgggcaagaggtgtactattacagtaaagagtgaaaaaaaagagttagctacatgaaa

SEQ ID NO: 92407 - DNA, 831 bp, Zea Mays
atcccctcctcgtccgcaaccgtcgtcgctctgcctcccgccgtcgccgccgcagacgcagccagccacccaccgctcgcgcctcccaagcccttgagtaaatgctatatctaccgatgctccccactcctcttcccaaatcccaacgatcccccaaaccttcgcgacgcgcacaccagctcgccgtcggacgcaagcgctcacaggctgctgctgctccgtctcccgggcgccagctctgactccggacgcattacgtgaaggcatccatggcgcgcatgctctgctcccggtcagcggtcctggcgcgccgccttgggacccagccccagcacgacgtggttctgagccgccggcacaaccacactcgccagtgcgcagtgaaggttcttgaagaggacgccgcggggccttctgcacctgcaacagacgcctccgagcagtcccggcggttggaggaggcgatcgatagcgccatggcgcggatggccgagcccgactgggcgcccttccagcccgggacatcctacttcgttccgtcccggcccgccgacgcggccctgggggttctcgcgcttatcggccacgctggcagttcatgggctcctcgacagcgccgaggcacggactctttgccgacgtggtccgcgccgtcaccgccgcctcccgcgggtacccgtgctcgacctacttcatcgaaggtatctgactatttgggatatccacttcgctactcggatgtgctcaattctgaactgaaacacgtgcataagaacttctagaaatcagaacaatttcgagacattttatcattctgctttgtttttgtaa

SEQ ID NO: 92408 - DNA, 1459 bp, Zea Mays
caatatacagggcggttttgtcttaagccagcagctccccggccgatggcaataagctgcttcaacggcggcgccggctggccggagcccgtggtgcgcgtccaggctgtgtctgacacgtgcggcgacacgatccccgagcggtatgtgaagcccctgtcggagcggccccggctctcaccggcctccgatggcagcggcccgaatatcccagtcgtagacctgtcaatgctagacgtggacgcgacatccagcgccgtggcggcggcgtgccgggagtggggctttttccaggcagtgaaccacggcgtccgcccggagctgctgcgcggcgcgcgcgcggcgtggcgtggcttcttccggcagcccgcggaggtgcgcgagcgttacgcgaactcgccggcgacgtacgagggctacggcagccgcctcggcaccgccaagggcggcccgctggactggggcgactactacttcctccatctgctgccggcttccctcaagagccacgagaagtggccttccctgccttcctccctacggggggcaacggaggagtacggcgaggaagtgttgcagctgtgccggagggtgatgcggctgctctccagcgggctggggctggaagccgggagactgcaggcggcgttcggcggagagggcggcgaaggggcgtgcttgcgggtcaacttctacccgcagtgcccgcagccagagctgacgctgggcgtagcggggcactccgaccccggcggcatgaccatgctgctggtggacgaccacgtcaagggcctgcaggtaaggagccccgacggccagtggatcgtcgtcgaacccgtccccgacgccttcatcgtcaacgtcggcgaccagatccaggtgctgagcaacgcggcatacaagagcgtggagcaccgggtgacggtaagcgcggcagaggaccggctgtctatggctttcttctacaacccgcgaagcgacctgcccatcgcgccgatggcggagctggtggggcccgaccgcccggcgctgtacccggagatgaccttcgacgagtaccgtgtttttatccggcaacgtggtttggccggcaaggcgcagcttgagtccctgcaggtcaaagccaccgccggcggaggaggctgtagcgctgcagctgcctcctccaccagctagcatagctactgagctatatatatacatatatcatctgcagggccagccggtttcagttagctagctgtgcataatcaacgttggatcgaccagtgaataatatacaattatttgatgttaatttctacacaaatgttgtacgtgttgtacattcatcccatgtaactgagcagtaaatgtaagtgtgtggaactcccgttgctatttggtcttcgctcttgagttcaagagggaagtaggacaatgatccaaatcaatataatactactaaccatcgattatt

SEQ ID NO: 92409 - DNA, 2174 bp, Zea Mays
atgcccaaacgagacaaagcagcttccccgcgcgcttcgccaccccacacacctccgccggggacggacagcgaggccgaggaggcaaaccgtagaccaggcgggggcgtccgcggcggagatggggacgtacaagtgctgcatcttcttcacgcgcaggttcgcgctcggcgacacctccacgccggaggatgtccgcgcgctcttttccctctacgccggcggctcgccgtacatgcttgccgacgacctccgccgctacctcgccgcctggggaggtgctgacggcgaggtcccggagcagatcatcgaccgtatcctgcaggatcgcagccgcaccccgcggttcgggaggccggcgctcaccgttgacgacttcttacacttcctcttctccgaggacctcaacccgcccctccgctactccaaggtccatcaggacatgaacgcgccgctatcgcactattttatatacactggacacaactcgtatctgaccggtaatcaactcagcagtgactgcagtgatgttcccatcatcaaggcacttcaattaggtgttcgtgtaattgaattggacatatggccaaattcttgtaaagatgacattgatgttctccatggaaggacactcactgccccagtatcacttatcaaatgcttgagatccatcaaagaatatgcttttgttgcatctccctatcctgttattataactctagaagaccaccttacacctgatcttcaggagagagtagctaagatggtccttgaagtgtttggagacatcctgtattaccctgaatcgaaacatcttcaagaatttccttcacctgaagctctaaaggggcgtgtcatgctgtcaacaaaacccccaaaggagtatctcgaagcaaagggtgacaccatgaaggagaaagaaattgaggcccggattaaaaggggagaaagggaagcagcagcatggggagtagaagttccagatattcaggatgagatgcaagtcgccgacaaggatgaagatgagctattataccgcgaaagaggtgcagatggcgatgatgggaaggaaacaaagcatgttgcagcagagtacaaacacctcatcactatcaaggcaggaaagccaaagggtcctctcgtggatgccataaagaacgatccagacaaagttaggcgactcagtttgagcgagcaagagcttgcaaaagttgcagcacatcatggtcccaacattgtgagtttcacgcatagaaatatgctgagaatatacccaaagggaacccgcttcaattcatccaactataatccatttcttggctgggtgcatggtgctcaaatggtggcattcaatatgcagggatatggaagagcactttggttaatgcatggtttttataaagccaatggcggttgcggttacgtgaaaaaaccagatttcttgatgcaaacttgtccagatggaaaggtgtttgattcgaaggcagatttgccggtgaaggcaacattgaaggtagatggtcaaggtgtacatgggggaaggttggcaaaaggacttcaagcagacacatttcgactcatactcacctccagatttttatgtaaaggttggcatcgccggagttccattagactcggtgatgagaaagacgaaagccgtggaggacagctgggtgccggtgtgggaggaagagttcgccttcccgctgaccgtacctgagatcgcggtactccgcgtggaggtgcacgagcaggacgtgaacgaagacgacttcggcgggcagacggcgctgcctgtggcggagctgcggccagggatccgcgccgtgccgctgttcgaccacaaggggctcaagttcaagagcgtcaaggtcctcatgagcttcgagttcgcgtagcgtcccgcagcgtaaagcgattatgctgtcatgtgcgtcgatcgatgtttgtttgcaataagaatcgactttttttcctctgttattaggagtcccatgccgggttttttttgtacagatgcatttccgctaactatgtacaaacgggtcacctgacacgaacccagccaaagcacggtccatttgcatcagggcagccacgacacgacgtgccactagaccgtgcggagctgggttccgtacctgtctaacggtccagacatggcttgctgggtc

SEQ ID NO: 92410 - DNA, 1979 bp, Zea Mays
atgcccaaacgagacaaagcagcttccccgcgcgcttcgccaccccacacacctccgccggggacggacagcgaggccgaggaggcaaaccgtagaccaggcgggggcgtccgcggcggagatggggacgtacaagtgctgcatcttcttcacgcgcaggttcgcgctcggcgacacctccacgccggaggatgtccgcgcgctcttttccctctacgccggcggctcgccgtacatgcttgccgacgacctccgccgctacctcgccgcctggggaggtgctgacggcgaggtcccggagcagatcatcgaccgtatcctgcaggatcgcagccgcaccccgcggttcgggaggccggcgctcaccgttgacgacttcttacacttcctcttctccgaggacctcaacccgcccctccgctactccaaggtccatcaggacatgaacgcgccgctatcgcactattttatatacactggacacaactcgtatctgaccggtaatcaactcagcagtgactgcagtgatgttcccatcatcaaggcacttcaattaggtgttcgtgtaattgaattggacatatggccaaattcttgtaaagatgacattgatgttctccatggaaggacactcactgccccagtatcacttatcaaatgcttgagatccatcaaagaatatgcttttgttgcatctccctatcctgttattataactctagaagaccaccttacacctgatcttcaggagagagtagctaagatggtccttgaagtgtttggagacatcctgtattaccctgaatcgaaacatcttcaagaatttccttcacctgaagctctaaaggggcgtgtcatgctgtcaacaaaacccccaaaggagtatctcgaagcaaagggtgacaccatgaaggagaaagaaattgaggcccggattaaaaggggagaaagggaagcagcagcatggggagtagaagttccagatattcaggatgagatgcaagtcgccgacaaggatgaagatgagctattataccgcgaaagaggtgcagatggcgatgatgggaaggaaacaaagcatgttgcagcagagtacaaacacctcatcactatcaaggcaggaaagccaaagggtcctctcgtggatgccataaagaacgatccagacaaagttaggcgactcagtttgagcgagcaagagcttgcaaaagttgcagcacatcatggtcccaacattgtgagtttcacgcatagaaatatgctgagaatatacccaaagggaacccgcttcaattcatccaactataatccatttcttggctgggtgcatggtgctcaaatggtggcattcaatatgcagggatatggaagagcactttggttaatgcatggtttttataaagccaatggcggttgcggttacgtgaaaaaaccagatttcttgatgcaaacttgtccagatggaaaggtgtttgattcgaaggcagatttgccggtgaaggcaacattgaaggtcaaggtgtacatgggggaaggttggcaaaaggacttcaagcagacacatttcgactcatactcacctccagatttttatgtaaaggttggcatcgccggagttccattagactcggtgatgagaaagacgaaagccgtggaggacagctgggtgccggtgtgggaggaagagttcgccttcccgctgaccgtacctgagatcgcggtactccgcgtggaggtgcacgagcaggacgtgaacgaagacgacttcggcgggcagacggcgctgcctgtggcggagctgcggccagggatccgcgccgtgccgctgttcgaccacaaggggctcaagttcaagagcgtcaaggtcctcatgagcttcgagttcgcgtagcgtcccgcagcgtaaagcgattatgctgtcatgtgcgtcgatcgatgtttgtttgcaataagaatcgactttttttcctctgttatta

SEQ ID NO: 92411 - DNA, 1133 bp, Zea Mays
atgcccaaacgagacaaagcagcttccccgcgcgcttcgccaccccacacacctccgccggggacggacagcgaggccgaggaggcaaaccgtagaccaggcgggggcgtccgcggcggagatggggacgtacaagtgctgcatcttcttcacgcgcaggttcgcgctcggcgacacctccacgccggaggatgtccgcgcgctcttttccctctacgccggcggctcgccgtacatgcttgccgacgacctccgccgctacctcgccgcctggggaggtgctgacggcgaggtcccggagcagatcatcgaccgtatcctgcaggatcgcagccgcaccccgcggttcgggaggccggcgctcaccgttgacgacttcttacacttcctcttctccgaggacctcaacccgcccctccgctactccaaggtccatcaggacatgaacgcgccgctatcgcactattttatatacactggacacaactcgtatctgaccggtaatcaactcagcagtgactgcagtgatgttcccatcatcaaggcacttcaattaggtgttcgtgtaattgaattggacatatggccaaattcttgtaaagatgacattgatgttctccatggaaggacactcactgccccagtatcacttatcaaatgcttgagatccatcaaagaatatgcttttgttgcatctccctatcctgttattataactctagaagaccaccttacacctgatcttcaggagagagtagctaagatggtccttgaagtgtttggagacatcctgtattaccctgaatcgaaacatcttcaagaatttccttcacctgaagctctaaaggggcgtgtcatgctgtcaacaaaacccccaaaggagtatctcgaagcaaagggtgacaccatgaaggagaaagaaattgaggcccggattaaaaggggagaaagggaagcagcagcatggggagtagaagttccagatattcaggatgagatgcaagtcgccgacaaggcatggatcttaaattgtgctgcattttacgtttcttttacttaccctgcaagttctggtcatcagtatttactacatggtgctctggcactagcaggatgaagatgagctattatac

SEQ ID NO: 92412 - DNA, 207 bp, Zea Mays
atgttgggcgaggacgggcggtctgagggcatcgcggaggaggcgtctacgtttggtgccgaggaagaggtggttgaatacggtggagggggcacagcgaggaggaatgacctgatgaggctggccggtgctggggcaggaggaatcgaggatggaaaggagtgccatcgaaggaaggagtgcgacgaaaccgcgatcgagcgatga

SEQ ID NO: 92413 - DNA, 109 bp, Zea Mays
ttgctccaacataatcttattttcctcgtagctggacagtatgttatcagttggatagtccttaatttacaccgtgggaaatacacaatcacacgcttccgtaaccagg

SEQ ID NO: 92414 - DNA, 2492 bp, Zea Mays
tcccgccgggtcgcagacgcgaggtcccggagccgcgcgccccgcctataaaaaggcagccattctcgcctggttcccgcatcccagcacgtctcgtctccctcccaaaaaaaaaaaaaaaactgctcggttgctgctcctgctccgccgcgccggcatcatgtgtggcatcttagccgtgctcggttgctccgactggtctcaggcaaagagggctcgcatcctcgcctgctccagaaggttgaagcacaggggccccgactggtcgggcctctaccagcacgagggcaacttcctggcgcagcagcggctcgccgtcgtctccccgctgtccggcgaccagccgctgttcaacgaggaccgcaccgtcgtggtggtggccaatggagagatctacaaccacaagaacgtccggaagcagttcaccggcacacacaacttcagcacgggcagtgactgcgaggtcatcatccccctgtacgagaagtacggcgagaacttcgtggacatgctggacggggtgttcgcgttcgtgctctacgacacccgcgacaggacctacgtggcggcgcgcgacgccatcggcgtcaacccgctctacatcggctggggcagtgacggttccgtctggatcgcgtccgagatgaaggcgctgaacgaggactgcgtgcgcttcgagatcttcccgccgggccacctctactccagcgccggcggcgggttccggcggtggtacaccccgcactggttccaggagcaggtgccccggatgccgtaccagccgctcgtcctcagagaggccttcgagaaggcggtcatcaagaggctcatgactgacgtcccgttcggggtcctcctctccggcggcctcgactcctcgctcgtcgcctccgtcaccaagcgccacctcgtcgagaccgaggccgccgagaagttcggcaccgagctccactcctttgtcgtcggcctcgagggctctcctgacctgaaggccgcacgagaggtcgctgactaccttggaaccatccatcacgagttccacttcaccgtacaggacggcatcgacgcgatcgaggaggtgatctaccacgacgagacgtacgacgtgacgacgatccgggccagcacgcccatgttcctgatggctcgcaagatcaagtcgctgggcgtgaagatggtgctgtccggggagggctccgacgagctcctgggcggctacctctacttccacttcgcccccaacaaggaggagttccacagggagacctgccgcaaggtgaaggccctgcaccagtacgactgcctgcgcgccaacaaggccacgtcggcgtggggcctggaggtccgcgtgccgttcctcgacaaggagttcatcaacgtcgcgatgggcatggaccccgaatggaaaatgtacgacaagaacctgggccgcatcgagaagtgggtcatgaggaaggcgttcgacgacgacgagcacccttacctgcccaagcatattctctacaggcagaaagaacagttcagtgacggcgttggctacaactggatcgatggcctcaaatccttcactgaacagcaggtgacggatgagatgatgaacaacgccgcccagatgttcccctacaacacgcccgtcaacaaggaggcctactactaccggatgatattcgagaggctcttccctcaggactcggcgagggagacggtgccgtggggcccgagcatcgcctgcagcacgcccgcggccatcgagtgggtggagcagtggaaggcctccaacgacccctccggccgcttcatctcctcccacgactccgccgccaccgaccacaccggcggtaagccggcggtggccaacggcggcggccacggcgccgcgaacggcacggtcaacggcaaggacgtcgcagtcgcgatcgcggtctgacgagagtacgtgctcgcgcacctccctgctagcttctaccgggctgcagcctgcagcatgcactgtgcgagcacagccgatcagcgccaataaactggaggataagaacgactggtaggtgtgtgtgtgtgtcgtgcgtgcccaccggccatatcccggtgcggcagcacgtgctattgttacgtgttgtactgccgccagcgtacgtgtctgtgtgtctcgatcatatctgtacgtttttagatttagaagaaaaaaaaaaggcatgtccgtgtctgtatgtctggatcatatctgtacgttcttagatttagaagaaagaagaaaaacattatatacgtacgtccatgtctctatgtctggatcatatctgatttacagaaaaagtatatatgtccgtgtattcgtgcgagcaggcgtgacgcgctccgacaagcagtacagctcaggcattttccggccgagtgatatttgaacgcgacctctgaattgaactgccatacggattaatctacaattattatctggatttccgtgtacctgttcgcgcaagctgaaccttcga

SEQ ID NO: 92415 - DNA, 1213 bp, Zea Mays
atacacggagtatcaatctagactagaggagacgggtgaacgtggtgagcctccgcccagaatgcaaccctactagtgctagctttcggccgcgaaaaaacgtccccacccccacgtctcaactttatagccgccccctccccaccgccgcggccgccacgcgcagcagcaacccggtagcaggagcgcagccagcaagctcaggcccccagccctactgccaccgcgccgaacgacatggccgagccggcggagcaccgtccagctgaggaggaggaggccgcggcggccggcgaggatgaggacaccggcgcccaggtcgcgcccatcgtgaagctggaggaggtcgccgttaccactggagaggaggacgaggacgcgctcctggacatgaaggcgaagctctaccggttcgacaaggaggggaaccagtggaaagagcgcggcacaggcactgtgaagctgctcaagcacaaagacaccgccaaggtccgcctcgtcatgcgtcaggcgaagacgcttaagatctgcgccaaccatctcgtggtggcgacgactaagatgcaggagcacgcggggagcgacaagtcgtgcgtgtggcacgcgctggacttcgccgacggcgagctcaaagaggagatgtttgctatccgttttggatctgtcgagaattgcaagaagttcaaggacactgttgaagagatagctgaacagcaaggaaagagcgaggagaaagaaaatgatgaagtctccactgccgcttctgatttggcacagaagttaacagtggcagagcccagcaaggaggaaaatgcagagaaagaggaggctcctgcatccgatgataagaaggatgctaaagagtgaaggttgaaggcaaacaagggtcaaatggatgccattccattcatttcgtttccaaggttcagcttccccgcaaattttcattgtgttttctccgagatgaatgtttgtgttcggtgaaatcagagtcgtcagtcatctacatagcttttcttggttgatagactgttattttaagtcgcatgtttatctgggatggctggggtcagcatgtttgtacaattatttggagttgcttttggaatggtcgcggtttgatgagttgcctacagcatgagatgtcttttcgctccacttttatggttcattcgttctcaataatatgggatgctatacttgtgttgatcca

SEQ ID NO: 92416 - DNA, 2416 bp, Zea Mays
accgaaccaaacaacacacgtcaaagcggaaaacctcagaaaaccacaataaatcatcctcgtccaccactgcccccgctctgctgcaactccactcggcccggccgccctttccacccaccttgatcctctgatccgttggtgcttgaccgatccatggacacccatatcggatccgtgaacggggcggcgtcgaaccagacggttggctgcccggcgtcggcgccggggtgcccgatggcgtccacgccggcgcagcccgcggcgaccctgtcggcgggggaggcgtcgctggggcgccacctcgcgcgtcgcctcgtgcaggtcggcgtcaacgatgtattcgcggttccgggggacttcaacctcacgctgctcgaccacctgatcgccgagcccggcctgcgcctcgtcggctgctgcaacgagctcaacgccgggtacgccgccgacgggtacgcgcgcgcgcgcggcgtcggggcctgcgccgtcacgttcacagtcggggggctcagcgtgctcaacgccatcgcgggcgcctacagcgagaacctgcccgtcatctgcatcgccggcgggcccaactccaacgactacgggaccaaccgcatcctccaccacaccatcggcctccccgacttctcgcaggagctccgctgcttccagaccgtcacctgccatcaggcggtggtgaacaatctggatgacgcgcacgagcagatcgacacggccattgccacggcactgagggagagcaagcccgtgtacctcagcatcagctgcaacctccctgggctgcctcatcctaccttcagccgcgacccagtgcccttcttcctcacccccaggacgagcaacaagatggggctagaggctgcagtggaggcaactgtcgaattcctgaacaaggcggtgaagccagtccttgtcgccggccccaaactgcgtgtggcaaaggcaggaaaggcatttgtcgatatggtagatgccagtggctatgcctatgccgtgatgccatcggccaagggtcttgtgccagagactcacccccacttcatcggcacctactggggcgccgtcagcaccgccttctgtgcggagattgttgagtccgcagatgcctacctctttgcaggccccattttcaatgactacagctctgttggctactcattcctcctcaagaaggaaaaggccatcatcgtccagcctgagcgtgtgatagtggggaatgggccggcattcggatgtgtgatgatgaaagagttcttgtctgaattggctaagagggttaataagaacaccactgcctatgagaattacaagaggatctttgtacctgagggccagccgctggaaagcgagccaaatgagccactgcgagtgaatgtgctcttcaagcacgtccagaagatgttgactggtgatagcgcggtgattgctgagactggtgactcctggttcaactgccagaagcttaagctgccagaaggctgtgggtatgaattccaaatgcagtatggttcgattggatggtcagtgggtgcattgctcggatatgctcagggtgcgaaccacaagcgtgtgattgccttcattggtgatgggagcttccaggttacagcacaggatgtgtcaactatgctgcgatgtgagcagaacagcataatcttcctgatcaacaacggtgggtacacgattgaggtggaaatccatgacgggccatacaacgtcatcaagaactggaactacactggctttgtggacgccatccacaatggcttgggcaagtgctggacctccaaggtgaagagcgaggaggagctgacggctgccattgagacagcgctaggggagaagaaggactgcctgtgcttcatcgaggtgatcgcgcacaaggacgacaccagcaaagagctgctggaatggggctctagggtttctgccgccaactcccggccaccaaatcctcagtagaagtcccgcaggctccaagcctcggagtgccagtagtgatagtaagctgtagcacggtgggggctcaaccgaataacgtgaacgcattgccctttctgttacgtgttttattttattgtgtttctgtggtcgtatatctgttttgtgacgtgttccctgcttctcccatgtgaattccagaagaactatgagaaaattcaggttggttgtcactatttgtgctgcgttaccggtgtgattttacttgccaggtaaacatcgccggccagggagtgaatcatctagagattgggctataagtattgtagcgataattattctagtacggaagcaggagatggagcatgtactatccagatttttaataattgattgtgcacactgcgggggcacaacacatacaggtgcgcgccccggtgcgaatcgccatgtcactatc

SEQ ID NO: 92417 - DNA, 2413 bp, Zea Mays
accgaaccaaacaacacacgtcaaagcggaaaacctcagaaaaccacaataaatcatcctcgtccaccactgcccccgctctgctgcaactccactcggcccggccgccctttccacccaccttgatcctctgatccgttggtgcttgaccgatccatggacacccatatcggatccgtgaacggggcggcgtcgaaccagacggttggctgcccggcgtcggcgccggggtgcccgatggcgtccacgccggcgcagcccgcggcgaccctgtcggcgggggaggcgtcgctggggcgccacctcgcgcgtcgcctcgtgcaggtcggcgtcaacgatgtattcgcggttccgggggacttcaacctcacgctgctcgaccacctgatcgccgagcccggcctgcgcctcgtcggctgctgcaacgagctcaacgccgggtacgccgccgacgggtacgcgcgcgcgcgcggcgtcggggcctgcgccgtcacgttcacagtcggggggctcagcgtgctcaacgccatcgcgggcgcctacagcgagaacctgcccgtcatctgcatcgccggcgggcccaactccaacgactacgggaccaaccgcatcctccaccacaccatcggcctccccgacttctcgcaggagctccgctgcttccagaccgtcacctgccatcaggcggtggtgaacaatctggatgacgcgcacgagcagatcgacacggccattgccacggcactgagggagagcaagcccgtgtacctcagcatcagctgcaacctccctgggctgcctcatcctaccttcagccgcgacccagtgcccttcttcctcacccccaggagcaacaagatggggctagaggctgcagtggaggcaactgtcgaattcctgaacaaggcggtgaagccagtccttgtcgccggccccaaactgcgtgtggcaaaggcaggaaaggcatttgtcgatatggtagatgccagtggctatgcctatgccgtgatgccatcggccaagggtcttgtgccagagactcacccccacttcatcggcacctactggggcgccgtcagcaccgccttctgtgcggagattgttgagtccgcagatgcctacctctttgcaggccccattttcaatgactacagctctgttggctactcattcctcctcaagaaggaaaaggccatcatcgtccagcctgagcgtgtgatagtggggaatgggccggcattcggatgtgtgatgatgaaagagttcttgtctgaattggctaagagggttaataagaacaccactgcctatgagaattacaagaggatctttgtacctgagggccagccgctggaaagcgagccaaatgagccactgcgagtgaatgtgctcttcaagcacgtccagaagatgttgactggtgatagcgcggtgattgctgagactggtgactcctggttcaactgccagaagcttaagctgccagaaggctgtgggtatgaattccaaatgcagtatggttcgattggatggtcagtgggtgcattgctcggatatgctcagggtgcgaaccacaagcgtgtgattgccttcattggtgatgggagcttccaggttacagcacaggatgtgtcaactatgctgcgatgtgagcagaacagcataatcttcctgatcaacaacggtgggtacacgattgaggtggaaatccatgacgggccatacaacgtcatcaagaactggaactacactggctttgtggacgccatccacaatggcttgggcaagtgctggacctccaaggtgaagagcgaggaggagctgacggctgccattgagacagcgctaggggagaagaaggactgcctgtgcttcatcgaggtgatcgcgcacaaggacgacaccagcaaagagctgctggaatggggctctagggtttctgccgccaactcccggccaccaaatcctcagtagaagtcccgcaggctccaagcctcggagtgccagtagtgatagtaagctgtagcacggtgggggctcaaccgaataacgtgaacgcattgccctttctgttacgtgttttattttattgtgtttctgtggtcgtatatctgttttgtgacgtgttccctgcttctcccatgtgaattccagaagaactatgagaaaattcaggttggttgtcactatttgtgctgcgttaccggtgtgattttacttgccaggtaaacatcgccggccagggagtgaatcatctagagattgggctataagtattgtagcgataattattctagtacggaagcaggagatggagcatgtactatccagatttttaataattgattgtgcacactgcgggggcacaacacatacaggtgcgcgccccggtgcgaatcgccatgtcactatc

SEQ ID NO: 92418 - DNA, 2397 bp, Zea Mays
accgaaccaaacaacacacgtcaaagcggaaaacctcagaaaaccacaataaatcatcctcgtccaccactgcccccgctctgctgcaactccactcggcccggccgccctttccacccaccttgatcctctgatccgttggtgcttgaccgatccatggacacccatatcggatccgtgaacggggcggcgtcgaaccagacggttggctgcccggcgtcggcgccggggtgcccgatggcgtccacgccggcgcagcccgcggcgaccctgtcggcgggggaggcgtcgctggggcgccacctcgcgcgtcgcctcgtgcaggtcggcgtcaacgatgtattcgcggttccgggggacttcaacctcacgctgctcgaccacctgatcgccgagcccggcctgcgcctcgtcggctgctgcaacgagctcaacgccgggtacgccgccgacgggtacgcgcgcgcgcgcggcgtcggggcctgcgccgtcacgttcacagtcggggggctcagcgtgctcaacgccatcgcgggcgcctacagcgagaacctgcccgtcatctgcatcgccggcgggcccaactccaacgactacgggaccaaccgcatcctccaccacaccatcggcctccccgacttctcgcaggagctccgctgcttccagaccgtcacctgccatcaggcggtggtgaacaatctggatgacgcgcacgagcagatcgacacggccattgccacggcactgagggagagcaagcccgtgtacctcagcatcagctgcaacctccctgggctgcctcatcctaccttcagccgcgacccagtgcccttcttcctcacccccaggacgagcaacaagatggggctagaggctgcagtggaggcaactgtcgaattcctgaacaaggcggtgaagccagtccttgtcgccggccccaaactgcgtgtggcaaaggcaggaaaggcatttgtcgatatggtagatgccagtggctatgcctatgccgtgatgccatcggccaagggtcttgtgccagagactcacccccacttcatcggcacctactggggcgccgtcagcaccgccttctgtgcggagattgttgagtccgcagatgcctacctctttgcaggccccattttcaatgactacagctctgttggctactcattcctcctcaagaaggaaaaggccatcatcgtccagcctgagcgtgtgatagtggggaatgggccggcattcggatgtgtgatgatgaaagagttcttgtctgaattggctaagagggttaataagaacaccactgcctatgagaattacaagaggatctttgtacctgagggccagccgctggaaagcgagccaaatgagccactgcgagtgaatgtgctcttcaagcacgtccagaagatgttgactggtgatagcgcggtgattgctgagactggtgactcctggttcaactgccagaagcttaagctgccagaaggctgtggtatggttcgattggatggtcagtgggtgcattgctcggatatgctcagggtgcgaaccacaagcgtgtgattgccttcattggtgatgggagcttccaggttacagcacaggatgtgtcaactatgctgcgatgtgagcagaacagcataatcttcctgatcaacaacggtgggtacacgattgaggtggaaatccatgacgggccatacaacgtcatcaagaactggaactacactggctttgtggacgccatccacaatggcttgggcaagtgctggacctccaaggtgaagagcgaggaggagctgacggctgccattgagacagcgctaggggagaagaaggactgcctgtgcttcatcgaggtgatcgcgcacaaggacgacaccagcaaagagctgctggaatggggctctagggtttctgccgccaactcccggccaccaaatcctcagtagaagtcccgcaggctccaagcctcggagtgccagtagtgatagtaagctgtagcacggtgggggctcaaccgaataacgtgaacgcattgccctttctgttacgtgttttattttattgtgtttctgtggtcgtatatctgttttgtgacgtgttccctgcttctcccatgtgaattccagaagaactatgagaaaattcaggttggttgtcactatttgtgctgcgttaccggtgtgattttacttgccaggtaaacatcgccggccagggagtgaatcatctagagattgggctataagtattgtagcgataattattctagtacggaagcaggagatggagcatgtactatccagatttttaataattgattgtgcacactgcgggggcacaacacatacaggtgcgcgccccggtgcgaatcgccatgtcactatc

SEQ ID NO: 92419 - DNA, 2506 bp, Zea Mays
accgaaccaaacaacacacgtcaaagcggaaaacctcagaaaaccacaataaatcatcctcgtccaccactgcccccgctctgctgcaactccactcggcccggccgccctttccacccaccttgatcctctgatccgttggtgcttgaccgatccatggacacccatatcggatccgtgaacggggcggcgtcgaaccagacggttggctgcccggcgtcggcgccggggtgcccgatggcgtccacgccggcgcagcccgcggcgaccctgtcggcgggggaggcgtcgctggggcgccacctcgcgcgtcgcctcgtgcaggtcggcgtcaacgatgtattcgcggttccgggggacttcaacctcacgctgctcgaccacctgatcgccgagcccggcctgcgcctcgtcggctgctgcaacgagctcaacgccgggtacgccgccgacgggtacgcgcgcgcgcgcggcgtcggggcctgcgccgtcacgttcacagtcggggggctcagcgtgctcaacgccatcgcgggcgcctacagcgagaacctgcccgtcatctgcatcgccggcgggcccaactccaacgactacgggaccaaccgcatcctccaccacaccatcggcctccccgacttctcgcaggagctccgctgcttccagaccgtcacctgccatcaggcggtggtgaacaatctggatgacgcgcacgagcagatcgacacggccattgccacggcactgagggagagcaagcccgtgtacctcagcatcagctgcaacctccctgggctgcctcatcctaccttcagccgcgacccagtgcccttcttcctcacccccaggacgagcaacaagatggggctagaggctgcagtggaggcaactgtcgaattcctgaacaaggcggtgaagccagtccttgtcgccggccccaaactgcgtgtggcaaaggcaggaaaggcatttgtcgatatggtagatgccagtggctatgcctatgccgtgatgccatcggccaagggtcttgtgccagagactcacccccacttcatcggcacctactggggcgccgtcagcaccgccttctgtgcggagattgttgagtccgcagatgcctacctctttgcaggccccattttcaatgactacagctctgttggctactcattcctcctcaagaaggaaaaggccatcatcgtccagcctgagcgtgtgatagtggggaatgggccggcattcggatgtgtgatgatgaaagagttcttgtctgaattggctaagagggttaataagaacaccactgcctatgagaattacaagaggatctttgtacctgagggccagccgctggaaagcgagccaaatgagccactgcgagtgaatgtgctcttcaagcacgtccagaagatgttgactggtgatagcgcggtgattgctgagactggtgactcctggttcaactgccagaagcttaagctgccagaaggctgtgggtgagcattctgatggtactctgttctgtttgtttctcttgaactctgttctgttcctgggttcccatgagaactgtctgcatgctgcaggtatgaattccaaatgcagtatggttcgattggatggtcagtgggtgcattgctcggatatgctcagggtgcgaaccacaagcgtgtgattgccttcattggtgatgggagcttccaggttacagcacaggatgtgtcaactatgctgcgatgtgagcagaacagcataatcttcctgatcaacaacggtgggtacacgattgaggtggaaatccatgacgggccatacaacgtcatcaagaactggaactacactggctttgtggacgccatccacaatggcttgggcaagtgctggacctccaaggtgaagagcgaggaggagctgacggctgccattgagacagcgctaggggagaagaaggactgcctgtgcttcatcgaggtgatcgcgcacaaggacgacaccagcaaagagctgctggaatggggctctagggtttctgccgccaactcccggccaccaaatcctcagtagaagtcccgcaggctccaagcctcggagtgccagtagtgatagtaagctgtagcacggtgggggctcaaccgaataacgtgaacgcattgccctttctgttacgtgttttattttattgtgtttctgtggtcgtatatctgttttgtgacgtgttccctgcttctcccatgtgaattccagaagaactatgagaaaattcaggttggttgtcactatttgtgctgcgttaccggtgtgattttacttgccaggtaaacatcgccggccagggagtgaatcatctagagattgggctataagtattgtagcgataattattctagtacggaagcaggagatggagcatgtactatccagatttttaataattgattgtgcacactgcgggggcacaacacatacaggtgcgcgccccggtgcgaatcgccatgtcactatc

SEQ ID NO: 92420 - DNA, 545 bp, Zea Mays
ataatcgtgttctggttcccagaaaaaaaaagacagggaagggagctccgtcgcttggggagagaagactgagatcgtgattttcctgcgtcaggctttggtggggacctggtgatgttcgccagagccttctgaaccgagacatagcatcttcacgccggtctagcggtcgggagggtggaattcattgccgtggttctctgccatcacaaatccgcccctcgacaagcaagctgtccgctcgggcgtctggatgattgatgcagcctggtgcatcgtggtggcatgtggagtctgctcagcgcccagtaaaccagggggcctggacgacgactccatggacgaactgtgcagctgcggcaatggagggccaccgctccctctcctcctcagtctgcgcccacccaccgctatgggatctggtcgcgcctcctctggtgcacagccgccctattgtcgccgccgcggggctctactggcggccatcgtcacccatcggccatgccgtagcgagctcgttgccgggccgggccagagaaatttga

SEQ ID NO: 92421 - DNA, 1802 bp, Zea Mays
ggaagtaaacggcggcgacaggcggctgcgcgtcgccgcggcgacatgacgtcagttaggcacccgatcgacaagttgtcgctgcagcgaatccacccacgaagggcagcggcgcgacccaggtacttatggcataatttacatatgtcttgccgtcgttcttgtgtgggtgatctacggtgtgtttggttagccggttggccttaatccggcgtgagagtcaattcggaatgaggtggtctggatggactctttcctcagattaacatgtcactagtgctcgttcatgacggacagctagcgtctcaaaccaaacaacgtcataggctgggatggttcggcagactatcccgttctgcaaagtgcaaaccaaacggaccaggaaccgattctgcatttctatggcttttttgtgtcatgcttcgcgcatgtgttggtgatcgaccaagacctaacgatctcaactctcgagggagaatgttggtgaattaggtttgtgctcgactgctcatatgtacgattcgtttagaaatttttcagagcctcaacttgtatccaagagatcagcacctgatgccaaataaattaaactttagaagatgcagcaccatcatcaagtcttggtggagacccttggagccaacctcggcaaaacttgataatctatgtgtgtcatatttatctatgtgtgatctcgacttttatttgaacccacgtgaactcggatcactctgacttgcttgcattagtatttagttcctgaaatgcctttctgcatccttcgtcaaagccaccagcaagctgcaaatttgtttcggtgcagtcagttaattaattagtttctgcaagtgtcgttgcgaattaattcgtggttcggaacaagttacctgatgtatgcggaaggcaaagcggacaccttgcagaagcagctcctcctcattcgcaaatggatctgacttcagtgtcttcacaatgcggttcatgtactcttttgcaagcttcaaggaagccatctttagctgtttaatgtaggatgggcatgcaccatgtgtcatatgtctattattgtatttggactccacacttttgtgaaactaaatgcctctcctttattgcgagttgtgacagaacatactgtgaaaggaagacatacttggcttatgactccagagtcgagcatccattcccatggtatcttaaggtccttatatcttccgcttgcactgtcccttactcgctcagtgttatgaataccttgttcaattctacaacaagggaaagcacaattaggtgaatgttgatttcttgatttagtatcgttccgtagaatttaaaagtagaaggtattcagcattttttattctgttaaatacatttcagtcatcttactcacttgtcctgcaatgcctgcatgcgcttgagagccataggtgtggccactctcctgtcatcatggaaggatgatgcttccgactctatgttcttcagatcgcggtagttgaatgctgcttctctcaaggcatctgctttcttctcgggccagttggggaattgttttagcactgctctttcatccacaagccatgtgcaggtaactaaatcgacgtacgggatggcctaagatgatagagctcctttaccagccagagcgaggggagacaccttttgctaataacgggcaagtaaaagttttaaataataggaagaaaaagaaacgaagggaaagctgacaaaacagagaataaaatggttaaatcctatgtgttttacttctggcatgtgcttagtattcgtttgccttt

SEQ ID NO: 92422 - DNA, 104 bp, Zea Mays
tttttcttcttttttctctttttctggttttcctctcttttttctcccctatttttgtatagccgttgttcttggtcttctttagacctttctctctacttaat

SEQ ID NO: 92423 - DNA, 592 bp, Zea Mays
ttttcttcttctcatttcttgttctcaacatctttttagaatgaaaatcctaactctaattgggttgaaagtatatatatataagcggagtaattgaaccaagaccattacactaagagtatacaattaaatacacatagactagccccgaaaccctaacaatactctaacaaatatcaccaagatcacaaagaccaagggccaggcaggcgcgcagcaaaatataaatatttttgaaagggacttcgttactggaaaaactgtctttggcgcgagctttggcctgaataaacttgctcagaactcggatctgaattaaacatgttcagaactcatgaattaagagtacacactacacaaccagccaaaacttgtaagtcaaatggcaaatcatctatgagctaaacctagtggtgtgacattccacctcgaactatagcttataattgattaatgttgtgatacgtatatcatcacaaaatttatttgtgctaccattgcttttagaaggcgagctccatttattatttcttacaaccccgctgtgggatggattgcatccatgagtttgtaccgtttctcttgaacacca

SEQ ID NO: 92424 - DNA, 2108 bp, Zea Mays
gccgcctcctttccctgtcttccgccccaccagaccagaccagaccaccaccctccggctgctacttttgcgcctccaccgcccatccccaaagccccaaccgactgcgcgtcccctctcctcccaaacgcattccatcctctctcctccagtgacagcctccggcgcctcctcgggctgccatccagcccgtgccactgccactgccactgcacttgctgtgccgacccgagctgcggtcgagtgagcaatggagcggcggcggcggcggccaccgaggctgccgctccttgtgttcgtcttagttgccaccacttgccccctcgggagctcagggattggaagcttcggagtcggtgcggagagcaatggagcttcgtctagttttaggaccaggagtctgctgcagattggagacagaaacgaagatggcctatttcatctgccacatacacgggctctcacgcacaagagcagatctcatagaaaagttccaacacccgcaccagcaccagagtccgctccagcaccctcaccatccatgtctccaccggacagctcaccgtctccgtcaccacatggttcacacccaatgccacgccaatcaacttcacatcgtcatccatccataacacctccacatttggtcaggcctgggcctaggcaagatggaaatgatcctttggtttatactccagctcattctcggcataaacatttttggacaacctatggtttagttgcagcagggattgcggttttccttttggtatcagcagctagtattctctgcttccgagctaagaaaatgggaaccgtaaggccatgggcgacaggtctaagtggacaattgcagaaagcttttgtaactggtgtaccttcgctgaaacgatcagagctggaaacggcatgcgaggatttcagcaacataattggttctacctctacctgcatgctgtacaagggaactttatctagtggagttgaaatcgcagtggcctcaagcttggtaacatctgcaaaggattggtcgaaagaaaatgaatcgcagtacaggaaaaagataacaaacttgtccaaagtaagtcacaagaattttatgaacttgcttggctactgtgaggaagagcatccctttaccagagtgatggtatttgaatatgctccaaatgggacactttttgagcatctccatgtcagggaagcagagaagcttgactggatggcacggctcaggatatccatgggcattgcttactgtcttgagcacatgcatcagctgcaaacaccagctgcgctgaggaactttgactcgactacagtataccttactgatgacttcgccgcaaaggtctcggatcttgaattttggaatgacgcaaagggacataattctactacaaacaatgaactggctttctccccagacatggaggacattgtgcgcaagtacggcatggtgttgttggagatattgaccggaagagttccttcctccgaggatgacggaccactggaaaattgggtgtctcgctattttgaaggcgggatgcgtcttgaggagctgattgaccctagcatcggcttcttccccgaggacactgcacgagccctttgtgaggttgtgaggtcctgcatcgatcgggatccaaagaagagaccgcagatgaaagaggtcgcagctcggatgagagagatcaccgcgctagggcctgatggggcaactccgaaggtgtcaccgctctggtgggctgagcttgagattatgacttctgagagctgagttcgacgcatgccagatgatattgtttctcctagtgtgactgagaattctttgagctactactggctgctgctaatcttgtttgtggaagtggtgattaggtagaatttgttatgtgtgcagaattgcatatagggattggtattgtacttgtacatgtcaagaaggtttaacacacaacatactgatacgcaggcattccagccaggtgagcaatagaaagcatgtgtggcttgtttttgctgcaatagctcttttgtcaagcaatcgccactggtattgccttgttctactgaggttgaaattgcaaatccttttggttcta

SEQ ID NO: 92425 - DNA, 2075 bp, Zea Mays
gccgcctcctttccctgtcttccgccccaccagaccagaccagaccaccaccctccggctgctacttttgcgcctccaccgcccatccccaaagccccaaccgactgcgcgtcccctctcctcccaaacgcattccatcctctctcctccagtgacagcctccggcgcctcctcgggctgccatccagcccgtgccactgccactgccactgcacttgctgtgccgacccgagctgcggtcgagtgagcaatggagcggcggcggcggcggccaccgaggctgccgctccttgtgttcgtcttagttgccaccacttgccccctcgggagctcagcagggattggaagcttcggagtcggtgcggagagcaatggagcttcgtctagttttagaaattccaggaccaggagtctgctgcagattggagacagaaacgaagatggcctatttcatctgccacatacacgggctctcacgcacaagagcagatctcatagaaaagttccaacacccgcaccagcaccagagtccgctccagcaccctcaccatccatgtctccaccggacagctcaccgtctccgtcaccacatggttcacacccaatgccacgccaatcaacttcacatcgtcatccatccataacacctccacatttggtcaggcctgggcctaggcaagatggaaatgatcctttggtttatactccagctcattctcggcataaacatttttggacaacctatggtttagttgcagcagggattgcggttttccttttggtatcagcagctagtattctctgcttccgagctaagaaaatgggaaccgtaaggccatgggcgacaggtctaagtggacaattgcagaaagcttttgtaactggtgtaccttcgctgaaacgatcagagctggaaacggcatgcgaggatttcagcaacataattggttctacctctacctgcatgctgtacaagggaactttatctagtggagttgaaatcgcagtggcctcaagcttggtaacatctgcaaaggattggtcgaaagaaaatgaatcgcagtacaggaaaaagataacaaacttgtccaaagtaagtcacaagaattttatgaacttgcttggctactgtgaggaagagcatccctttaccagagtgatggtatttgaatatgctccaaatgggacactttttgagcatctccatgtcagggaagcagagaagcttgactggatggcacggctcaggatatccatgggcattgcttactgtcttgagcacatgcatcagctgcaaacaccagctgcgctgaggaactttgactcgactacagtataccttactgatgacttcgccgcaaaggtctcggatcttgaattttggaatgacgcaaagggacataattctactacaaacaatgaactggctttctccccagacatggaggacattgtgcgcaagtacggcatggtgttgttggagatattgaccggaagagttccttcctccgaggatgacggaccactggaaaattgggtgtctcgctattttgaaggcgggatgcgtcttgaggagctgattgaccctagcatcggcttcttccccgaggacactgcacgagccctttgtgaggttgtgaggtcctgcatcgatcgggatccaaagaagagaccgcagatgaaagaggtcgcagctcggatgagagagatcaccgcgctagggcctgatggggcaactccgaaggtgtcaccgctctggtgggctgagcttgagattatgacttctgagagctgagttcgacgcatgccagatgatattgtttctcctagtgtgactgagaattctttgagctactactggctgctgctaatcttgtttgtggaagtggtgattaggtagaatttgttatgtgtgcagaattgcatatagggattggtattgtacttgtacatgtcaagaaggtttaacacacaacatactgatacgcaggcattccagccaggtgagcaatagaaagcatgtgtggcttgtttttgctgcaatagctcttttgtcaagcaatcgccactggtat

SEQ ID NO: 92426 - DNA, 1956 bp, Zea Mays
gccgcctcctttccctgtcttccgccccaccagaccagaccagaccaccaccctccggctgctacttttgcgcctccaccgcccatccccaaagccccaaccgactgcgcgtcccctctcctcccaaacgcattccatcctctctcctccagtgacagcctccggcgcctcctcgggctgccatccagcccgtgccactgccactgccactgcacttgctgtgccgacccgagctgcggtcgagtgagcaatggagcggcggcggcggcggccaccgaggctgccgctccttgtgttcgtcttagttgccaccacttgccccctcgggagctcagggattggaagcttcggagtcggtgcggagagcaatggagcttcgtctagttttaggaccaggagtctgctgcagattggagacagaaacgaagatggcctatttcatctgccacatacacgggctctcacgcacaagagcagatctcatagaaaagttccaacacccgcaccagcaccagagtccgctccagcaccctcaccatccatgtctccaccggacagctcaccgtctccgtcaccacatggttcacacccaatgccacgccaatcaacttcacatcgtcatccatccataacacctccacatttggtcaggcctgggcctaggcaagatggaaatgatcctttggtttatactccagctcattctcggcataaacatttttggacaacctatggtttagttgcagcagggattgcggttttccttttggtatcagcagctagtattctctgcttccgagctaagaaaatgggaaccgtaaggccatgggcgacaggtctaagtggacaattgcagaaagcttttgtaactggtgtaccttcgctgaaacgatcagagctggaaacggcatgcgaggatttcagcaacataattggttctacctctacctgcatgctgtacaagggaactttatctagtggagttgaaatcgcagtggcctcaagcttggtaacatctgcaaaggattggtcgaaagaaaatgaatcgcagtacaggaaaaagataacaaacttgtccaaagtaagtcacaagaattttatgaacttgcttggctactgtgaggaagagcatccctttaccagagtgatggtatttgaatatgctccaaatgggacactttttgagcatctccatgtcagggaagcagagaagcttgactggatggcacggctcaggatatccatgggcattgcttactgtcttgagcacatgcatcagctgcaaacaccagctgcgctgaggaactttgactcgactacagtataccttactgatgacttcgccgcaaagacatggaggacattgtgcgcaagtacggcatggtgttgttggagatattgaccggaagagttccttcctccgaggatgacggaccactggaaaattgggtgtctcgctattttgaaggcgggatgcgtcttgaggagctgattgaccctagcatcggcttcttccccgaggacactgcacgagccctttgtgaggttgtgaggtcctgcatcgatcgggatccaaagaagagaccgcagatgaaagaggtcgcagctcggatgagagagatcaccgcgctagggcctgatggggcaactccgaaggtgtcaccgctctggtgggctgagcttgagattatgacttctgagagctgagttcgacgcatgccagatgatattgtttctcctagtgtgactgagaattctttgagctactactggctgctgctaatcttgtttgtggaagtggtgattaggtagaatttgttatgtgtgcagaattgcatatagggattggtattgtacttgtacatgtcaagaaggtttaacacacaacatactgatacgcaggcattccagccaggtgagcaatagaaagcatgtgtggcttgtttttgctgcaat

SEQ ID NO: 92427 - DNA, 2039 bp, Zea Mays
gccgcctcctttccctgtcttccgccccaccagaccagaccagaccaccaccctccggctgctacttttgcgcctccaccgcccatccccaaagccccaaccgactgcgcgtcccctctcctcccaaacgcattccatcctctctcctccagtgacagcctccggcgcctcctcgggctgccatccagcccgtgccactgccactgccactgcacttgctgtgccgacccgagctgcggtcgagtgagcaatggagcggcggcggcggcggccaccgaggctgccgctccttgtgttcgtcttagttgccaccacttgccccctcgggagctcagggattggaagcttcggagtcggtgcggagagcaatggagcttcgtctagttttagaaattccaggaccaggagtctgctgcagattggagacagaaacgaagatggcctatttcatctgccacatacacgggctctcacgcacaagagcagatctcatagaaaagttccaacacccgcaccagcaccagagtccgctccagcaccctcaccatccatgtctccaccggacagctcaccgtctccgtcaccacatggttcacacccaatgccacgccaatcaacttcacatcgtcatccatccataacacctccacatttggtcaggcctgggcctaggcaagatggaaatgatcctttggtttatactccagctcattctcggcataaacatttttggacaacctatggtttagttgcagcagggattgcggttttccttttggtatcagcagctagtattctctgcttccgagctaagaaaatgggaaccgtaaggccatgggcgacaggtctaagtggacaattgcagaaagcttttgtaactggtgtaccttcgctgaaacgatcagagctggaaacggcatgcgaggatttcagcaacataattggttctacctctacctgcatgctgtacaagggaactttatctagtggagttgaaatcgcagtggcctcaagcttggtaacatctgcaaaggattggtcgaaagaaaatgaatcgcagtacaggaaaaagataacaaacttgtccaaagtaagtcacaagaattttatgaacttgcttggctactgtgaggaagagcatccctttaccagagtgatggtatttgaatatgctccaaatgggacactttttgagcatctccatgtcagggaagcagagaagcttgactggatggcacggctcaggatatccatgggcattgcttactgtcttgagcacatgcatcagctgcaaacaccagctgcgctgaggaactttgactcgactacagtataccttactgatgacttcgccgcaaaggtctcggatcttgaattttggaatgacgcaaagggacataattctactacaaacaatgaactggctttctccccagacatggaggacattgtgcgcaagtacggcatggtgttgttggagatattgaccggaagagttccttcctccgaggatgacggaccactggaaaattgggtgtctcgctattttgaaggcgggatgcgtcttgaggagctgattgaccctagcatcggcttcttccccgaggacactgcacgagccctttgtgaggttgtgaggtcctgcatcgatcgggatccaaagaagagaccgcagatgaaagaggtcgcagctcggatgagagagatcaccgcgctagggcctgatggggcaactccgaaggtgtcaccgctctggtgggctgagcttgagattatgacttctgagagctgagttcgacgcatgccagatgatattgtttctcctagtgtgactgagaattctttgagctactactggctgctgctaatcttgtttgtggaagtggtgattaggtagaatttgttatgtgtgcagaattgcatatagggattggtattgtacttgtacatgtcaagaaggtttaacacacaacatactgatacgcaggcattccagccaggtgagcaatagaaagcatgtgtggcttgtttttgctgca

SEQ ID NO: 92428 - DNA, 2033 bp, Zea Mays
gccgcctcctttccctgtcttccgccccaccagaccagaccagaccaccaccctccggctgctacttttgcgcctccaccgcccatccccaaagccccaaccgactgcgcgtcccctctcctcccaaacgcattccatcctctctcctccagtgacagcctccggcgcctcctcgggctgccatccagcccgtgccactgccactgccactgcacttgctgtgccgacccgagctgcggtcgagtgagcaatggagcggcggcggcggcggccaccgaggctgccgctccttgtgttcgtcttagttgccaccacttgccccctcgggagctcagcagggattggaagcttcggagtcggtgcggagagcaatggagcttcgtctagttttaggaccaggagtctgctgcagattggagacagaaacgaagatggcctatttcatctgccacatacacgggctctcacgcacaagagcagatctcatagaaaagttccaacacccgcaccagcaccagagtccgctccagcaccctcaccatccatgtctccaccggacagctcaccgtctccgtcaccacatggttcacacccaatgccacgccaatcaacttcacatcgtcatccatccataacacctccacatttggtcaggcctgggcctaggcaagatggaaatgatcctttggtttatactccagctcattctcggcataaacatttttggacaacctatggtttagttgcagcagggattgcggttttccttttggtatcagcagctagtattctctgcttccgagctaagaaaatgggaaccgtaaggccatgggcgacaggtctaagtggacaattgcagaaagcttttgtaactggtgtaccttcgctgaaacgatcagagctggaaacggcatgcgaggatttcagcaacataattggttctacctctacctgcatgctgtacaagggaactttatctagtggagttgaaatcgcagtggcctcaagcttggtaacatctgcaaaggattggtcgaaagaaaatgaatcgcagtacaggaaaaagataacaaacttgtccaaagtaagtcacaagaattttatgaacttgcttggctactgtgaggaagagcatccctttaccagagtgatggtatttgaatatgctccaaatgggacactttttgagcatctccatgtcagggaagcagagaagcttgactggatggcacggctcaggatatccatgggcattgcttactgtcttgagcacatgcatcagctgcaaacaccagctgcgctgaggaactttgactcgactacagtataccttactgatgacttcgccgcaaaggtctcggatcttgaattttggaatgacgcaaagggacataattctactacaaacaatgaactggctttctccccagacatggaggacattgtgcgcaagtacggcatggtgttgttggagatattgaccggaagagttccttcctccgaggatgacggaccactggaaaattgggtgtctcgctattttgaaggcgggatgcgtcttgaggagctgattgaccctagcatcggcttcttccccgaggacactgcacgagccctttgtgaggttgtgaggtcctgcatcgatcgggatccaaagaagagaccgcagatgaaagaggtcgcagctcggatgagagagatcaccgcgctagggcctgatggggcaactccgaaggtgtcaccgctctggtgggctgagcttgagattatgacttctgagagctgagttcgacgcatgccagatgatattgtttctcctagtgtgactgagaattctttgagctactactggctgctgctaatcttgtttgtggaagtggtgattaggtagaatttgttatgtgtgcagaattgcatatagggattggtattgtacttgtacatgtcaagaaggtttaacacacaacatactgatacgcaggcattccagccaggtgagcaatagaaagcatgtgtggcttgtttttgctgca

SEQ ID NO: 92429 - DNA, 3673 bp, Zea Mays
aaaccgacccgcctggccacgagtccacgactgttgtatatgcatctcatcagcttggcctccaagtcgggaggaaggccgaaggggcgacccgcggccgccaccgcgaccgctgcgcgaaccctacccgccactccgatcgccaccgctggggttctcgatatatgcttacgacgaaacgaagagagcggagggagccaaggacggcggtgacgctgtcgtgaagaaggctcggggtgggggaatcggcggtggcggaagagatggtgccgaggtcggatgtgggcggcggtgggagcagcaatgcgagtggggtggtggagatcgacgaggacctgcacagcaggcagctcgctgtgtacggaagggagacaatgcggcagctctttgcctcgaacgtgctcatctccggccttaacgggctaggggccgagatcgcaaagaatcttgctctagctggtgttaaatctgttaccctacatgatactggaaatgtggaaatgtgggacctatcaggcaatttctttctatctgaggatgacatcgggaagaacagggctgttgcttgtgttgcaaagcttcaagaacttaacaatgctgttctcatatataccctaacagaagaattgaccactgagcaccttccaaagttccaagtggttgttttcactgacattagtttggacaaggcatttgagttcgatgattattgtcgtaatcagcagcctccaatttcctttatcaagacagaagtccgtggactttttggtagtgtgttttgtgactttgggcctgaattcagtgttcttgatgtcgacggtgaagatgcacgtactggcataattgcatccatctccatcaccactgacaatcgtacaatggtgtcctgtgttgatgatgagcgccttgattttcaggatggtgatcttgttgttttctcagaggtccagggtatgacagaactgaatgatggcaagccaaggacagtaatgtgcgcaggaccattttccttttgcatcgaggatacaagtaactttggcacttatacaaaaggtggaattgttacacaggtgaaagaacggaagatcttgaagtttaagagtttgagagattcgattagagaacctgggaatttccctctaagtgattgttcaaagtttactcgccctcctctgcttcattttgcatttatagctttggataaatttaggaaagagtttggacgcttccctggtgttgcttgtggtctggatgcccaaaggtttgtggagttcactgcttctatcaatgaagccacaattgattacaagatagaagatgagcttgatgagaatttgttgcggctttttgctagtggttctaaagctgtcctgaacccaatggctactatgtttggtggaattgtcagtcaagaagctgtgaaggcatgttctgggaaatttcatccactgtaccggttcttctactttgattcatccgaatctctgccaactcaccaattggaccctaaagacctgaagccattgaatagtcgctatgatgctcagatttctgtttttggctctaagcttcagaaaaaactgcgggatgccaatgtctttgttgtgggatctggtgctcttggatgtgaatttttaaagaacctagctttaatgggagtgtcttgcagccgtaaagggaaaattactataacagatgatgatgtcatcgagaaaagtaacttgagtcgccaatttctgttccgtgattggaatattggacatcctaaatctacagtagctgccacagctgctagtgctatcaattcctgcctgcacattgatgctctccagaaccgtgcctgtctagagaccgagcatgtgttccatgatgcattctgggagatccttgatgttgtcattaatgcacttgataatgttaatgctaggatgtacatggacatgagatgtttgtacttccagaaaccactcctggaatctggaacactgggtacaaaatgtaacacgcaagtggtaattcctcaccttactgaaaattatgggacttcacgagaccctcctgagaagcaggcacccatgtgcacagtccattcatttccacacaatattgaccattgtctaacatgggcccgctcagagtttgagggtttgctcgagaagactccaaaggaagtcaactcttttctgtctaatcccgctcaatatgctgcctccatgaaaaaggcaggtgatgctcaggccagggagttgcttgagcacgtatgtgaatgccttgagaaggagtgttgtggaacatttgacgattgcataacgtgggcaagactgaaatttgaagattacttctccaatcgtgtgaagcagctaacattcacgtttcctgaagatgctgccactagcatgggagcccatttctggtgtgctccaaagcgtttccctcaccctctggaattttcagctgctgattcatcacacattcagtttataatgtctgcttccatattgagggcattgtcttttggaatctctatacctgattgggcaaaggacactgataatctggctgatgcagtcagtaaagttgcagtacctgaatttaagccaaagagcggggtgaagattgagacagacgtgaaggccgaaaacatctccagtgcctcagttgatgacgctgctgttatcgaagatcttttaagcaggctgaaagcatgtaccaagaaactacctccgagattccaaatgaaacctattcagtttgagaaggatgatgatacaaatttccacatggacttaattgctggtcttgcaaatatgcgtgccaggaactatggcatccaagaggttgacaagctgaaggcaaaaattattgcaggaaggatcatcccagctattgcaacttcaactgccatggcgacaggactagtgtgccttgagctttacaaagttctggccagagggcacccaatcgaagactaccgcaatacatttgctaacctggccctaccgatgctcaccacatctgaacctcttccccccactgtgatcaagcatggagatatgacgtggaccgtatgggatcggtggtctatcgagggagacatcacagttgcagagctcctgaagtggttaagcgacaagggcctgagtgcgtacagtgtctcctgcggcacatcgttgctctacaacataatgttcacaaggcacaaggatcgactgagcaagaagatcagagacgtagccaaggaggtggcaaaggtagacattccagaatacaggaagcatctggatgtcgtcgttgcttgtgaggatgacaacgggaaagatgtcgacatccctcttatctccatttatttccggtaggttgcactgtggaaagagttgaatgggaaaaaagagggtcccgtgaaaaagagatttgggtagattcataagttctgtcaataatattctctctcttgtaactagaaatcggtagcgaagtgatcacagctggagttgcttgtggtgcgtctccttacggttgtgtacgagtgcttggggtcctgctgttgcatgccaactatttgcaggtgtgcaatgtgatgtggatatttttgatgaatgaatcttcggagcttcagaatatatttacgcagcacttcactgcaatcgtcaatgtcagatagcaatttcagtct

SEQ ID NO: 92430 - DNA, 2517 bp, Zea Mays
tgccttggcccatggcccatcgtccatggacatggaccagaggccctcacgctcacgccttcctagcacgctggcattggtagtactacaaaaacaggcgtcgtttttctttgcctccctccccaccttgtctggctcccttcttcgctctccatgagctgagcaaggctgggcagcaacacggcgacggagaaaaatctcttccctggctcagagattcccccacaagaccacggcatttccccttgctactgaccaaacatcgcagccttttctttttgcgatttttcttcacattttgtagacaccaacgccccttccttcagtgttctgaatataaataaatacagtagattcatccagcagaaaatacagaactctcggtttgttctgatcactcggttccatctcccaaagcgaccccgccgccagtagatccatccggcaagaactcggttctgctccgtccttctgccgtgcagaaacgatcccgccgccttcagtagcggtagcagaaagccctatcaagcgagtgaagactcagcagcaggcaaagaggtcgagtctccagcgatggcggcggcgctggagtgctggtcggggcggccgagcaccgacgaggagatggtggagcaggtcctcatgaagccccacggccgttcagacgactccctcccgacctgcgccgactctgcctccgccggcgagccgacgtcggcgcccgcgccgcccaaccccaagaagtggcagcggctgggccgcaactttgccggcgccatcgccgcgttcaagaacacgctgagcctggatggcggcggcctcccccgcgacccctcgcctcgggccgagaagccgccgccgctcctcctccgtggcctcgcgcagctctactcccgcggcgccgccgccaaccagcagctgccggagaagctcgtagctgacctccgccgccacttcgacgctctccccaacagctacgcacaggcaggatttgacatgaaagatgtcctcttgcatgcccgccttgtagagcaggcgaccggcgaggatcagcctgcggtgaacattgaggaagtccatggcagaggagctggtgatgaaggcactgttttccagctaacatttgcttgcactgccccgctctcgtggcagtcaatgtcaggatcactagacagcccttcgttctgctgcaagaagatccagatctttgagaagagaggtctgacacttggtgtcgtcatgatacttgtgcagactgggaacgaggcgctcttcaagaaccgggttgagtctgcgctgaaatcggtagcaaagaagcaaaggaagaacagtggtggtggtgtgaagctgccattcgggctctgcggttgccaggaagaaggatcgagaaacttcgatgaggagtcgatgtttgatccggacgatggccaggtactcgacaatgagccggcgcgcaggccacagctacccactcgcctaccgcagtcatcagtcttcgtctcggtagatgaatggcagaccatccgctctggtggcgaggagctcggtcgctggatgctgcgttccgaggagatcgagttcatcgattgggttggtgcgaattcgttcaggggtgtctatagaggaaagaaggtttgggtcaacaaattgaggggctgtgacatgggaagtgcttacgaagttgagattcgtcaggacttgctgcagttgatgagttgtggccagaggaacatcctgcaattccatggcatctgtttcaatggaaaccatgggctctgcatagtaaccaggatgatggaagggggatcagttcatgatattcttacgcagagaaacaagaggctgtccctccgggacacggtcaggatcgctcttgatgtcgccgacactctggctttcatgaacagctacggcattgcgtaccgcgatctcaatgctaggaagatcctgctggataggcaagggaatgcttgcctcggggatatgggcattgttaccccctgtagtaatgttggtgaggtcactgagtatgagacgtctgggtaccgatggctggctccagagatcatcgctggagatcctgaaaccgtctccgagacctggatgagcaacgtctacagctacggaatggtgctctgggagatgatcaccggagaggaggcctactccgcctactctccggtgcaagcggccgtcggaatcgcggcctgcgggctgaggccggagatccccagagagtgtcctccttttctgaggtcactgatgaacaggtgctgggacaattcccctctgaagcgccctcagttctctgagatcatatccatcctacaaaggcagcagaacgttagatagtgttcttttcttttctttttttctcttccccccttccttctatattattatatatgctatatatcagtttggcttggctgtttgcatgcctaatcatgcaggaaactgcatctgagaaaaaatataatataattatatatgtgcagtgcggaggctttttatatt

SEQ ID NO: 92431 - DNA, 2439 bp, Zea Mays
tgccttggcccatggcccatcgtccatggacatggaccagaggccctcacgctcacgccttcctagcacgctggcattggtagtactacaaaaacaggcgtcgtttttctttgcctccctccccaccttgtctggctcccttcttcgctctccatgagctgagcaaggctgggcagcaacacggcgacggagaaaaatctcttccctggctcagagattcccccacaagaccacggcatttccccttgctactgaccaaacatcgcagccttttctttttgcgatttttcttcacattttgtagacaccaacgccccttccttcagtgttctgaatataaataaatacagtagattcatccagcagaaaatacagaactctcggtttgttctgatcactcggttccatctcccaaagcgaccccgccgccagtagatccatccggcaagaactcggttctgctccgtccttctgccgtgcagaaacgatcccgccgccttcagtagcggtagcagaaagccctatcaagcgagtgaagactcagcagcaggcaaagaggtcgagtctccagcgatggcggcggcgctggagtgctggtcggggcggccgagcaccgacgaggagatggtggagcaggtcctcatgaagccccacggccgttcagacgactccctcccgacctgcgccgactctgcctccgccggcgagccgacgtcggcgcccgcgccgcccaaccccaagaagtggcagcggctgggccgcaactttgccggcgccatcgccgcgttcaagaacacgctgagcctggatggcggcggcctcccccgcgacccctcgcctcgggccgagaagccgccgccgctcctcctccgtggcctcgcgcagctctactcccgcggcgccgccgccaaccagcagctgccggagaagctcgtagctgacctccgccgccacttcgacgctctccccaacagctacgcacaggcaggatttgacatgaaagatgtcctcttgcatgcccgccttgtagagcaggcgaccggcgaggatcagcctgcggtgaacattgaggaagtccatggcagaggagctggtgatgaaggcactgttttccagctaacatttgcttgcactgccccgctctcgtggcagtcaatgtcaggatcactagacagcccttcgttctgctgcaagaagatccagatctttgagaagagaggtctgacacttggtgtcgtcatgatacttgtgcagactgggaacgaggcgctcttcaagaaccgggttgagtctgcgctgaaatcggtagcaaagaagcaaaggaagaacagtggtggtggtgtgaagctgccattcgggctctgcggttgccaggaagaaggatcgagaaacttcgatgaggagtcgatgtttgatccggacgatggccaggtactcgacaatgagccggcgcgcaggccacagctacccactcgcctaccgcagtcatcagtcttcgtctcggtagatgaatggcagaccatccgctctggtggcgaggagctcggtcgctggatgctgcgttccgaggagatcgagttcatcgattgggttggtgcgaattcgttcaggggtgtctatagaggaaagaaggtttgggtcaacaaattgaggggctgtgacatgggaagtgcttacgaagttgagattcgtcaggacttgctgcagttgatgagttgtggccagaggaacatcctgcaattccatggcatctgtttcaatggaaaccatgggctctgcatagtaaccaggatgatggaagggggatcagttcatgatattcttacgcagagaaacaagaggctgtccctccgggacacggtcaggatcgctcttgatgtcgccgacactctggctttcatgaacagctacggcattgcgtaccgcgatctcaatgctaggaagatcctgctggataggcaagggaatgcttgcctcggggatatgggcattgttaccccctgtagtaatgttggtgaggtcactgagtatgagacgtctgggtaccgatggctggctccagagatcatcgctggagatcctgaaaccgtctccgagacctggatgagcaacgtctacagctacggaatggtgctctgggagatgatcaccggagaggaggcctactccgcctactctccggtgcaagcggccgtcggaatcgcggcctgcgggctgaggccggagatccccagagagtgtcctccttttctgagatcatatccatcctacaaaggcagcagaacgttagatagtgttcttttcttttctttttttctcttccccccttccttctatattattatatatgctatatatcagtttggcttggctgtttgcatgcctaatcatgcaggaaactgcatctgagaaaaaatataatataattatatatgtgca

SEQ ID NO: 92432 - DNA, 828 bp, Zea Mays
ggcattccgaccgatcccaccgaatggacagccgcctcgccatcgccgcgctcctcctgctcgcctccgcctcctccgctgccgctgccgcggacggcgggaaggtggccgtggcgctgtactacgagtcgctgtgcccctactcggcgcgcttcgtggtgaaccacctcgccaaggtcttcgcggacggcctccgcgaggtcgtggacctcacgctcgtcccctacggcaacgcccggatccaccccggcggagagatctcgtgccagcatggtccgtacgagtgtctgctcaacaccgtggaagcttgcgccatcgacgcctggccggatctggatgtgcatttcagcttcatctactgcgtggaggacctggtggtgaaacggcagtacaaggactgggagtcctgcttcgagaagctgggcctcgaccccaagcccgtaacagaatgctacaaaagcgagcatggccacaagctcgagctcaagtacgcgaaccagaccgacgctctcgagccgccgcaccggtacgtgccctgggtggtcgtcgacgggcagcccctgcttgaggattacgagaatttcgaggcttacatctgcaaggcttacaagggcactccaccgaaggcctgccagggcctgggacgtctgcagatggccctcgagacagcggcggaggcgcgcaacggcgtcagctacaactccggtgtcagcaagcttgcgactgctgaagatgagggtggggagcataaggctatgaccctgagtggggtgtggcgccgcgctcaccgcatcggcacgacgacggcacatggcatgagatctttgg

SEQ ID NO: 92433 - DNA, 931 bp, Zea Mays
ggcattccgaccgatcccaccgaatggacagccgcctcgccatcgccgcgctcctcctgctcgcctccgcctcctccgctgccgctgccgcggacggcgggaaggtggccgtggcgctgtactacgagtcgctgtgcccctactcggcgcgcttcgtggtgaaccacctcgccaaggtcttcgcggacggcctccgcgaggtcgtggacctcacgctcgtcccctacggcaacgcccggatccaccccggcggagagatctcgtgccagcatggtccgtacgagtgtctgctcaacaccgtggaagcttgcgccatcgacgcctggccggatctggatgtgcatttcagcttcatctactgcgtggaggacctggtggtgaaacggcagtacaaggactgggagtcctgcttcgagaagctgggcctcgaccccaagcccgtaacagaatgctacaaaagcgagcatggccacaagctcgagctcaagtacgcgaaccagaccgacgctctcgagccgccgcaccggtacgtgccctgggtggtcgtcgacgggcagcccctgcttgaggattacgagaatttcgaggcttacatctgcaaggcttacaagggcactccaccgaaggcctgccagggcctgggacgtctgcagatggccctcgagacagcggcggaggcgcgcaacggcgtcagctacaactccggtgtcagcaagcttgcgactgctgaagatgagggtggggagcataaggtgggagaatactagtacataattgactagcgacgtgccccttttttgggtcatgtgaagttgaaggaccgttccatctcgttgtccggttttttattgtacagtaatagctaatatgataatgataataattacatttctaatctctccaaaaatatagtacgtctgatcttgcgagc

SEQ ID NO: 92434 - DNA, 1007 bp, Zea Mays
aagaaagcaaagggtgaaaggggaagggggagaataatctcggtttttagcacgcaaacacacggcacgagcagctgagcgcccatggcaggtccccggcgtctcctactcctcgtcccgctgctcgtgctcctcggcgcgcacccgccgcagtgcgggtccgcggaggaggggacgaaggtctccctggagctctactacgagtcgttgtgcccgtactgctcgcggttcatcgtcaaccgcctcgcggggatcttcgaggacgggctgatcgacgccgtccacctccggctcgtcccctacggcaacgcgcgcgtcgcatccaacagcgagatctcttgccagcatggtccgtacgagtgtctgctcaacaccgtggaagcttgcgccatcgacgcctggccggatctggatgtgcatttcagcttcatctactgcgtggaggacctggtggtgaaacggcagtacaaggactgggagtcctgcttcgagaagctgggcctcgaccccaagcccgtaacagaatgctacaaaagcgagcatggccacaagctcgagctcaagtacgcgaaccagaccgacgctctcgagccgccgcaccggtacgtgccctgggtggtcgtcgacgggcagcccctgcttgaggattacgagaatttcgaggcttacatctgcaaggcttacaagggcactccaccgaaggcctgccagggcctgggacgtctgcagatggccctcgagacagcggcggaggcgcgcaacggcgtcagctacaactccggtgtcagcaagcttgcgactgctgaagatgagggtggggagcataaggtgggagaatactagtacataattgactagcgacgtgccccttttttgggtcatgtgaagttgaaggaccgttccatctcgttgtccggttttttattgtacagtaatagctaatatgataatgataataattacatttctaatctctccaaaaatatagtacgtctgatcttgcgagc

SEQ ID NO: 92435 - DNA, 1417 bp, Zea Mays
actaaccatgccgtggctagttaaatgacggggacggggtcacgccttcgttgcgtgcctccacctccccccctcggcgcccccaacgacatgttgttaccgtggctgtggcagccggccggtctccttctccatccatatgtactggcagcatcgtatcacctttttttctgcagcggtgatctcatctaggcgtcggtcagagctctctcgagctcgccagcggtggttggtcgtcgtcgtcgtcgtcgtcgatggggaggccgccgtgctgcgacaaggcgaacgtgaagaaggggccgtggacgccggaggaggacgccaagctgctggcctacacctccacccatggcaccggcaactggaccaacgtgccccaacgagcagggctcaagaggtgcggcaagagctgcaggctgaggtacaccaactacctgcgtcccaacctgaagcacgagaacttcacccaggaggaggaagacctcatcgtcaccctccacgccatgctcggaagcaggtggtctctgatcgcgaaccagctgccgggaaggacggacaacgacgtgaagaactactggaacacgaagctgagcaagaagctgcggcagcgcgggatcgaccccctcacccaccgccccatcgccgacctcatgcacagcatcggcgcgctggccatccgcccgccgcagccggcgacctcccctaacggctccgccgcctaccttcctgcgccggcgctcccgctcgtccacgacgtcgcgtaccacgccgccggaatgctgccgccgacgccggcgccgccccggcaggtcgtcatcgcgcgcgtggaagcggacgcgcccgcgtcgccgacggagcacgggcacgagctcaagtggagcgacttcctcgccgacgacgccgccgccgcggcggcggccgcggccgaggcgcagcagcagctggccgttgttgggcagtaccaccacgaggccaacgccgggagcagcagcgctgcggccggcggtaacgacggttgtggcattgccgtcggcggcgacgacggcgcagcggcgttcatcgacgccatcctggactgcgacaaggagacgggggtggaccagctcatcgccgagctgctggccgacccggcctactacgcgggctcctcctcctcctcctcctcctcgtccgggatgggctgggccggcatgggcctgctgaacgctgattaattaactcaagactgctttagtgtttgctatacgtacttaccatcaattagtatgatggtcaaaccttccaaccggatccattcatatgcttgcacaactctgggagtctgggtgttttcggattacaaattgtacggataattgacgccatttgtgcgtgtgtgtctcattcattttcctagaggaaactgtgtttgtgttgt

SEQ ID NO: 92436 - DNA, 1515 bp, Zea Mays
actaaccatgccgtggctagttaaatgacggggacggggtcacgccttcgttgcgtgcctccacctccccccctcggcgcccccaacgacatgttgttaccgtggctgtggcagccggccggtctccttctccatccatatgtactggcagcatcgtatcacctttttttctgcagcggtgatctcatctaggcgtcggtcagagctctctcgagctcgccagcggtggttggtcgtcgtcgtcgtcgtcgtcgatggggaggccgccgtgctgcgacaaggcgaacgtgaagaaggggccgtggacgccggaggaggacgccaagctgctggcctacacctccacccatggcaccggcaactggaccaacgtgccccaacgagcaggtgatcgtgccgccgtgcaccatgcattttgttgttttgtttgtggctcatgacgaggcgctggcggacggtgcggcatgatgtgatatgatgcgcagggctcaagaggtgcggcaagagctgcaggctgaggtacaccaactacctgcgtcccaacctgaagcacgagaacttcacccaggaggaggaagacctcatcgtcaccctccacgccatgctcggaagcaggtggtctctgatcgcgaaccagctgccgggaaggacggacaacgacgtgaagaactactggaacacgaagctgagcaagaagctgcggcagcgcgggatcgaccccctcacccaccgccccatcgccgacctcatgcacagcatcggcgcgctggccatccgcccgccgcagccggcgacctcccctaacggctccgccgcctaccttcctgcgccggcgctcccgctcgtccacgacgtcgcgtaccacgccgccggaatgctgccgccgacgccggcgccgccccggcaggtcgtcatcgcgcgcgtggaagcggacgcgcccgcgtcgccgacggagcacgggcacgagctcaagtggagcgacttcctcgccgacgacgccgccgccgcggcggcggccgcggccgaggcgcagcagcagctggccgttgttgggcagtaccaccacgaggccaacgccgggagcagcagcgctgcggccggcggtaacgacggttgtggcattgccgtcggcggcgacgacggcgcagcggcgttcatcgacgccatcctggactgcgacaaggagacgggggtggaccagctcatcgccgagctgctggccgacccggcctactacgcgggctcctcctcctcctcctcctcctcgtccgggatgggctgggccggcatgggcctgctgaacgctgattaattaactcaagactgctttagtgtttgctatacgtacttaccatcaattagtatgatggtcaaaccttccaaccggatccattcatatgcttgcacaactctgggagtctgggtgttttcggattacaaattgtacggataattgacgccatttgtgcgtgtgtgtctcattcattttcctagaggaaactgtgtttgtgttgt

SEQ ID NO: 92437 - DNA, 1229 bp, Zea Mays
gaggcacgtgcagctcacacgggacgcggatcccctcttttgattcccctctcttcttgcaagagggtgtaagaaaaccaagccgccgccgggatactacactacccagctcctctccagtctcaacccagcccgcctctcgaacttccagaaccgtcctctcgctgcctgcggctgctatctctgtcatctagaggagagtgtaagggcactagatagagagtgatggcttctcctgatccatcggcggcagatgccggcaccgggggcgagtcgacgagccaggcggcggccgtggaaccgatccggatgccgacggtggaggagatcaaggggcaggacatctggaacaactgcgccgttcgcagcgtcgtcagtggcgtcatgggaggcggtcttggtgtgcttatgggactattctttggagctttggaaaatccgataatggcagagcaaatgacagcaaggcaacaaatagtatacacagcaaagcagatgggtagtagaagtataagtaatgccaaaacctttgcagtcatgggtctgattttctcagcagctgaatgtaccatagagaaggttcgggcaaagcatgacactaccaatacagcggtagctggctgtgtcactggaggagctttagctgtaaaaggtggccctaaagctacatgctttggatgtgtggggtttgctgcgttctcagtggcaattgaaaagttctttgatcggcatacttgaaatgggtgttgtgaatttgaacgctttttggccatgttcgtttgatcccaaaaccatagggattgaggtggactggaagagattgaagaggattttgacttgtaggggatttgatcccctcaatccctatggatcagcacaaaacgaacagagccttagctgagcatgagcagcgttggcaggagaacctgattgtttgcaacatccagtcatctacaactcattaaggactgtaacctaatttttttttacttattcccagtttcttgcctggattcgtaattactgaactaccggaacgcctaagagatctaccctgatcaatatcgatgcacgatgacattgaccagagttgttgttctcgaatgtgttttgtgttattctcgacatctgcaggcaacgggtgtctatttattattgcaatctgactgaggtcctgtttggaagtgtagcgtttttggagttttcaaacaatactatgatatttgatg

SEQ ID NO: 92438 - DNA, 1022 bp, Zea Mays
caagcaagcgcagaggcagagcagctcgataacctcgatccgatccatctcgtctcttccgcgttgcttgcttgcttgctttagatgtgctgactgctgttggggtagggcagggggagaggagaggaggaggaggaggagctcgtagcggaatcagatcagatggtgcgtcgccagagcagagaaggccggggcctgggctggcctgcgtgctgcctcggcttcctgctcaagctgctcgcgttcctccaggccttcgccgccgtctccgccctcatctacgccgcttggatcctctcccgctgggcgcgccaccaccagctccacctccgcgaccttctaagcccggacctatggttcccgtcgctcgtcatggcggcggggatcttctactgcctcctgctcctcgcgggttacttggcagctgagatcaacaccggatgctgcctctgcttctacaccatcccagccatggctatgatgctgctggaagctgctctcgccgcccatctggcgctcaaccagcactggatccagaggaccgcaccggcgagctccacaacttactctcctttatccacaataacctcgacctatgcaaatgggctgctcttgccatcttcgccacgcaggcactctcgcttctcctggctatgactttacgggccatgctatctgcccggaccatggactacgacagtgatgaagactttgtggttatacggaggccactcctggttgcccagcctcctgcaccttagtccaactccagcaacgcgctccgtgtcacacccgaatccgtaaaatacgcgccccgtggacactgtttaggcttcgaccaactcctgcaagggcgccctccgtctctgtatcctagggaggagtccttgcgtttgcggagccggttcactactttgcaacatgcatgtagcaacgaatttgaggactcccaatgtaatgggttatcctatcagatcaaattagaagaatgaatatatgatgctcatcctcgtctaaatgaa

SEQ ID NO: 92439 - DNA, 1075 bp, Zea Mays
gaacgagcagaagccgccgtgcacattctgacctggacaaggacaagcaagcgcagaggcagagcagctcgataacctcgatccgatccatctcgtctcttccgcgttgcttgcttgcttgctttagatgtgctgactgctgttggggtagggcagggggagaggagaggaggaggaggaggagctcgtagcggaatcagatcagatggtgcgtcgccagagcagagaaggccggggcctgggctggcctgcgtgctgcctcggcttcctgctcaagctgctcgcgttcctccaggccttcgccgccgtctccgccctcatctacgccgcttggatcctctcccgctgggcgcgccaccaccagctccacctccgcgaccttctaagcccggacctatggttcccgtcgctcgtcatggcggcggggatcttctactgcctcctgctcctcgcgggttacttggcagctgagatcaacaccggatgctgcctctgcttctacaccatcccagccatggctatgatgctgctggaagctgctctcgccgcccatctggcgctcaaccagcactggatccaggaactgccagaggaccgcaccggcgagctccacaacttactctcctttatccacaataacctcgacctatgcaaatgggctgctcttgccatcttcgccacgcaggcactctcgcttctcctggctatgactttacgggccatgctatctgcccggaccatggactacgacagtgatgaagactttgtggttatacggaggccactcctggttgcccagcctcctgcaccttagtccaactccagcaacgcgctccgtgtcacacccgaatccgtaaaatacgcgccccgtggacactgtttaggcttcgaccaactcctgcaagggcgccctccgtctctgtatcctagggaggagtccttgcgtttgcggagccggttcactactttgcaacatgcatgtagcaacgaatttgaggactcccaatgtaatgggttatcctatcagatcaaattagaagaatgaatatatgatgctcatcctcgtctaaatgaa

SEQ ID NO: 92440 - DNA, 1149 bp, Zea Mays
gaacgagcagaagccgccgtgcacattctgacctggacaaggacaagcaagcgcagaggcagagcagctcgataacctcgatccgatccatctcgtctcttccgcgttgcttgcttgcttgctttagatgtgctgactgctgttggggtagggcagggggagaggagaggaggaggaggaggagctcgtagcggaatcagatcagatggtgcgtcgccagagcagagaaggccggggcctgggctggcctgcgtgctgcctcggcttcctgctcaagctgctcgcgttcctccaggccttcgccgccgtctccgccctcatctacgccgcttggatcctctcccgctgggcgcgccaccaccagctccacctccgcgaccttctaagcccggacctatggttcccgtcgctcgtcatggcggcggggatcttctactgcctcctgctcctcgcgggttacttggcagctgagatcaacaccggatgctgcctctgcttcgtacgtacctgcttcgtttctcatatttatttgtttataaggattacttttggatttggaaactccctcgacagtacaccatcccagccatggctatgatgctgctggaagctgctctcgccgcccatctggcgctcaaccagcactggatccaggaactgccagaggaccgcaccggcgagctccacaacttactctcctttatccacaataacctcgacctatgcaaatgggctgctcttgccatcttcgccacgcaggcactctcgcttctcctggctatgactttacgggccatgctatctgcccggaccatggactacgacagtgatgaagactttgtggttatacggaggccactcctggttgcccagcctcctgcaccttagtccaactccagcaacgcgctccgtgtcacacccgaatccgtaaaatacgcgccccgtggacactgtttaggcttcgaccaactcctgcaagggcgccctccgtctctgtatcctagggaggagtccttgcgtttgcggagccggttcactactttgcaacatgcatgtagcaacgaatttgaggactcccaatgtaatgggttatcctatcagatcaaattagaagaatgaatatatgatgctcatcctcgtctaaatgaa

SEQ ID NO: 92441 - DNA, 927 bp, Zea Mays
ttcttgcacctcacgattcgttcggtttcttttcgttctagcatcgtccagctctcacacgcagcctatttgtccctgcgccctctgatgaatagaccagctcaaagttagaacaggcatggatggatcggtttgtgattttaatagttagagcagccatgaatgaacaactccggtctctgtcatctgtttatcatggcagtcgctctctaccagcgtcggggatggagcgaaatggctggtgaacaagctgaagggcaagatgcagaagccgctggcggacctgctcaaggagcacaacctccccgtgggcctgttcccgcgcgaggcgaccaactacgagttcgtgccagagacgcggcgcctgacggtgtacatcccgtccccctgcgaggtcggctaccgcgacggctccgagctgcggttcgacgccacggtgtctggcacgctgggcgagggccgcctcacggaggtggaagggatcaagaccaaggtgctcgtctgggccagggtcaccgccgtcaaggccgacgccgccaaggtccacttcaccgctgggatcaagaggtcgcgcagccgggacgcctacgaggtcgtcaggggcggcatcaccgtcgacgagttctagcttagttttgctttcgcggctcacatggatggacaggcttcgtcttgctcgctgcacgctgagaaggacagattgttgctttcagttgcaggaataaattctacacccattagctatgtgggagatctgcgtgcaccgtatatcgtgtgttttgggttttgctgtgagaatctaacacttgaaggattcagaaggtgtgctcgttgcttatgatatatgttgttcacttgtttttaatatcttcgggtattagaaaacaagacaatataatgagattaaggtccaccttcgtccttaaa

SEQ ID NO: 92442 - DNA, 1089 bp, Zea Mays
aaaccatgcgaagaggaaagagccgtcgctttcgctacgctcgacagtggaggacacatcttcctcgccgcttctggctttgatccggtcgcatccaacgcacgacctgttgaaccagggcgcgccctcccagggttcctttcttctccgtctccgcgtaggcgtagcgaagaagctaacctagaatcaaagagatcgcacgcaagagggagcaccggagcagcgagccagcgacagcagcagagagatcgccggggccgctcgcctgtctggagagagaaaggaaacaagagatggacgagatcatgaacaaggtgggcgcttactggctggggcagagggccaacaaggagatctcctcggcaggcgacgacctcgattcgctctctaccagcgtcggggatggagcgaaatggctggtgaacaagctgaagggcaagatgcagaagccgctggcggacctgctcaaggagcacaacctccccgtgggcctgttcccgcgcgaggcgaccaactacgagttcgtgccagagacgcggcgcctgacggtgtacatcccgtccccctgcgaggtcggctaccgcgacggctccgagctgcggttcgacgccacggtgtctggcacgctgggcgagggccgcctcacggaggtggaagggatcaagaccaaggtgctcgtctgggccagggtcaccgccgtcaaggccgacgccgccaaggtccacttcaccgctgggatcaagaggtcgcgcagccgggacgcctacgaggtcgtcaggggcggcatcaccgtcgacgagttctagcttagttttgctttcgcggctcacatggatggacaggcttcgtcttgctcgctgcacgctgagaaggacagattgttgctttcagttgcaggaataaattctacacccattagctatgtgggagatctgcgtgcaccgtatatcgtgtgttttgggttttgctgtgagaatctaacacttgaaggattcagaaggtgtgctcgttgcttatgatatatgttgttcacttgtttttaatatcttcgggtattagaaaacaagacaatataatgagattaaggtc

SEQ ID NO: 92443 - DNA, 1596 bp, Zea Mays
tcaagcccattttctcggcctgcctcgcgcaactcgtcccagcacaccgctgtggcgctgtcgtcctcgctcacctcgtccgtcctcgtgagctccgcctgccctccatctggacagctccagcctccagccatctccccccacctgtacacagttacaaagcttggcacttcgcagttcgcactcgcatgctcttcgcccctcgcgcttaccgctgccgcgcctcccgacttgccgcctccgcctagctccgggctctccaatggcctccatgctcgccatcctcaggccctccgcgccggccccgctcgcggggcgccgggccagggctgccgcgccggcgaccgcgagggtggcgctatcttccagatctaggtattcgtcggtcagggtgtcgctcggctccgaggttgcagtgggcgccgacgcgctcttcgccgactataagcccaccaccgctttcctcttccccggccagggtgcccaaaccgttggaatgggggcagaagctcagagtgttccagcagctaccaaattgttcaaccaggcaaatgaaatccttggatatgacttgctggatctttgcaccaatggaccaaaagaaaagcttgactcaacaatgatcagtcagccggctatatatgtcaccagccttgcagcagtagaggtactacgtgcacgcgatggaggccaagatgtgattaactctgtagatgttacatgtggtctcagtttgggagagtataccgctcttgcatttgccggtgcttttagctttgaggatggactgaagcttgtcaagctaagaggagaagctatgcaggatgcttcagatgctgccaatagtgcgatggttagtgtgattggtctggattcagaaaaggtgcaagaactatgtgatgctgctaatgacgaagtagatgaaaacgatagagttcaaatagcaaactttctgtgccctgggaattatgcagtttctggtggtgtaaaaggtattgaagtagtcgaagccaaagcaaagtccttcaaggccagaatgacggttcgcctagctgttgctggcgctttccatactagcttcatgcaaccagctgtttcaagattggaatctgcgttggctgccactgagattagaacacctagaattccggtcatctccaatgttgatgcgcagccccactcagatcctaacaccatcaagcagattttagctcagcaggtaacctctccggtgcaatgggaaaccactgttaagaatcttatgggcaaggggcttgagataagttatgaactcggacctggaaaggttatagcaggtattctcaagaggatcaacaaaggcactagcattgagaacatcggggcttaaacgtctgggatctgaagaactcttgatggaaccaagttacacagcagaggattgaaacatgccattattgtggaacgatgtttccactcagagttaccgttttttttaccttagtggttgaattttgatcttgatgtaaaattgacatgaaacacatggttaatgattttatgaacagtgtagttttcacagtttgaataagggtgtgtctggtttctaaggactaa

SEQ ID NO: 92444 - DNA, 1721 bp, Zea Mays
cccattttctcggcctgcctcgcgcaactcgtcccagcacaccgctgtggcgctgtcgtcctcgctcacctcgtccgtcctcgtgagctccgcctgccctccatctggacagctccagcctccagccatctccccccacctgtacacagttacaaagcttggcacttcgcagttcgcactcgcatgctcttcgcccctcgcgcttaccgctgccgcgcctcccgacttgccgcctccgcctagctccgggctctccaatggcctccatgctcgccatcctcaggccctccgcgccggccccgctcgcggggcgccgggccagggctgccgcgccggcgaccgcgagggtggcgctatcttccagatctaggtattcgtcggtcagggtgtcgctcggctccgaggttgcagtgggcgccgacgcgctcttcgccgactataagcccaccaccgctttcctcttccccggccagggtgcccaaaccgttggaatgggggcagaagctcagagtgttccagcagctaccaaattgttcaaccaggcaaatgaaatccttggatatgacttgctggatctttgcaccaatggaccaaaagaaaagcttgactcaacaatgatcagtcagccggctatatatgtcaccagccttgcagcagtagaggtactacgtgcacgcgatggaggccaagatgtgattaactctgtagatgttacatgtggtctcagtttgggagagtataccgctcttgcatttgccggtgcttttagctttgaggatggactgaagcttgtcaagctaagaggagaagctatgcaggatgcttcagatgctgccaatagtgcgatggttagtgtgattggtctggattcagaaaaggtgcaagaactatgtgatgctgctaatgacgaagtagatgaaaacgatagagttcaaatagcaaactttctgtgccctgggaattatgcagtttctggtggtgtaaaaggtattgaagtagtcgaagccaaagcaaagtccttcaaggccagaatgacggttcgcctagctgttgctggcgctttccatactagcttcatgcaaccagctgtttcaagattggaatctgcgttggctgccactgagattagaacacctagaattccggtcatctccaatgttgatgcgcagccccactcagatcctaacaccatcaagcagattttagctcagcaggtaacctctccggtgcaatgggaaaccactgttaagaatcttatgggcaaggggcttgagataagttatgaactcggacctggaaaggtaagttcctgtttgtgatttatttactgtttagtaatgtttgtcgagttatagcaatgaggtaaatttgaaatttccaagttattgtagtataaccgaactcactagtaaagtagtaatgctcttgcactatttgtttttcttttctttctggcatccaggttatagcaggtattctcaagaggatcaacaaaggcactagcattgagaacatcggggcttaaacgtctgggatctgaagaactcttgatggaaccaagttacacagcagaggattgaaacatgccattattgtggaacgatgtttccactcagagttaccgttttttttaccttagtggttgaattttgatcttgatgtaaaattgacatgaaacacatggttaatgattttatgaacagtgtagttttcacagtttg

SEQ ID NO: 92445 - DNA, 1252 bp, Zea Mays
atataaatggctgtgcccctgatcaacctctcttcactaaccccaacccgtcgccgcaagaaattccagcgcacacgagatcaggagacgaaatcggagcaggaggacaaggacaagcaggcagctagccgcaaagatgccgtgcatccaggcgtccagccccggcggcatgccgcaccagcacggccgcgggcgggtcctcggcggcggcgtcgggtgcgcggcggaggtggccgcggccgtcgcggcgagcgcgggggggatgcggtgcggggcgcacgacggcgaggtgccggcggaggcagcgcggcaccacgagcacgcggcggcggggcccgggcggtgctgctccgcggtggtgcagcacgtggcggcgccggcggcggcggtgtggtccgtggtgcggcggttcgaccagccgcaggtgtacaagcggttcgtgcgcagctgcgcgctgctggcgggcgacggcggcgtgggcaccctccgcgaggtgcgcgtggtgtcggggctccccgcggcgtccagccgcgagcgcctggaggtcctggacgacgagagccacgtgctcagcttccgcgtcgtgggcggcgagcaccggctccggaactacctctcggtcaccaccgtccacccgtccccggccgcgcccgacgccgccaccgtggtcgtggagtcgtacgtggtggacgtgccgccgggcaacacccccgaggacacccgcgtgttcgtcgacaccatcgtcaagtgcaacctccagtcgctggccacgaccgccgagaagctcgcggccgtgtaggcgtggacggaggaggggactccatctccgttgggtgatcgatggttttctttttttttccggggaggaaggaccggatcggagggaggagggatgcgtgtttgtacggcgcgtgaccttctgtctctctctctctctccttcttctttggccttttcacattagtgtcccccttggttttcgttattattcttttttctcgttgttgcgagagacacacagcacagcaagccctccctagctactctcgcttgtgcagagattcgagagacgatcaacaagatgacaagtaaatctgtagagatctaagttctggcgcacgatcgattcctctggatgtatatatgtttgatggtaacagagatatggtttgtggagagcatgaaacttttcgatcgatcgagcttgtaacacgcagcaagctgatgaggaagtagcaacagtaacaccagc

SEQ ID NO: 92446 - DNA, 181 bp, Zea Mays
ccgagctcacagcctgcgcgcgctccggctgctttgctccagcgtcgcgcgctccgctcctgcacgccgagcgtcctcttcagctccttggtcaaccttctctcgcgctctgctcctctctcttccttgccgcggagctcctgtgcgcgcgctgttcctgctcgccgagctgttctctgcc

SEQ ID NO: 92447 - DNA, 252 bp, Zea Mays
atggccttgatgtcagcacctgaaaactcatcttttgacataataaactcttctaggtttacatcatcagccagtgtcattttcgatgtgtgtatctggaagatgcgccgcctagtcttgacatcaggtaaagggaattcaatctttctgtcaattcgacctgggcgaagcaaggctggatcaagactttcaatacgatttgttgctagaataactttaacatctcctcttgaatcaaaaccatccagctga

SEQ ID NO: 92448 - DNA, 1158 bp, Zea Mays
cagaaaaataatttaaaattgtataaattcaccgcaatgttccggctcttcctttccacgccaccaacttttccacctttggcaaaggaggacacctccttttcgcacaaaagcccccgcatttctctcaaattcccctctgttcccctcccaagaaaccccacatttgcatgggcaagcacctacctgccgccgccaccgccgccgccgccgccgcggttcgctcgtacgcccgcagccttcgcgtcccatccgataccgccgcatccgccgggagggcagataagacgccgtctgccccgctggatacgcccaggaaatccgctgccgccgctgccgcggccagctccgggcgggccgaggtgcgggatttggcggcggcgtgcgggctagaggcggacgagagggttccgctcgcggaggtggtgtcggactgcacgaggcggtggttccaggacgcactcaaggaggcgcgcgccggcgacatcaccatgcaggtgctcgtcggccagatgtaccgcagcggatacggtgtcaacaagaacgagcacaaggcaagagtttggatggagaaagcatcaagatatcggtctacagtatggaaagttagcaataaacgtccagggtacaatgccagtgactcggactcaggcacagatgatgctaaggaaacatgcaaataagaaaatttgagattttgacattaatggacgggagctgccacccacacggccacacatgcactgctgcagtgacttgaaggttcagatatcagttatgccaacggatccatttgtgctccccccccccccccggcctatttggcatgatcgctatatattgttgttatgttttcagtttgttttttcactatgtgagttacacactgtattatggcaatgttttagaggtttcctcgtttttgttgtcttttttttttgttgtgttagttctgcttgacgtcaggaaagtggttatcagaatggtctttgccacgtacaaagaatcgcaggatattctgtggcatatgtagccactgtttcatctgcatttcgtcaatggtatttgccccgatagattagtagttgagaacatccctttctggccggtcttgttagtttgatcctaaaatcaaagagattggatgggattcgactc

SEQ ID NO: 92449 - DNA, 4165 bp, Zea Mays
ttcacatgtgccgcgccgcgccagagcatgaagaagaagcgccccagttcggttccccggtagaggcgtcgagcccaccccgcccgcccctagtacgagacagcgagcgggacgaagaagaaacaaaacataacagggccgtgcgttcctgccggaactggtggccgcctgccccgcgcaagaagctaccacggcagcagcagaaaggaggaggaagaggcgtcgtcgtctcgaggatcgcgcgcgcaatgcctctgtcgcggcatacggtccggagcgagtacgcgctgggcggccgcgacctctaccgcggcgccgaccagcacgacccggaggccgtcctcgatggcgccgccatggccgggctcgtcggcgtcctccgccagctcggcgacctcgccgaattcgctgcacaggtgttccacggcctgtacgacgaggtgatgagcacgtctgcgcgagggcacggcctcatgctccgggtgcagcagctggaggcggagctgccgctgctagaggaagactcctgccagagaaactacctgcacgtcgttgcctctaacaggggtgtcgactggcatccaaatccaagggtggaccatggggttgtcgcaggaggcgacacgcctcgcttcatcatggagtcggtcaagcagtgccgcgggccgcccaagctcttcgtgcttgacaagtacgatgtcggtggcgacggggcgtgcttgaagaggtacaccgacccgtcctccttcaggacgggctccgcatgtcctacgaccttgctgcaggaaggaactcgagatgatagaagacctctgagagccgtggagatcagtcctaaccttcagaatgctgagattttcagatcccccaatgcagccgacaatttctccaaactggagaccggttcatcggctggagctctggatgaagtgcccacaaaccgcagacgactcaagttccgccagctaaatggatccgtgtttcaaagcttcagaccgctcatgcagaatctgcatgaaaagccttcatcagaggagagactcatcacaggcgaccactcaaaagtgcatgtatttatggttgagtcacctgaaccaggtgctgaagagagagatgtcatggtagacacgtccgacaacatggagaaaggcaagctcaccgttcgcaggaaaagatcagtttctgaagaagcactgtcacgttcgtctgatgctcggtcagcaggaagcagcaggggcggctacgactccgaactggatatctacgtggacgcattaaccacgatggattctgaagatttcagtgctccggagtctggagcaagagagcaagctactgaagaagaagaagaagagcagagatgcaatggcagtgtcaccagtgctgtatcaaatggcacacgagatattactaagaagaccaaggaagtcaaggagaactccaagaaaatagcaagcaagaggtccaagtatgttggcagcatggagctcactgcttcaaaagttggcattctgccaagggagctctccgagaagcatgcccctttctctggttccctccggtacatggcgaagcaactccttgaactgaggtatgatggcactcaagacagcgaattatatgacgttgaagcagacggcgtgggacgtgatgtcaagtaccaggaaatttctgaccatgctgttgaagctaaggagagtgatgctgtgcacaaaattctgtcaggttcaccctatgatgatgcgggtttaggaaaatgcccgcaggaagaaattaaccatgggcaggagcatgatgttccacctactgacagtccacatgattcggcccctgatgaaggaaatgggtttcaggactccaacatggcctacttggtaggcatcatcacatcttccagttcccaagagggagaaggatgtacaagtactgcactgcatgagaattcatctatggcagtgctcaaccatgttttggaacatgctcaagagaggtttggggaagatcttgacaaggaagtggatgtggacattcatacagaagccatttctgagaatacatctgataagtgtgaggacttgaaagaagtcagcatttacacggagcaggtgaatgtggaagatatggaggaaatcaatgaatctgatgtatatgcgttggacgatgaaagagccgagtacatagaacagcaagtagtttcagatggtagtatctcttcaccggtttcatccaagcaatcggatgatccttgctggataactccactcaccctcgcagatgaagatgatacagtggcatgtaaggtcgtcgacagacctgaaggggatcatgttatattatcagaaacattcaagggcattgatctacctaatgtggtaactgagtcagtaatcaacagcaaacatgacatgccaaataatggacagtactatttacatccaaaagctacttttggacaagatctgtgtcttggcagctataagattgttggagaaaatggggaagttccactatgcagctcaaccactgcgactacaactccagaactaactgtaaacacagagacaaagcatgagtttcatcaagctgtgtatcaggaaccatcgaattcattcaatagcagtgctgaagtttttggagatccactagctcccgactccagagatgatgcaccgtcagtcatctcaagctttgattggatgctcaatggtgcaacgcagaagtcattcaatatctttccttctcatccaactaatggaaatgcagaagaaaatggttcttctgaagatgtgccaccgcttcctcctcttccaccgatgcagtggcgaacaaacaagatacagactgggccatcaccgttatctgcgaaaattgggagaccaccaaggccaaaaccttcagtaaaacaacaacaaagtgaagcttctcatgttcttcaggagaacagtctgcacaaaggcttgagtttgcagaatgaactagtgcaggcaaatatttctagtgaccatgagaaaaaccaaattcttaacatagattttcgtgaaagtcatcaccaggaaggagaggagtatgatgcacaggattctaatccatttgcctcgtcagaagttgaatgcttggccgaagttgcttcggtaaaaagtgaaaatctgcacccattgcagctacctgagcttatagttgttctggaagaggcatggtcagagttcggtaatataaaattcatgccagaacaagaaggaaaattccaactaagcaatggactttctgtttggaatgacttgtgcacttctggtttgtcatcacaaaagaccagcgagaagcctgaattttttgcagattataagggaaaggaattttcatttgcaggtagtgacgaagttgcagattcagaagaaaacaaaccaaatggtgctgttaaacatctgcagaatcctgacttgccagcacaacagaaagacgacatacatgattgtgatggcaaggtaacaaagttttcctctgcattagaagaggactcgtcacaatcaccaactcatacagtgtcaggaccacctagatatcctctacttcctgttacttctcacgacagaagcatgataagaaaggctccaactttggttcagccttcgagtatgcttgcagatgagaagaacacactactggaacagataaagaacaagtctttcaacttgaagcctgttcttgcaaagagaccagatgtaatgggtggtccaaaaactaacttacaagtggtggccattctagagagagctcatgcgattcgccaggctgttgctgatgacgacgacgatgataactggagtgagtagctggctcttcctaagagcaagttcggcttctgatgtttaacaagtgcttgcgtcgatctagaactttgtgtccctgttcttgcatggagcaaaagatggaatggagccaacttactataggatttcatgccaagacagttggtctggaccaggtgatgtacatggatgggcaagaaggagaaggatagaagcaacattgcaactccaaacatagtgtgtgtctctacttatactatctgtaacgtttcgaagcgcgtcaatgtttattatcattcaatgcgcctactgaaaatttgacgtgcttggtgaggattgttagattgtatatgcctcct

SEQ ID NO: 92450 - DNA, 78 bp, Zea Mays
ctacgtcatggcgaggatgtgtatgaaaagattgggatcagtagctataactgttgtccattctatagattttcactt

SEQ ID NO: 92451 - DNA, 1245 bp, Zea Mays
gtggggtacccgaccctgtgttcacccatactcatagacaaaggaaaaaaccaacacactctcgcttgcggcaagaattttccggcccgaaaccgaaagcacccgcaccaatctctgcgtctcttcgtcttcggctgcgcggcggcggcagcagcggaggaggttgaggagatgctgtccggcgacatccccccgagccagaccatctacctcaacaacctcaacgagaaggtcaagaaagaagagttgaagagatcactttatgccttgtgttcacagtatggaaggatactggatgtggtggccctgaaaacacaaaaactgagagggcaagcatgggtggcgtttagcgaaattacagctgctaccaatgctttccgtggtttgcaagatttcgatttctacagcaaaaaaatgcgagtacaatatgcaaaaacaaaatcagactgtattgcaaaagaagatggtacttatgcacctaaggagaaaaggaagaagcaagaggagaaagctgctgagaaaaaacgacgaacagaagaggcacaacaagctggcctcaatgctgctgctgcccaaagcaatggaactggctatcaagcgtctcgtctgggcaaggcttcacaggagccacctgcgcctccgaacaacatcctcttcatccagaatctgccagaccagaccacgagcatgatgctccagatcctgttccagcagtaccctggcttccgggaagtacggatgatcgaagctaaaccaggcatcgcttttgtggagttcgaggacgacggccagtccatggtcgcgatgcaggctctccaaggcttcaagatcaccccggagaaccccatggctatatcctatgccaaaaaatgagaaccctaggggactctgtaccggctttgtttcggtactctagtattgatcccaaatccacgtgtgctgaggtggattgtggtgtaaattagtttaagttacaccctaatctacctcaatacatgtagattgagctcaatactagagtatccaaactagacctaagatctttccgctccgcctttagaaatcgagccacggtacccactttccagtcatgtgtttttggaaagcactcgcttgatttcgaagttaaactcttaacacttttaaatcaggtttggtcctcagtctctatgttcactcggcttttgctcttgtcaattacggtattgcaccctatgatatatataagctgtcttgattatctgt

SEQ ID NO: 92452 - DNA, 517 bp, Zea Mays
aaccaacgcggacctagggtttccttcctcatccagtgttctgtcctagcgccgccgccgccccagctcgccttgcgtgactgagagctcgtcggcttccgtccacgcgtgaagcgagagcatggacacccaggtgaagcttgctgttgtggtgaaggtgatgggcaggaccggctccaggggtcaggtgacccaggtcagagtgaagtttttggatgaccagaaccggctcatcatgaggaatgtcaaggggcccgttcgcgagggtgacatcctcaccctgctcgagtccgagagggaggccaggaggctgcgctgaagccctagcgttcttggtgggctcttggccgttggtgaggcgcggcctggctcccgggcgacagacggcgaggcggccatctactggcgatgggacgagaaagcgacagaagaaagaaatgaaaaacagaatgaactgttttttagttagtaaatcatgttccaggtttgatgattctaaaactgatggattacctct

SEQ ID NO: 92453 - DNA, 565 bp, Zea Mays
aaccaacgcggacctagggtttccttcctcatccagtgttctgtcctagcgccgccgccgccccagctcgccttgcgtgactgagagctcgtcggcttccgtccacgcgtgaagcgagagcatggacacccaggtgaagcttgctgttgtggtgaaggtgatgggcaggaccggctccaggggtcaggtgacccaggtcagagtgaagtttttggatgaccagaaccggctcatcatgaggaatgtcaaggggcccgttcgcgagggtgacatcctcaccctgctcgagtccgagagggaggccaggaggctgcgctgaagccctagcgttcttggtgggctcttgtatggtctttggtgtcttggaatttgtgctatgtttgaacttctgtgaccctgttttaagagtagtaagcctggttataagattgcagttttgtttatcttggttgaaagtgcaattggtgttgagacatggttatccttgctatattatctataaaacgacgcatgcattgaatactagatttaagccttgtaaattctcttgacatctgttgctttc

SEQ ID NO: 92454 - DNA, 1795 bp, Zea Mays
aaccaacgcggacctagggtttccttcctcatccagtgttctgtcctagcgccgccgccgccccagctcgccttgcgtgactgagagctcgtcggcttccgtccacgcgtgaagcgagaggtgcgactcttctgtctccatccatccccccttaaacgtttcctgtttgcatggcttgattcatgtgtgagcgttctgaatcctctggtcttaggcgcttgttctggttccacatagtatgcgatgcatgagactagtagctcgattttttaaattttttctgtttgatgctgtgtgactattctcgtgtgttgttcttcctttttgatgtgatccgtagacactatgtggtacaaccttgaagagtatcctaggttttagattcctccgtgaatgaaactgatctgtatgttagtctatttaaacatcatgaataactcatatttgttctagaataatatgtatttcaagtgttgtggaactaaacatcgatgttttgggcatagtatcaccggattacttcgtttgttatgttggatgttgtgcgactgctaaactagtgatcgtgtgggtcgatttttgctgtgatcctactttgtggtacaacctaagagggtccttgagtgaacattacaagcatgctgaccaacacttatcccttagctcagtgactcgacaatattgacttgcttttgcttgataacctagtaaacgaaacattattgcggaaacactcaagttcattctttttacctctccaatgcatggtaatatttataatatggattcgtgccagcaaggtgatagtatttacgctgccattgtgctagatgatgcattagggcatgtacagtggtgtttaatgtgggggctcttaaggtgttttagggggttatttgcaaaataatcttagagccgtctctccgtgaagagacgcctctggctcgtaaaccaagtaacaacagacgcctcacttcccactgtacgaatttgtcgtctgttctatcgatctgatgctatacaaatacatttaattctgtatttattaatagactacgtttatagacactccattgtacaatagagtctcttagttgtctcctttgcttggagaaccgttttggtgtctctccactgtacatgcccttaagttaacttctcttcataccacaaacacaatgtgctggataccagatagtgcgtgttgtgttcatggttttctcatgtgcatgtaatcctgttaatttgtttgtcagtttctgttcacaaagctccagtagcaacaaaccatgtgacagtgcagttaaaatgaactatgtgatcaaagcatatggttcaccttgattactgacaaatgctttctattaatgcagcatggacacccaggtgaagcttgctgttgtggtgaaggtgatgggcaggaccggctccaggggtcaggtgacccaggtcagagtgaagtttttggatgaccagaaccggctcatcatgaggaatgtcaaggggcccgttcgcgagggtgacatcctcaccctgctcgagtccgagagggaggccaggaggctgcgctgaagccctagcgttcttggtgggctcttgtatggtctttggtgtcttggaatttgtgctatgtttgaacttctgtgaccctgttttaagagtagtaagcctggttataagattgcagttttgtttatcttggttgaaagtgcaattggtgttgagacatggttatccttgctatattatctataaaacgacgcatgcattgaatactagatttaagccttgtaaa

SEQ ID NO: 92455 - DNA, 608 bp, Zea Mays
aaccaacgcggacctagggtttccttcctcatccagtgttctgtcctagcgccgccgccgccccagctcgccttgcgtgactgagagctcgtcggcttccgtccacgcgtgaagcgagaggtgcgactcttctgtctccatccatccccccttaaacgtttcctgtttgcatggcttgattcatgtcatggacacccaggtgaagcttgctgttgtggtgaaggtgatgggcaggaccggctccaggggtcaggtgacccaggtcagagtgaagtttttggatgaccagaaccggctcatcatgaggaatgtcaaggggcccgttcgcgagggtgacatcctcaccctgctcgagtccgagagggaggccaggaggctgcgctgaagccctagcgttcttggtgggctcttgtatggtctttggtgtcttggaatttgtgctatgtttgaacttctgtgaccctgttttaagagtagtaagcctggttataagattgcagttttgtttatcttggttgaaagtgcaattggtgttgagacatggttatccttgctatattatctataaaacgacgcatgcattgaatactagatttaagccttgtaaa

SEQ ID NO: 92456 - DNA, 1199 bp, Zea Mays
acagcacaatctctggattgcgaggacctaaatgcttaatgtaacgctcctgtatccctatataaagcaccccacacacacacagtccatccaggcctccaccgcgtcctctgctcctctactcccctctccatccatcgcactcacacggtcacactcacacccccgccgtctagccgtttcagctgcagagcctctcgagcggcgcccgcggcaggagctggctacccctcgaccaggtctgggagcggcgccgccgcgcccgcacgagacggcggagctggacgcggaggcggcgctgggcggggagtcggcggaggagcgcaaccgcttcctggtgctgcggctgtacgaggcgctcaacgcccgcgacgcgcgccgggcgcaggagctgctggcgccggacctcgagtggtggttccatggccctcccgcgcgccagcacatgatgcgcctgctcaccggcgctctggaccaccgcggcttcgtcttctccccgcgctccgtcgacgccttcggctccaccgtcgtcgccgagggcgccgacgacgcgcgccagctctactgggtgcacgcctggaccgtggggccccatggggtgatcacgcagctcagggagtacttcaacaccgacctcacgctcctctccggccagcctgacgtcgttgccgcaggcgctgctccgcctaagcagaaggacgctgcctcctcctcgtcgccctcggtggcggcaccggcagcagggcccaagtgcctgtggcagagccgccgcgccgacagcgcgcacaagtcgctgccgggtctcgtcctcgccatctgactgagactagctagagacaccaagctcgatctgccgccctccattatattatattataaccgtataaaaatcctaaaattccaaaccctctactacttgcataaataatctggaactgcactcagtcagtgaaaacgtgaagacggacgtatgcctatgcactgaactgaactagtccgtgttgtgattcctgtaccagttaattactttagctcgtgccgtgccgtgccgtgtgtgtggaatagtagtgtttgttaagccatgggttgttatgctgtgcgccgccattgctgctactgtaatgctctgctgttatggtctggttctatattgcggttgaataaaagttgcatgagttggagggataagcaattaatta

SEQ ID NO: 92457 - DNA, 110 bp, Zea Mays
aactgacgatctacctcataaattcgctactgaacacttgtcgacacttaggctgtgtccagcaagggacggtaaaccgtccggtacccttaatatagggttcagacacg

SEQ ID NO: 92458 - DNA, 1605 bp, Zea Mays
ccctgtccccgacccgccaatgctgacctccctccctccctccctcccccggccaagctcccctctcgacaggaaggagagactgacctcccatgcgaccaagaaccgagactcgccccgagagcatagcatagcttgcgcgccgccgccgacctcacctccggcatccgaagccacccggtgcgagcagatgccacgtctagtctaagccgagagccaaggtggctttgctcctattaaaagctgccaagaactgcggcgtgtaccaggaaagatcttcgagcgcgtcttcggggcatgcatggcgagtggcgacgaggactcggggatgaggtgctgagctctgcaggttgaagttgaagttgcacatagcgcatacgacatcatgttctgaaatctcgaagcacgtactgctgctactgtctggcagaggagttcgacacagagtcgagatgcctccggactcgaatggcagcttcgacgggcacgagatcgtcgaggttgtcggcgagcctggcacgccgtcggggacgacagccaggctgatggacttcatccccatcgatatctacatcccgtccgtggagcggggcgcgctcagcgagagccggcgcaagcggcggtttctggacttcctccgcgcccacccgtccaaggactggtttttgcgctccaccttcgtcggccgcctccgccggaggagccacggccaccaggagtcggcagacgacggctcggacgacggcgggcgccgcggcccgcggaggcggttccgcgtgccgttcgtgcgcaagatcaagtggcgcaagctgtggacctacgcggtgagctggtgcaggaagcccgagaacttcgcgatgatcatctggctggcgttcgtgggggccgggctgctgctgctcctcatgctcatgaccggcatgctcgacgccgccatccccgacgacgagcggcgcaagaagtggacggaggtgatcaaccagatcctcaacgcgctcttcaccatcatgtgcctgtaccagcaccccaagatcttccaccacctggtgctgctcctccggtggcgccccgacggcgaccgcgaggagatcaggaaggtgtactgcaaggacggcgccgcgcgcccgcacgaccgggcgcacatgctcctcgtcgtggccttgctgcacgtcacctgcttcgcccagtactactgctgcgccctgttctggagctacacgcgcaaggaccgcccggactgggcgctcaacatcggctacggcctcggcacgggctgccccgtcgtcgctggcctctacaccgcgtacagcccgcttggacggaaggagcccgacaccgagtcgtcgtcggcggcgccggccgatgcggcgcagcaggaccaccacaccagccgtaccgagaacgacggcgtagagatcacgatatacaaccgccgcgtggtggtgagcagcccggagtggagcggcgggctgttcgactgctgcgacgacgggacggtgtgcgcgctgtcggcgacgtgcaccttctgtgtcttcggctggaacatggagcgcctcgggttcggcaacatatgcggaagcgctacaagctcccgggcggccgctc

SEQ ID NO: 92459 - DNA, 291 bp, Zea Mays
atggagtggaggctaactgctgtgtccctgcgctcgatggagaaagaaacagaggggtgggatgtgccggtgctcggtggagagggcggacacatgaacgaccacccaaactcaccaagccgccgggagctccagcagcgagccagcgggagtggaactggatggtcgctcacgtgtcctgcttctccaccctgcacaaacacgccgctctcaattgcatcatccggcgtactagtgcagttgcgcttgcaccccaatttataccaaggggtttatgaaactgatgcttag

SEQ ID NO: 92460 - DNA, 330 bp, Zea Mays
atggaaaccgatagtacatgtgtcgacggccggcgggctactgacgcagcggatgacgatggagactctccccgcgggtcggcgctggctggtcatcgatgccctggaagcgagtcacagttagacgtatccatcggaaaacacacaaaaatcgcatactgcgacgggtacaagggaggagtcagctacttgagacagaacggagacgaagaaacaaaggaggaggatgcggtgattgcaggggcaccggcaggggctgctgccatcgcgacggctctagggaagcagagacggaggcggcggaggatggctagggacgtaaggtgttga

SEQ ID NO: 92461 - DNA, 2365 bp, Zea Mays
catcgagttctttacatgtcaccgtcatcacacaaatcaaaacccgagcaaattaaccgacacctctacgccgtgggtaccacgccccccgggcccaccctacatggacccctccccagaccagagggtaaacagcgatcagttcgttaattaaccgatcaattccttaattaaccaaccgtgtggagggaggcgacagcggtggatgaaagaggtgtcctggaagcatcgcatctcgtgtccgcgtcgcctcattccatgacctctctctctctctctctcgcctcttcttcttcttcctcccctccccttctccccccatctgcggcggggttgattcgatttcgattcccttccccatccatcgcccacctcccctacagacagccaacgcaattcgctccccgaggcgcctccctgaccctgactccctccaccccacaacgtgcgcgctcactcgcgggcggggccgggcccgggccggcaggcacgctcaccgtcaccacccttattaattcctcttccgcgtccgcgcttcaaaacctcctccagtcctccgcctcgtcccccctcccccctctaccactctccgcagcaccccggcggccgcattgcttgccgccgcaccgtgtccggctagggcctctctgggctcctgcatttcgattccctcccctgcctgtgctttggtctgggccggttgcaaggagggggaagggagggaggatttgatcggagggcgaaaatgtgggcggagcgggtggtcggggagcgacggatgcggcagatccagcgcttcgcgcggaacgccaagctcaccgtcgtctgcctcctcctcaccgtcgtcgtgctccgcggcaccgtcggcgccggccgcttcggcacgccgcagcaggacctcatcgagctacgccagcacttcgtgtcccacccgcaccgggcgctcgccgagcaccacgacgccaggtccagggcctccaccaccaccacatcgtcctcgtcctcctccgcccgccgcgacgacgaccccgacccgccgccgaggacgctcagggacccgccctacacgctgggccccaagatctccgactgggacgagcagcgcgccgcctggcaccgccgccacccggagacgccgcccttcctcaacgacatcaagccacgggtgctgctcgtcacggggtcctcgcccaagccctgcgagaaccccgtcggggaccactacctcctcaagtccatcaagaacaagatggactactgccgcgtccacggcatcgaggtcttctacaacatggcgctgctcgacgccgagatggcaggcttctgggccaagctcccgctcatgcgggcgctgctcctcgcgcacccggaggtcgagttcctctggtggatggactctgacgccatgttcaccgacatggcattcgagctcccgtgggagcgctacgggccgtacaacctcatcatgcacggctgggacgagatggtctacgacgacaagaattggatcgggctcaacaccggcagcttcttgctgcgcaactgccagtggtcgcttgacatgctggatacctgggcgccaatggggccaaagggccctgtccgcattgaagccggcaaggtgctgaccaagtccttgaaggatcggccagtattcgaggccgacgatcagtcggccatggtgtacatcctcgcgacgcagcgcgagaaatggggtgataaggtttaccttgagaatgggtactacctccatggctactgggggatcttggtcgacaggtacgaggagatgcttgagaattacaagccagggctcggcgatcaccggtggccactcgtcacacactttgtcgggtgcaagccgtgtggcaaatttggagactaccctgtcgagcgatgcctcaagaatatggaccgtgcattcaattttggggataaccagatcttgcagatgtatgggttcacacacaagtcactagcaagcaggagagtgaagaggaccaggaacgagaccagcaacccacttgagacaaaggatgagcttgggttgcttcatccagcattcaaggctgtgaagacttccacatgattattagagtacaattcaacttgttattttcttggttcgttctagatcctgttgggtctaaatccaaagtgttctttttgtagaatcgggcgagagcaaaagtttgggttggggttatgggatggatatctttgttgtaatgtgaggtattaggagaattatgttatgtttatttattggcataagtcatgtcttacactcgtacaaacgagttaacggatgaactcaagttactggttgcatgatagatttcaatagagttccctgtttttctct

SEQ ID NO: 92462 - DNA, 2094 bp, Zea Mays
ggcagcgaccgttttgtcaccgcaacacccccgccgactccctcgccgccgccaggaatggagtccagcgctaagaagcttagcagcctccgtatcacctcactggatggcgatgatgacgaaaccgaggacccgcatcagccccctccagcaggaccctccgccgctgcagcagattctgatgacgacgatgaagaggaagaagcggaagtgactcttggtgtccttagcaaaccgaaacacccaggcctccttctccgccacttgttccccagcaaggccggcggcatcccggcgtggctagaccccgtgaacttgccgtcggggaagtccagctgctgcggtttttgtggcgagcctttgcagtttgttcttcagatttatgcagcagttgaagacaatgtagcagccttccatcgaactctgttcatgttcatgtgcccatccatggcgtgcttgcttcgagatcaacatgaacaatggaagcacaagcatgggaatccatgtagaagcgtgaaggttttccggtgtcaattgccacggactaatgccttctactcagctcaacctccaaagcatgaccggtctgacaaaccactgtgtccaggagcccatgtatgccactggtgtggtacctggaaaggtgataaaatatgtagtagctgtaagaaagcaagatactgttctgagaaacatcaggcactgcattggcgtactggtcataaaaatgattgcctccagataataagttcttctgctgcttcaaattcagttttgccaactgttggaaaagttcctgctaacactttttggccagaatttgagataaaaatagactatgaaggtagatttgattccgatagtggtgatgagaataactcgaagttgttggtgatgcaaagacatgggaaacctgatgctatgatgcagtcatggatggatcaatttgaggctgattctgacaacaaatgctgggcatcttttcaagagcgggtctcaagagcaccaaatcaagtgttgaggtattgtcgagaaccaaatgctaaacctctctgggcgttatcttctgggtgtccatcaaatgctgatatcccatcatgtagctactgtaaaggtccattatgttatgaatttcaggtaatgccacaattgctatatttctttgttgtgggaaatcaaccagactcccttgactgggcaacaattgctgtctacacgtgtcaaggggcatgtgaccaaagtgttagctacaaagaggagtttgcttgggttcaattgtaccctacaacaactacgaggcaataataatgtttgcctattccttgctgtccaatgctgcaggtgtcaaaaagtttgcagaaagtcagaaacaattcagtaaatacccccgccagaagaattggaggttgggatgctcgaggcagtgagtagtgagagcttcttgattcccattattgcacttatgccgagtatagatattttaagtttcacatgttctacattttaggtgcctgattttttttgttcaggcaacaggcaattttgttgtttgaatatagaaaaaacatgaattgtctcttgtgagttatctttttaattgtactagttggttgtataaggttgttgcatgctcaaaacgcaggcacttgaaatatagtaactctcaaccatgtgcatctatgtgaagtggcttgtagctttggaggaagaattgagtcaaaacggaatattgcactttaagttcttatacatggatctaagagtttcatgactcctgtgtccaccaaatgggttggcctttttcaatgttatggtttgcaattagtgttgagttggcgggctttatctgtagtattaattaattgtgccgcatcaagtgcgagtcaggtaaaaaagaatcgtgaaatgtggctgagaagttctgaactcgatttaatcctttccaaacccccttcgattcagacgcaaccgaacaagcgctaagtgggccactctgtggttgggtcgacattgtttctccttgatggaactactctcatgcctgcaaccatgtcgacctgcattaccaaagagtctttactaacttctgttatg

SEQ ID NO: 92463 - DNA, 1378 bp, Zea Mays
ggcagcgaccgttttgtcaccgcaacacccccgccgactccctcgccgccgccaggaatggagtccagcgctaagaagcttagcagcctccgtatcacctcactggatggcgatgatgacgaaaccgaggacccgcatcagccccctccagcaggaccctccgccgctgcagcagattctgatgacgacgatgaagaggaagaagcggaagtgactcttggtgtccttagcaaaccgaaacacccaggcctccttctccgccacttgttccccagcaaggccggcggcatcccggcgtggctagaccccgtgaacttgccgtcggggaagtccagctgctgcggtttttgtggcgagcctttgcagtttgttcttcagatttatgcagcagttgaagacaatgtagcagccttccatcgaactctgttcatgttcatgtgcccatccatggcgtgcttgcttcgagatcaacatgaacaatggaagcacaagcatgggaatccatgtagaagcgtgaaggttttccggtgtcaattgccacggactaatgccttctactcagctcaacctccaaagcatgaccggtctgacaaaccactgtgtccaggagcccatgtatgccactggtgtggtacctggaaaggtgataaaatatgtagtagctgtaagaaagcaagatactgttctgagaaacatcaggcactgcattggcgtactggtcataaaaatgattgcctccagataataagttcttctgctgcttcaaattcagttttgccaactgttggaaaagttcctgctaacactttttggccagaatttgagataaaaatagactatgaaggtagatttgattccgatagtggtgatgagaataactcgaagttgttggtgatgcaaagacatgggaaacctgatgctatgatgcagtcatggatggatcaatttgaggctgattctgacaacaaatgctgggcatcttttcaagagcgggtctcaagagcaccaaatcaagtgttgaggtattgtcgagaaccaaatgctaaacctctctgggcgttatcttctgggtgtccatcaaatgctgatatcccatcatgtagctactgtaaaggtccattatgttatgaatttcaggtaatgccacaattgctatatttctttgttgtgggaaatcaaccagactcccttgactgggcaacaattgctgtctacacgtgtcaaggggcatgtgaccaaagtgttagctacaaagaggagtttgcttgggttcaattgtaccctacaacaactacgaggcaataataatgtttgcctattccttgctgtccaatgctgcaggtgtcaaaaagtttgcagaaagtcagaaacaattcag

SEQ ID NO: 92464 - DNA, 822 bp, Zea Mays
gtccaaaaaccgcacgctgctttagagcagctttattttattttgtatgaaaacaaaaaaaaggggagagaaaacccaatctccgtacacaatacccttctatatccaaacaagacggaagggaaatgaagctcatcccagtccaatggtttagttgtaggcgtcggggttggcgacgaggtaggcctcggcacccttgaagatggcggtgacggactccttggccttggcgatctcgtccttcacctccacgcccggcagcagcttgtacgtggactcgaccttcaccacactcccgccgccggccgcgggctccaccttgatgtgcgacgtcgccgtttcgatggcgacgccgatgccgccgccctcgatgagcgtgttcttgcactcgcacttgtccgcgtcgaggaactcgagacgctccttcatgaagctgaacggcatgactgcaagagcgaccgcacgacgtcgtgcgcttagctgtttgatctatcaggcgagagagagagagagagggagaccatgctggtctgggctgggcatacctgaggtgaagttgaactgcctgacgctgccaacgccgccgtcgccctccacgggctgcgcgctggcgacgacgtgggaggcgaccttgggcgccagggtgtgccagtccatcacggcggcgcggaacaggcgctgcggggccaccggcgacgcgatctcgagggtccagctgttggcggaggccattactacttcagtgatcgatcggccgactaaacttggggctagctgaaggctgaagcagatggttttaggattgtagcttctgcttgcgtt

SEQ ID NO: 92465 - DNA, 2037 bp, Zea Mays
caccaaaacatagagtgtcgacttttctattggtgtgattgggggcactaaatacctaccacattgcactcagactacatatactgtgtttgtgtgttgtatgccgtatgcgtgtgtgagcttgcgcaaattggacatctaggccgtgcgtaccctgcgatgaaaggcgccgtcatcggcgcatcgaccgtcctggtcgtggcggtggtggccaccatctgcgtcgtttccttcaaaggcagcggcgatggcgggagggccgaggagggcgagatgtccacgtcggtgaagtccatcaagtccttctgccagcccgtggactacagggagacgtgcgagaaggcgctggaggcggcggccgggaacgccaccagccccacggagctggccaaggccatcttcaaggtgacgtccgaccggatcgcgaaggccgtgcgcgagtccgccctgctcaacgagctcaagcacgaccggcgcacgtcgggcgcgctccacaactgcggagagctgctggactacgccatcgacgacctccggacgacgttcgacaggctcggcggcttcgagatgaccaacttcaagagcgccgtggacgacctccggacgtggctgagctccgcgctcacgtaccaggagacgtgcctggacgggttcgagaacaccacgacgcccgccgcgggcaagatgcgcaaggcgctcaacagctcgcaggagctgacggagaacatcctggcgctcgtggacgagttctccgagacgctcgccaatcttggcctgccgagcttccaccgccggctcctcgcggagcacgcccgcggcgcgccctcgtggatgcccgacgccaagcgccggctgctgctggtctcccccggcgagaagggcttcaggcccgacgtgacggtggccaaggacggcagcggcgacttcaggaccatcaacgcggcgctggccaaggtgccgctgaagagcgccaccacgtacgtcatgtacgtgaaggccggcaagtacagggagtacgtgtccgtggcccggaacgtgacgaacctggtgatggtcggcgacggcgccaccaagacggtgatcacgggccacaagagcttcatgatgaacatcaccaccaaggacacggccacgatggaggcgatcgggaacgggttcctgatgcgcgggatcggcgtgaagaacacggcgggagccaagaaccaccaggcggtggcgctgcgggtgcagagcgacatgtcggcgttctacgagtgccggttcgacgggtaccaggacacgctgtacacgcacacgagccgccagtactaccgcgactgcgtcatcacgggcaccatcgacttcatcttcggcaacgcgcaggtggtgttccagaactgcctcatccaggtgcgcaagtgcatggacaaccagcagaacatcgtcacggcgcagggccgcaaggagaggcggtcggtgggcggcaccgtcatccacaactgcaccgtcgcgccgcacccggagttcgagaagagcgtcggccggttcaggaccttcctgggccgcccgtggaaggagcactcgcgcacgctctacatccagtcggagatcggcgggttcatcgacccgcagggctggctgccgtggctcggcgacttcggcctcagcacctgctactacgccgaggtggaaaaccacgggcccggcgccaacatgaccagacgcgtcaagtggaggggtatcaagaacatcacctaccagcacgcgctgcagaagtacaccgtcgagagcttcatccagggccagcactggctcccacagctcggcgtgccattcatcccggggctgctgccgcagcagcaatcgggcaggatacactgacatctaaggaagatgatatatgatcggcaggctgcgttgtcgatatgacgtggcactaacatgtacgtaccatggtttagtttattggttggtttatgctattttgactactactttttttatattcgataaaaaaatgcagtacaaaattaactaatgtgagcactgtttaaaact

SEQ ID NO: 92466 - DNA, 1481 bp, Zea Mays
ccaaaacatagagtgtcgacttttctattggtgtgattgggggcactaaatacctaccacattgcactcagactacatatactgtgtttgtgtgttgtatgccgtatgcgtgtgtgagcttgcgcaaattggacatctaggccgtgcgtaccctgcgatgaaaggcgccgtcatcggcgcatcgaccgtcctggtcgtggcggtggtggccaccatctgcgtcgtttccttcaaaggcagcggcgatggcgggagggccgaggagggcgagatgtccacgtcggtgaagtccatcaagtccttctgccagcccgtggactacagggagacgtgcgagaaggcgctggaggcggcggccgggaacgccaccagccccacggagctggccaaggccatcttcaaggtgacggtggccaaggacggcagcggcgacttcaggaccatcaacgcggcgctggccaaggtgccgctgaagagcgccaccacgtacgtcatgtacgtgaaggccggcaagtacagggagtacgtgtccgtggcccggaacgtgacgaacctggtgatggtcggcgacggcgccaccaagacggtgatcacgggccacaagagcttcatgatgaacatcaccaccaaggacacggccacgatggaggcgatcgggaacgggttcctgatgcgcgggatcggcgtgaagaacacggcgggagccaagaaccaccaggcggtggcgctgcgggtgcagagcgacatgtcggcgttctacgagtgccggttcgacgggtaccaggacacgctgtacacgcacacgagccgccagtactaccgcgactgcgtcatcacgggcaccatcgacttcatcttcggcaacgcgcaggtggtgttccagaactgcctcatccaggtgcgcaagtgcatggacaaccagcagaacatcgtcacggcgcagggccgcaaggagaggcggtcggtgggcggcaccgtcatccacaactgcaccgtcgcgccgcacccggagttcgagaagagcgtcggccggttcaggaccttcctgggccgcccgtggaaggagcactcgcgcacgctctacatccagtcggagatcggcgggttcatcgacccgcagggctggctgccgtggctcggcgacttcggcctcagcacctgctactacgccgaggtggaaaaccacgggcccggcgccaacatgaccagacgcgtcaagtggaggggtatcaagaacatcacctaccagcacgcgctgcagaagtacaccgtcgagagcttcatccagggccagcactggctcccacagctcggcgtgccattcatcccggggctgctgccgcagcagcaatcgggcaggatacactgacatctaaggaagatgatatatgatcggcaggctgcgttgtcgatatgacgtggcactaacatgtacgtaccatggtttagtttattggttggtttatgctattttgactact

SEQ ID NO: 92467 - DNA, 121 bp, Zea Mays
cctccttcctgaagtatccatgcttcagagaaaaatatcagtttcggctagaacagtacggacccgcttagggtttgaggtttatcctatgtaattaccctcttacctttgtataattgga

SEQ ID NO: 92468 - DNA, 1269 bp, Zea Mays
gaccaaaactctccccgcggaataaaagaagagatattttttttgtcacgccctcggccctccccgcggaataaaagctttttctctggcctcccttcctccgaatccatccatccatccatctattgtctcccttccaattcgatgcctttgtagcgctgctgcctcgccgcgtcgtcgcgggtccccgatttccgcttgctgctgcgcttccaacaccatggacggcgggggatccggcaatgcctccggcggcagcggcggcgcatcgacgtgctgctactacgcgctcctcggcatccgcaagaacgcctccgccaccgacatacgcgccgcttaccggaggctcgcgatgaagtggcacccggaccggtgggccagcgaccccggcgcggccggcgaggccaatcagcggttccagcggatccaggaggcatactccgttctgtcggacaaggggaagaaggccatgtacgacgccgggctcttcgaccccctcgacgacgacgaccaggtgaatcagcagagcctcggtttcgtttgttgtcctctcctctttttttcttctcccccatggggttcatgctgcttattgtctcgtcgaaatcagccaaatccttttgccattttgtgcgcggatatgatattatattaaaccttggggggagaatttaatttgtctgctctgctctgctctcggacggctaggatttctccgacttcatgcaggagatgctggtgatgatggatagcgtgaaaaacgagaagccggacacgctggaggacctgcagaagatgctggaggacatcgtgaagggcgacggcgggggcgggagcggcgcaggcgggcgggcgccgacggacggtgctcgacggacgcgcgttgcgccctacccgcagccgcagcgtgcgcgcaggtgaccggcgagcccgtgtacgagcgacgtacgcttcccttttggcgaaagggaccggaccccagcaacggacgggaggctctggaaaagaagaataaaaagtttcacctttctttttagttttaggccatcttcggatggtaatctacgcatcctttcatgtagcagtggtcgattgtgtaagctggggtttggggttgggtggtggtggtggtggataccggctgcgccgctgcaataacttgcggacgcgcggcggggactctgatttttttttatctcggcgacatttcgatttcgtgcccaattgtcactgaagatgatcctgactgttccattgccatttttgctc

SEQ ID NO: 92469 - DNA, 1075 bp, Zea Mays
gaccaaaactctccccgcggaataaaagaagagatattttttttgtcacgccctcggccctccccgcggaataaaagctttttctctggcctcccttcctccgaatccatccatccatccatctattgtctcccttccaattcgatgcctttgtagcgctgctgcctcgccgcgtcgtcgcgggtccccgatttccgcttgctgctgcgcttccaacaccatggacggcgggggatccggcaatgcctccggcggcagcggcggcgcatcgacgtgctgctactacgcgctcctcggcatccgcaagaacgcctccgccaccgacatacgcgccgcttaccggaggctcgcgatgaagtggcacccggaccggtgggccagcgaccccggcgcggccggcgaggccaatcagcggttccagcggatccaggaggcatactccgttctgtcggacaaggggaagaaggccatgtacgacgccgggctcttcgaccccctcgacgacgacgaccaggatttctccgacttcatgcaggagatgctggtgatgatggatagcgtgaaaaacgagaagccggacacgctggaggacctgcagaagatgctggaggacatcgtgaagggcgacggcgggggcgggagcggcgcaggcgggcgggcgccgacggacggtgctcgacggacgcgcgttgcgccctacccgcagccgcagcgtgcgcgcaggtgaccggcgagcccgtgtacgagcgacgtacgcttcccttttggcgaaagggaccggaccccagcaacggacgggaggctctggaaaagaagaataaaaagtttcacctttctttttagttttaggccatcttcggatggtaatctacgcatcctttcatgtagcagtggtcgattgtgtaagctggggtttggggttgggtggtggtggtggtggataccggctgcgccgctgcaataacttgcggacgcgcggcggggactctgatttttttttatctcggcgacatttcgatttcgtgcccaattgtcactgaagatgatcctgactgttccattgccatttttgctc

SEQ ID NO: 92470 - DNA, 1018 bp, Zea Mays
gaccaaaactctccccgcggaataaaagaagagatattttttttgtcacgccctcggccctccccgcggaataaaagctttttctctggcctcccttcctccgaatccatccatccatccatctattgtctcccttccaattcgatgcctttgtagcgctgctgcctcgccgcgtcgtcgcgggtccccgatttccgcttgctgctgcgcttccaacaccatggacggcgggggatccggcaatgcctccggcggcagcggcggcgcatcgacgtgctgctactacgcgctcctcggcatccgcaagaacgcctccgccaccgacatacgcgccgcttaccggaggctcgcgatgaagtggcacccggaccggtgggccagcgaccccggcgcggccggcgaggccaatcagcggttccagcggatccaggaggcatactccgttctgtcggacaaggggaagaaggccatgtacgacgccgggctcttcgaccccctcgacgacgacgaccagaagccggacacgctggaggacctgcagaagatgctggaggacatcgtgaagggcgacggcgggggcgggagcggcgcaggcgggcgggcgccgacggacggtgctcgacggacgcgcgttgcgccctacccgcagccgcagcgtgcgcgcaggtgaccggcgagcccgtgtacgagcgacgtacgcttcccttttggcgaaagggaccggaccccagcaacggacgggaggctctggaaaagaagaataaaaagtttcacctttctttttagttttaggccatcttcggatggtaatctacgcatcctttcatgtagcagtggtcgattgtgtaagctggggtttggggttgggtggtggtggtggtggataccggctgcgccgctgcaataacttgcggacgcgcggcggggactctgatttttttttatctcggcgacatttcgatttcgtgcccaattgtcactgaagatgatcctgactgttccattgccatttttgctc

SEQ ID NO: 92471 - DNA, 1461 bp, Zea Mays
gcaacgaacgtacccccaaatccccaatttcttttgctccgcgaattggctccgcctggctggggcagcgagcagacgcggggcgccgacgatgatggccgatgaggcagagagagtgccgccgtggcagcagggcggttggctcgatggacatgaaaacatcatttacgacatcctcctccgcctgcccccgaagtccgtggtccgttgtcgcgccgtctgcaagtcttggctccgcctcgcctccgatcacatcttccttgtcgaccatcaccgctgccagccctccctgcccctcctctacttcatcctcgacgacgtccgcgacccggatatcagcgagtaccggctcgaggagttggacctccacaccaacgacaacgagttgcagactgtcctcggattctccagccacgtcaattggtggatgccccatggccgtgagagacggctcgctctccatggctcctgcgacggggtcctcctcctatcctccgacgacagcctatacctctacaacccaaccacgcgccactggggttgcctcccaccccttcacagcgacaacaccatcgcaggattttactggcacaggatctcggacgactaccgggtgctctacttccggcgccatgaagatggaaagtactgctactacgtcatggaggccggcaccaagaggcagaggctggtcagtcgtcaggtatccctaatacactcctcatggccaaccaagtgtgcgcggcgcacaccaccggtcctcctccacggcaaccttcactggccccctgtctcatcaaggcccgagaccatagccgtcttcgacacggtcgccgaagtgctccggtttatgctttcccctgccgtctacgtgaacagcctgtttgactcaaatgtgaagctgcttgacatggatggtgttcttgccatgtcaggtagctgcagagaagctatcggggatgacgggccctcgagggttgatctgtggtttctggaggactacaacgaccgtgtttgggtctgcaagtaccgcattgaattgccagtggaagatatcagccgtttccatgaattcgaagatgtgtggaatgctgttgttgtgtcccatgagggagatgtgctggttgatctctggaatcgcctgttgggatatgacagggagggcaattcagtagcgaatttgttgtgtgattgcagcttgatggagattggtccacatatgcttaagcggagccttgttcctcatgcattgcttgggatgaacaaccatagtcccaacaaaccaccttttctctgatgactattagattggcctatgatttccatgagagttttggctatatggggtcatgatcttggatcgtttctcttgatttggctgtcttggcgacatgaaagatatgatcagggctcattgttctctttagaatagaaatatattctattgatacataaaaaaaa

SEQ ID NO: 92472 - DNA, 1758 bp, Zea Mays
gcattctttatccaatcgattgaagaacgttacagctagaggggcctcttcacttggagaaacctgaaaacgattttgatcaagaattcaagataagtgttggcaattgcaacgaacctaccacaaatccccaattcttctgctccgcctggctggggcagcgtgggcgcggaacgacgtcctgccggcatcagcagcatacggggggcgccgacgatgatggccgaggcagcgagagtgcagccgcggcagcaggacggttgggtcgatgaatttgaaggcgtcatgtacgacatcttcctccgcctgcccccgaagtccgtcgttcgatgccgcgccgtctgcaggtcttggctccgcgtcgcctccgaccgcaggttccttctcgaccaccaccgccgccagccctctctgcccctcctctacttcatcctcgacgacctccgcggcccggaggtcagccaaagcgagtaccggctcgaggtattggacctccgcgccaacgacaacaagttgcagactgtcctcggattctccagccacgtcaattggttgatgatcccccatgaccatgagagacggctcgctctccatggctcctgcaacggggtcctcctcctatcctccgacgaccgccagctatcctccgtcgaccgcctatacctctacaacccaaccacgcgccactggggttgcctgccaccacttcacagcgacaacaccatcgcaggactttactggcacaggatctcggacgactaccgggtgctctacttccggctccatgaagatggaaagtactgctactacgtcatggaggccggcaccaggaagcagaggctggtcagtcgtcaggtatccctaatacactccccatggccagccgggtctgcacggcgctcaccgccggtcctccttcatgacaaccttcactggccccctgtctcatcaaggcccgagtccatagccgtcttcaacacggtcaccgaagagttctggtttatgcgttctcctgccatctacgtggacagcctgcttatctcaaatgtgaagctgcttgacatggagggcgttcttgccttgtcaagtagctgcagagaggctactggggatgacgggcccttgagggttgatctgtggtttctggaggactacaacaacgaccgtgtttgggtctgcaagtaccgcattgaattgccggtggaagaaatcagccgtttccatgcattcctggatggatggaatgctgttgttgtgtcccatgagggagatgtgctggtttatctctggaatctcctgttgggatatgacagtgaaggaaattcagtagcaaatttgccgtgtgattgcagatttctggagattggtccacatatgcttaagcggagccttgttcctcatgcatcgcttgggatgtacaacccaacaaaccatcttttctctgatgactaatagattgggctatggtttccatgagagagagtttttggctgtagggtcatgataattggaccgtttcttttgatttggaaaaagagtgccaagctgatccgaaccatgcgtttcagagttcagattgttatcttctttagctgcaggcatttctttggtttgaacattttagtaataaacacacattgtgctggagatgttcaagttttcacagcatcattaggatgaggcaaatctgctatttcggttgaaccaattgtgtgtgtgcacttcggtgtattagtcaaaactgatacgtttctgtgc

SEQ ID NO: 92473 - DNA, 1260 bp, Zea Mays
atgaggctaccgatggtagaagccctactcgccaccgtcaacgtgaatttccagccagaagatcaactgcagaaccatcagatgcttacattagagtccggggtgctcggcttcgcacagcaggaaggggggcagaaggaggcgggcgtacttggtggatgctcgtcgcaggtgaaaacctggagaagggcggctgcactcgcctattcgtcgtcgaaggaaacaaatgagagagagatgggggagaaacggatgaacgggagtaagaacaaggaacgagctcgcatccggctccggcgtgagcggcgcgtcgtggggcttctcaaccgaggcaacgtcaccgtcgcggcgcagatgactggcggcttctccggctgggcatccggggccggcggatcggccatggcgaaccaagcaacccaagatttgggcgcggtgcagtgtgaaatggaaggtgatcgttcctactataccaatcttattaatggaggtttcgatacttttgaagatataccagaaactccaattgagttgcagcatactccttcaattgagttgcagcagactcctccagtagtaagggatctgaacatgtcatccaagcaaaatcataaggcaaaaggtaaaaaatttagtgaggatgaggatagactgcttgtttcagcttggttgaatgtcagtacaaatcctactcaagggacaaatcaaactagaggaacattttggaaaaggatttacgtattgtatgaggagaacagaagaaatgatgagaagacaagaaattatgcagaacgtagtgaggggtcattgttgcatcgctggagttctattcaagacgcagtggatcaggctgagaaactattcaaatctcaagatgcccacaatcgtacaaactttgggcagattttgtaccttctggcaattgcaattcgatggaggagaatgtctgctttttgtgtccaaactggagaggctcggcgttcgtacggccaggagcagatcgcatttgaaacggatccaccgcccgcccccttgcagttgcaggtggggtcctatgtcctagatattgtcgtcgtcttcctcgacttcttccaaatcgctagaaagatgggagagcgccccaacaaggtgaatgtgcaacttgtaaaggaaagttgcaaactggtgctcaatgtggtcgccgacgtgttggctatagtgaagtctgaaggagtggatctagacaaaacaatcattgatgtcatcttcattaaattatag

SEQ ID NO: 92474 - DNA, 3547 bp, Zea Mays
gcgagggagaacccagcagctcccattaatggactgcgcaacagcttaaactccgccgcccatttcaaacagaaccgaaccggccgcagcatcgcagcgcagcggtacgcgcctcggaggtggagggaatgtcggaggcggtggcgatcctctcgctctccgcgtccgccgtggtagaagacgtgctgcggcagcacgggtgccgcctcagcgaccgcgacctcgcgtcccgcagggccgaggaagctgcggggaggaggaacgaggcggcgggatggctgcgccgcacggtgggggccgttgccgcgcgcgatcttccggaggagccgtcggaggaggagtttcgcctcggcctccgcaacggccagatcctctgcggcgcgcttaatcgtgtccacccgggcgccgtcccgaaggcaagcgctccttgtgccgacggcgcggcgctgtcggcgtttcagtacttcgagaacgtgcgcaacttcctggtggcggcgcaggagatcggcctgccgtgctttgaggcctccgatttggagcagggagggaagagcgccagggtggtgaactgcgtcctcgcactgaagtcgtacggtgactggaagcaatgcggtggcaccgggccgtggaagtacggcgggaatcttaagccatcggtatccggcaagtccggccacgggaggaagaactctgaaccgttccggaggagccaatcgatcaatgaaggtgaagtgccctatgaggaagctgggttcaacggcgacgctcattttgattccagtgacatgtcaacatcccgcccccttaaaatgttggtcagtgcagttttgtccgacaaaaggccagatgaagttccacagctcttggagtccatgctgagcaaacttgttgaagaatttgaaaatcgtctaaacagccaaaatgaattggtcaaagcggctctaaaaagtggtattgataacaccaaatcattttcaaaatcaaaggtcctggttgagacccctcctaatactagtgggagaaagatggatacaggagatatttactgtaaccacaaaaaaacaaaaaaagaagcatcaagagaagtggcactgaagcaacatttaattttacaacaacagtcaaagaatgttgaggaacttaagagtgatctgataactacaagggcgggtatggagtatatgcaaatgaagtactctgaggatctcaaccttcttggaaggcacctgtttagcttggctcatgctgcttctggttatcacaaagttcttgaagaaaatagaaaactatacaaccaggtgcaggatcttaaaggaagtatcagggtatattgtagggtgcgtccctttttgcctggacaagcaagtccgtccactgtgggttccatcgacgagggcaacataaccattgtcaccccttccaagtctggaaaggaaggccggaaaacttttagcttcaataaggtttttggcccatcagcaacacaagctgaggtgttcttggatactcaacccctcattcgctcggtccttgatggatacaatgtttgtatcttcgcatatggccaaaccggatcagggaagacatacacgatgagtgggcccaagaacatgactgagcaaacccaaggcgtcaactatcgggcacttggtgatctatttaagcttgctgaacaaaggaaaggaaccttcatttatgatattgctgtacaaatgattgagatttacaatgaacaagttagggatctccttgtcagtgatggtctcaacaaaaaatatccttgaagaaattatgttttctgtctaattgtgttagtttctttatgttatatcatgctgccgcaggaaattgattttccttaatgaatacgtacattagagattcggaataattctcaaaatgggctaaatgttccggatgcaagccttgttcgtgtggcatcaacaatggatgtcatggaattgatgaatgttgggcaaaagaatcgtgctgttggcgcgactgcactaaatgacaggagtagtcgttcccacagttgtttaactgttcatgttcagggaagggatctgacatcagggacaatctttcgtggttgcatgcatctagttgatcttgctggaagtgaacgggttgataaatcagaggtcactggagaaaggttaaaagaagcacaacatataaacaaatcattgtcagccttaggggatgtaattgcttcgcttgcccaaaagaattcacatgtaccttacaggaatagtaaattaacacaacttctccaagattcacttggaggtcaggccaaaaccttgatgtttgttcatataagcccagaaagtgatgctgtaggagaaaccatcagcaccttgaagtttgctgagcgtgtgtcaactgttgaacttggtgctgctcgattaaataaagaatctggagaagttagagagcttaaagagcagattgctcgacttaaatcagcattagctgcgaaaaatttaggatcggagcaaatcatcagtcatgactctgaggcatttaatataaagatgccttcgcctggtttttcaaacacacgacagggtagctgtgatctactctctagccaaagtaacttcagacaaccaatggaggatgttggaaacatagaggctagagccaatcatacactgaggcaaaagaaaccaagctttgatctccaggatttattaacagcaagtgattctccttcatggccagatagcaatttgagggtaaattttcagatgggagatgaaagagaagcaattggtggggactggatagataaggttgtagtgaacaacaataattcagccagtgattgggagggtgacaacacagctttacctgactttttttaccagagatatcattcaggtatgagggagaagcagtaccagaggaacaacatgagacaaaaggatgaccacgagtatgaacagcaaaggcctcgattttactctacaaatactgatgattctgatgacattgacatagcaacaagtgattcctcagaatcagatgcattatggcagctcaatgtccaaagcatgaataactcaattagtgagagtggttcaaaggttaagaaaccacaaataaagcttagagatggttcagatgccaggacaccgattcattctcaaataccatcagggtcgagaaaagtcgcaaacggttcgagtagatctgttaggcagcctttaagcagaagcgacagcagaaggctttcatcaaatggaagacaaactggtgcaaagtagggacttacaatgatcgcgtgcagtttttgcctttttcttttctgtgtttgtcacgagagattgtgaggttgctctcgagtacagcaatgagtgacaataaacccaattgagtgtgtcagtgtggtgagttgtgatctcaacaactggtgtgtgaggccattaactttttttccttattggcttatcaggctacgttgagttcttgctaattctctgtatcttgtccataatataaatacataatgaaaagaaaggaaattgattgatcaaaa

SEQ ID NO: 92475 - DNA, 441 bp, Zea Mays
atgataagcatggttgcagacaccccaaatgagtgggcaatcatcaccagggaacttacagtcaggacagcagccatcaaaagccatcctgcatatgccacatgtctcatcctgtgcatcccacgtccaagaagccactgcatgccactgaagaatcttgaccttcatagtgctaccttgttggttgctgcctccacctctcgattcagccagtctgacgctcgcttgctttgctgctcctgctctgctcggagcttcggatggggcggagtgcggaggcgcggactgcggttcgcctgcgccggtgccgccctcgcaccctgggggcctgccggcctggactcgggtggcacggcgcggattcaaaagggtaggaggcactgcgcgaaggcagagggagctgggcagcaggccgccggggtggcgtcgtcggagtcgtaa

SEQ ID NO: 92476 - DNA, 363 bp, Zea Mays
atgataagcatggttgcagacaccccaaatgagtgggcaatcatcaccagggaacttacagtcaggacagcagccatcaaaagccatcctgcatatgccacatgtctcatcctgtgcatcccacgtccaagaagccactgcatgccactgaagaatcttgaccttcatagtgctaccttgttggttgctgcctccacctctcgattcagccagtctgtcacaagagatgctcagacgcagaagccggaagacagtagatacgcaatagcggttggaggacagcgccgctggcggccaggtagcggtcgccagtgcccgcccggtgagccgtggacttgtgcctggtgggctgcagagtgctaa

SEQ ID NO: 92477 - DNA, 133 bp, Zea Mays
atgtgggacttaagattatctccatgtgggaacttaagattatctttttataaactatttattaatattggtaacttatttgtaatttttggtcgaccctacaatatttttatgaatttaattgtattttgat

SEQ ID NO: 92478 - DNA, 183 bp, Zea Mays
atggacgaaggaggaagggagccgagcaaagggccactacctggagcggatgcacacaggatttgcagaacagagaaatcgaacaagatccaatcgatgggcaggggcagcatcaacctggggattctggggaacttggcaaaggcagaagaatcaattggaacttttggggagcatttgtag

SEQ ID NO: 92479 - DNA, 1376 bp, Zea Mays
atggtatatgcccgtgcgttgcaacggaaccaatacagctttcatcatcagctaaagcaaggtcccggcgcaaaaactatttacaaaaatgctcgtcgtcctctgtcggacaagagcgcctctcagcgtagtaccgaattttcctctaccgggaaaaaggcgaagaaagaaactaacagacagacagtcattaaaagctccggcgactatgctcccgcctccgtcggcggtgagcagttcaggtcaatatcgaacacgacgggcttcctcgccgacacagcggccggtggcgacggcgacagatccactaccgaagaacagtctgagtcgctctgcgccacggtgaccgccgacgccagcttgagcacacgacaccctacttccgcggcggctgcggcctgcccgaagaaatagtacgagtgcgtaacggggatgttgccgaaaggaaagcgtacggcggcggcgcccgtgcccgcggccgccgcgcggtggaacaggtctagctcgagcgacggcgagagcggcatgggtgcctacgcgtcgccgccgtcgctgcctcacaaacaacgccatcagggtcttcaaccagggcaagttctcttctcttcctgcattcttccaatcttcattctgctctgaccgaccgtgcccctctctctctctctctgtgtgtggtgtgtatgcaacagtaactgttcttccaagtcctgtcatgtttgcaaatgcttcaaaattatcttgcttagttactttacaataagattttggttcctgaattgaaaatactgccgcatggagatggaattattcagcatctgtgaaagaatttacttgatggaggtgcttagatgtttctttagctgttatcgttttattaatctcagttgcagtgcttattcacactattagtaactggcaactactgggccttatggtttatgatgaaatgttcaggtggcactgccagcagaagtgatccgttgacttcagctatgagcaacctgtgctgctgtgttcaagttgaccagtcgactgtggccatcagggagcagtttggcaagtttgacagcgtgcttgagccaggatgccactgcatgccttggttcgccggcaagcgtgtagctgggcatctcacactcaggctgcagcaacaggatgtgccctgtgagacaaaaacaaaggacaatgtttttgtgaatgtgatggcatctattcagtaccacgctctggctgacaaagcaagtgacgctttctacaaactgagcagcacaaggtcccatctgcacttcaatacagaaagaagaccattctcatcttcaagcactccaggaagacagaagtttgccataacaggaggtggttctaagcgcagataa

SEQ ID NO: 92480 - DNA, 1586 bp, Zea Mays
agccagcacagcacacacactggaaagtgcaagctgtagtgagacctgcgcgactgccagcgtgtatccgcgcggcaaggagcgtagcgcgcggtcgtcggcccgcacggccaccaactcccttggacgcacgcgcgcgcgcgaccagctgctaaccgtgcgcaagtagtagtgcgacttcgccgccggccgggatcgctagctcgatcgatcggcgggaccacatacgactccggtgtggccagcggcggccgggccggggaacgcacgtgctgcgagcgagcgagggcagacgctagctgttgccgggagctagccggcgcgcgatggggagggcgccgtgctgcgagaaggtggggctcaagcgagggaggtggacggcggaggaggaccagttacttgccaactacattgcggagcacggcgaggggtcctgggaggtcgctgcccaagaatgcaggcctgctccggtgcggcaagagctgccggctccgttggatcaactaccttcgggcggacgtcaagagggggaacatctccaaggaggaagaagacatcatcatcaagctccacgccaccctcgggaacaggtggtccctgatcgccagccacctccccggccgaacagacaacgagattaagaactactggaactcgcacctcagccggcagatccacacgtaccgccggaaatacaccgccgggccggacgacaccgccatcgccatcgacatgagcaagctgcagagcgccgacaggcggcgcggcggcaggaccccgggccggccgccgaagactagcgccagcaggaccaagcattcagacgccgatcagcccggcggcgaggcgaaaggcgcggcggcgtcgagcccgcggcacagcgacgcggtgaacccgggcccgaaccagcccaacagcagcagcggcagcacgggcacggccgaggaggaagggcccagcagcgaggacgcgagcgggccgtgggtgctggagccgatagagctcggggacctctggggggaggccgacagcgagatggacgccctgatgcctattgggcccggcggccacgactcggctgccctccaagggcttggcgcggtcggcggcgaggcccaggtggacgacctgttcgacatggactgggatggcttcgcggcccatctgtggggcgggccggagcaggacgaccacagcgcgcagctgcggcaggccgccgagccgatggaagcggctgctgttgccgctgccgctgccgctgcgacggcggcctgcaccccggacgatcgcgagctggaggcgttcgagacttggctcctgtccgactcgttctgacggctccggtcatcggaccgatcagacagacagacagaccaaccaaggtggcccggccatatggtcgacgccgctagtaggcgttgctcgtgtgtacagttttttttttctttttttattgtagatgttgttcttagctcgtgctgacgtgctgtttcgtgtatgacgtactggcatgtagaatagagagcagagagtcgtatggattggcgtgtaaaggtagttctcccgccggtgaagtgaagacaact

SEQ ID NO: 92481 - DNA, 3804 bp, Zea Mays
atgttgattctgaagaatgtcactgcggtacagctacacccggcaaaagtgcaggaaggcgttgatatcgccatcgaaaacgatgtgattgtcgctatcggcgatgccctgacgcaacgctaccccgacgccagcttcaaagagatgcatggccggattgtgatgccagggattgtctgctcgcacaaccatttttactcggggctttcccgcggaattatggcaacatcgccccttgcccggatttcatctcaacgctgaaaaatctctggtggcggctcgatcgcgcccttgatgaagagtcgctctattacagcggactgatttgttccctggaagcgattagagcggatgtacatcggttatcgatcaccatgcctctccggcgtatatcggcgggtcgctctccacattgcgcgacgcatttttaaaagttggcctgcgcgcgatgacctgttttgaaactactgaccgtaacaacggcatcaaagagttgcaggaaggtgtagaagaaaacatccgtttcgcccgtttgattgatgaggcgaagaaagcgacaagcgagccgtatctggtggaagcacatatcggtgctcacgcgccgtttaccgtgccggatgccggtctggagatgctgcgtgaagccgtgaaagccacaggccgtggtttgcatattcacgctgcggaagacctttacgacgtttcctacagtcaccactggtacggcaaagacctgctggcacgactggcgcaaattcgatctcatcgacagcaaaacgctggtcgctcatgggctgtacttgtcgaaagatgacatcaccctactcaatcagcgcgatgcgttcctggtgcataacgcccgttcaaacatgaacaaccatgtcggctacaaccatcaccttagcgacatccgcaatctggcgttgggaacggacggcattggttcggacatgtttgaagagatgaaatttgccttctttaaacatcgcgatgcgggtggtccgctgtggcctgacagttttgccaaagccctgactaacggtaacgaactgatgagccgcaactttggcgcgaaatttgggcttctggaagccggttacaaagctgatttaaccatttgcgattacaactcgccgacgccgctgctggcagacaatatcgccgggcatatcgctttcggtatgggctcaggcagcgttcacagcgtgatggtcaatggtgtgatggtctatgaagaccgtcagtttaacttcgattgcgattccatttatgcacaagccagaaaagccgctgccagtatgtggcgtcggatggatgcgctggcataaatgacagatgccctcttcccgcagggaagagggttaaataaggaaagaagatgattgaacaatttttcaggcccgactctgtcgaacaggcgctggaactgaagcgccgctaccaggatgaagccgtctggttcgccgggggcagcaaactcaatgctacaccaacccgtaccgataaaaagattgccatttccttacaggatctggaactggactgggttgactgggataacggtgcactgcggattggcgcaatgtctcgcttgcagccactgcgtgatgcgcgatttattcctgcagcgctgcgtgaagccctcggttttgtttactcacgccatgttcgtaatcagtcgaccattggtggtgaaatcgccgcccgccaggaagagtcggtgctgcttcccgtcctgttggcactggatgctgaactggtttttggcaacggcgaaacgctgtcaatcgaggactacctggcctgcccatgcgatcgcctgctaaccgaaattatcattaaagatccgtatcgcacctgtgcgacccgcaaaattagccgttctcaggcaggtttaaccgtcgtgacggcagccgttgcaatgacagaccacgacggtatgcgaattgcgctggatggcgtcgccagtaaagcactgcgtctgcatgatgtcgaaaaacaaaatctggaaggcaatgcacttgaacaggctgtcgccaacgccattttcccgcaggaagatttgcggggcagcgtggcctataaacgctatatcacgggagttctggtagccgacctgtatgccgactgccaacaggctggggaggaagccgtatgatcatccactttactttaaatggcgcgcctcaggagctaaccgttaatccaggcgaaaacgtgcaaaagctgttgtttaacatgggaatgcactctgtacgcaacagtgatgatggtttcgggtttgccggttctgacgcaataatctttaacggtaatatcgttaacgcgtccttgcttattgccgcacagttagagaaggcagatattcgtaccgcagaatctctgggcaaatggaacgagttaagtctggttcaacaggcaatggttgatgttggcgtggtgcagtctggttataacgatccagctgcagctctgattatcaccgatcttctcgatcgcatcgccgcacctacccgcgaagagatcgacgacgcgctttctggtttgttcagccgcgatgctggctggcagcaatactatcaggtcattgaactggcggttgcacgtaaaaataatccgcaggccaccattgatatcgctccgactttccgtgacgacctagaagtcattggtaagcattatcctaaaactgatgccgcgaaaatggtgcaggcgaaaccctgctatgttgaagaccgcgtaacggctgacgcctgcgtcattaaaatgttacgtagcccacacgctcacgcactgattactcatctggatgtcagcaaagctgaagccttaccgggcgtcgttcacgttattactcacctgaattgcccggatatctactataccccgggtggtcagagcgcaccggaaccgtcaccgcttgaccgccgtatgttcggcaagaaaatgcgtcacgtcggcgatcgtgttgctgcggtcgtcgcagaaagtgaagaaattgcgctcgaagcactgaagctcatcgacgttgaatatgaagtgcttaagccggtaatgtcgatcgacgaagcaatggcggaagatgcgcctgtcgtgcacgatgaaccggtggtgtatgttgctggtgcgccagatactctggaagacgataacagccatgcagcccagcgcggcgagcatatgatcatcaacttcccgatcggttctcgccctcgcaaaaatatcgccgccagtattcatggtcatattggcgatatggacaaaggctttgccgatgccgatgtgatcattgagcgaacctataactcaacgcaagcgcagcagtgcccgactgaaacacatatctgctttactcgtatggacggcgatcgtctggttatccacgcctccacccaggtaccatggcacttacgccgccaggtcgcgcgcctcgtgggcatgaaacagcataaagttcatgtcattaaagagcgagttggcggcggttttggttccaaacaggacatcctgctggaagaagtgtgcgcctgggcaacctgcgtgaccgggcgtccggtactgttccgctacacccgtgaagaagagtttattgctaacacctctcgtcacgtcgcgaaagtcaccgtcaaactgggagcgaaaaaagatggtcgcctgacggcagtgaagatggatttccgcgccaacactggcccttacggcaaccactcactcaccgtaccgtgtaacggaccggcgctgtcgctgccgttatatccgtgcgataacgtcgatttccaggtcaccacctactacagcaacatt

SEQ ID NO: 92482 - DNA, 420 bp, Zea Mays
gaagccgctcgctgcctcgaatgtaactacgtttgcagcaagtgtgtggatgtctgcccgaaccgcgccaacgtctccattgcggtcccaggcttccagaaccgtttccagacgctgcacctcgacgcttactgtaacgaatgcggcaactgcgctcagttctgtccgtggaacggtaaaccgtacaaagacaaaatcaccgtcttcagcctggcgcaagactttgataacagcagcaacccaggcttccttgtggaagattgccgggtacgagtacgtctgaataaccaaagctgggtgttaaacatcgacagcaaaggtcagtttaacaacgtaccaccggagctgaacgatatgtgccgcatcatcagccatgtccaccagcatcatcattatctgctgggccgcgtggaggtgtaa

SEQ ID NO: 92483 - DNA, 256 bp, Zea Mays
aaagaagatgatgtaggcggtccagacctcggggtacatgaactactcagtgttcctgtttagatccgggggcggcaccacctgcacatacaactttgccatcgacacagggtgggaggggggctccgccatgatggccggagaagcgagcgccggggaccggggaagcgagcgccgtggcgagcatcgcggacgcagggcagagagggagatggatggcggcggttgcgcgggggcgggcgggggcacgacctcg

SEQ ID NO: 92484 - DNA, 872 bp, Zea Mays
tacaagcctgaatgagctagagatccatctgcttctgtacgtgctcgtcaggtacgctcgtaaaaagaaaagaaaaaaaaagaagagatcgagatcgatctgttgacgacgcccccgtcgccgatatgggcgacctctctgtcggccacagccgccgctggtgcggccgtttcgcggccgtcctttgcctgtgcgcggccttctgcaagccagatgaactcccgatggatccactgccgaacttgccgccggcgaggtcgctgcagtgcttcgaggacgaacaggtgtacagctgctgcgagggcgcgtacaggctaaacccatcgggaatcatcgccgttcccgtcggcgcggtggactactactgcggcggcgcgtgcgtggtggagacggaggacgtgctcaactgcgtggccagcgccctggacggcttcgccttctacaacggggcctccgtggaggacgtgcgctacgcactcaggcggggctgcagccacaccgccagaagaggcgacttcaacgatttggagccgcatctgggcgactaccctgacatctatggcgacgatgatgaacacagctttggcagcaaggttgttgcagctcctctgaggttgctcgcgtttcttggcggtgcggggctgttcttcctgggcccttgaacgaagatataaaagaactagcgatgtgatccgcgtaaatatatactccgtatatagcatgacatgagtatctagtttgtcttatatggtaaaccatactaaattttcttgtatggcattaaaaaaaattaagactttatttagttatttgactagttgttctctctggatcctctaatcagttcgaactctataagcttttttattcca

SEQ ID NO: 92485 - DNA, 919 bp, Zea Mays
ctccgacgaccttgaatattcactggccatttaatttctacttacaagcctgaatgagctagagatccatctgcttctgtacgtgctcgtcaggtacgctcgtaaaaagaaaagaaaaaaaaagaagagatcgagatcgatctgttgacgacgcccccgtcgccgatatgggcgacctctctgtcggccacagccgccgctggtgcggccgtttcgcggccgtcctttgcctgtgcgcggccttctgcaagccagatgaactcccgatggatccactgccgaacttgccgccggcgaggtcgctgcagtgcttcgaggacgaacaggtgtacagctgctgcgagggcgcgtacaggctaaacccatcgggaatcatcgccgttcccgtcggcgcggtggactactactgcggcggcgcgtgcgtggtggagacggaggacgtgctcaactgcgtggccagcgccctggacggcttcgccttctacaacggggcctccgtggaggacgtgcgctacgcactcaggcggggctgcagccacaccgccagaagagcgcaggcgacttcaacgatttggagccgcatctgggcgactaccctgacatctatggcgacgatgatgaacacagctttggcagcaaggttgttgcagctcctctgaggttgctcgcgtttcttggcggtgcggggctgttcttcctgggcccttgaacgaagatataaaagaactagcgatgtgatccgcgtaaatatatactccgtatatagcatgacatgagtatctagtttgtcttatatggtaaaccatactaaattttcttgtatggcattaaaaaaaattaagactttatttagttatttgactagttgttctctctggatcctctaatcagttcgaactctataagcttttttattcca

SEQ ID NO: 92486 - DNA, 702 bp, Zea Mays
tatcttagggccaacagatcgtgtacatattgggagtaagctgctggaggtagcgagaacggacagcagaagcgtgcggcattctacaaggtttttctttctaaaaacatacaatgcctccaactattcgtgtagtacatttatttttgttcaattaagtaagcgcgtgtaatccacacaccatggaaagaccaccacacagcgtacagaaagatcaccttcgcctggaccctctgcccctgcgttcggtgcctctagcatgcttcgtctcggtctcgggctccggcacggcgcacctggggcacatccagtcgtcgtcggggacggcgtccaggggagggtcgcagcagtcgatgtgcatgccgatcccgcagccggcctcgccggcctcgtcgccgcagatcagcatcacgtctccccggtccctgcggccgcacgccgagcagctcaggtcctccggatcgtcgtcttccgacggttccgacttctccgccgttgccatctctacctgcttcttcgtgagtttctccagggacttgctggccacgcagttcgtctcgaagagaacgtgccggtccaggggctggcccggcttgcacacgtactcgaccaggtaatcggcgctgacacagggaatgccgtggctgatgaattcctggacccacgcgtctgttcgtgatatgctctctgataccacggcga

SEQ ID NO: 92487 - DNA, 2510 bp, Zea Mays
cttgccccgccgtataggagtatataataacctcctctctcttctccccatctcgccttcgattgcccttccggccatcctacctcctaccctctccacctctcctcccacccctcccctccccttccgtgtcctcccctcgcctggggatcgattcaggctacgcgtggggttgcgtccattgatgcgagggaggcaatggcggtgtcctcgccttcttctgctccggagaagaagaggaagtggctgctcagcaacaggaaggtgaccgacaagtacctgcgtgaggcgaggaagattcttgcggcggcgccagagtgtggcggcggtgacgcggtggcggcgctcggcctggtcgacgcggcgctggagctgtcgccgcggatggaggccgccctggagctgcgggcgcgcgcgctcctcgcgctgcgtcgctacagggaggtcgcggagatgctccgcgattacatccccagctgcggcaagtcgtgctctggcgaggacacctcctcgtcctcgtcggcgtccctcttgtccactggctccggtgatctcggcacgatctcccgcgccaagctcctctcgcccgaccgccaccgctccgacgacgcggaacctgacgcccgccccgtccgctccttccgctgcttcgacatctccgagctcaagcgccgcgtccttgccggcctctccaagaacccgaacaccgatacccagtggaggtacttggtcctcggccaagcttgcttccacctcggcctcatcgaggacgctatggtgctgctgcagaccggccgccgcctcgcttcggcggcgttccgccgcgagagcgtgtgctggtcggacgacagcttctcgtcgtcgtcgtcgtcctccgcgaccgccgcggctccctgcgtcccgtccggcaagacatccagctccggttgggcgttcataatcccggcgacggagtcggaggctgtgtcccagctcctggcgcacgtgaagctcctgctccggcgccgcgcggctgccatggccgcgctggacgctggcctcccggccgaggccgtgcgccatttctccaagatcctcgaggcgcgccgtggcgtgctgccgcacccgttcgccgccgcgtgcctcgtgggccgcgccgccgcgttccaggccagcgggcgtccggccgacgccatcgcggactgcaaccgcgcgctcgctctggaccctgcctacatcccggcgctccgcgcccgcgccgacctcctgcagtccgtgggcgcgctcgcggactgcctgcgtgacctggaccacctcaagctcctgtacgacgccgcgctacgcgacggcaagctcccggggccccggtggcggccgcagggcggcgtgcggtaccgcgagatctccggcgcgcaccgcaagctgacggcccgcatccaggggctgcgcggccgcgtcgccgccggcgaggcgtgcaacatcgactactacctgctgcttggcgtgcggcgcgggtgcacgcggtccgagctggagcgcgcgcacctgctgctctccctgaagctcaagcccgaccgcgccgtggtgttcggggaacgcctggagctcgtggacgagcaccgcgacctggaggcggtgcgtgaccaggcgcgcatgtccgcgctgctgctgtacaggatgctgcagaaggggtactcgttcgtcatgtcagccgttctggacgaggaggccgccgagaggcagagggcaaaggacgccgcggccgcggccgcggccgcagctgccgcgctggcggccaagcaggaagctccgaagcaggaaccaccgccgccggtgcctgagaaatccgagaacacggagagcggccgtccaagaagcccgccaccgccagggcgcgcgcagacggcgaaaccgaaaccgaagcccaaggccaaggccgcgaccaccacggcgacaatgcccaaggcggcggcggccgtgacgtctacggcccctgtttaccagggggtgttctgccgcgacatggcggtggtgggaaccctgctgtcccgcggcggcgggttcgaccgcgctctcccggtgaagtgcgaggcaatgagctgctgacgaaacgtgacatgtgcgacgtggcgtgcaaggacaggcgcaacgtgagatccagcgaggtggcgggaacgcggtgatgtgtttgaattgtttggtcgtccagctcgctgtggtactgtacagctgggggggaagtgaacaggtggtattggcatttggtattgggtgggagtgggactgacggaggggagaaaggaaaatggcgagttttaagaggacggtaattttggctgcatcttcatgaatgagttgttacattgcagtgcttctagtcgtgcccttgtacatcgccgtcgctgcctcgtgcttgcaggtttcacgctgaaacctgctccggctactgctgctggtctgtactgtacagtcgttgattgtttttgcaccaaaatgcaagatcagattctgcacccagccccatgaacata

SEQ ID NO: 92488 - DNA, 2472 bp, Zea Mays
cttgccccgccgtataggagtatataataacctcctctctcttctccccatctcgccttcgattgcccttccggccatcctacctcctaccctctccacctctcctcccacccctcccctccccttccgtgtcctcccctcgcctggggatcgattcaggctacgcgtggggttgcgtccattgatgcgagggaggcaatggcggtgtcctcgccttcttctgctccggagaagaagaggaagtggctgctcagcaacaggaagtcccacctgaacgtttcttggtgttcaagaactgcacgagagccaagcttgtgccttttgacttctggaggacttgacgtccgaatgccaggagggcgtagaaccgttcgcgtctctgaagctcgctgtgaccgacaagtacctgcgtgaggcgaggaagattcttgcggcggcgccagagtgtggcggcggtgacgcggtggcggcgctcggcctggtcgacgcggcgctggagctgtcgccgcggatggaggccgccctggagctgcgggcgcgcgcgctcctcgcgctgcgtcgctacagggaggtcgcggagatgctccgcgattacatccccagctgcggcaagtcgtgctctggcgaggacacctcctcgtcctcgtcggcgtccctcttgtccactggctccggtgatctcggcacgatctcccgcgccaagctcctctcgcccgaccgccaccgctccgacgacgcggaacctgacgcccgccccgtccgctccttccgctgcttcgacatctccgagctcaagcgccgcgtccttgccggcctctccaagaacccgaacaccgatacccagtggaggtacttggtcctcggccaagcttgcttccacctcggcctcatcgaggacgctatggtgctgctgcagaccggccgccgcctcgcttcggcggcgttccgccgcgagagcgtgtgctggtcggacgacagcttctcgtcgtcgtcgtcgtcctccgcgaccgccgcggctccctgcgtcccgtccggcaagacatccagctccggttgggcgttcataatcccggcgacggagtcggaggctgtgtcccagctcctggcgcacgtgaagctcctgctccggcgccgcgcggctgccatggccgcgctggacgctggcctcccggccgaggccgtgcgccatttctccaagatcctcgaggcgcgccgtggcgtgctgccgcacccgttcgccgccgcgtgcctcgtgggccgcgccgccgcgttccaggccagcgggcgtccggccgacgccatcgcggactgcaaccgcgcgctcgctctggaccctgcctacatcccggcgctccgcgcccgcgccgacctcctgcagtccgtgggcgcgctcgcggactgcctgcgtgacctggaccacctcaagctcctgtacgacgccgcgctacgcgacggcaagctcccggggccccggtggcggccgcagggcggcgtgcggtaccgcgagatctccggcgcgcaccgcaagctgacggcccgcatccaggggctgcgcggccgcgtcgccgccggcgaggcgtgcaacatcgactactacctgctgcttggcgtgcggcgcgggtgcacgcggtccgagctggagcgcgcgcacctgctgctctccctgaagctcaagcccgaccgcgccgtggtgttcggggaacgcctggagctcgtggacgagcaccgcgacctggaggcggtgcgtgaccaggcgcgcatgtccgcgctgctgctgtacaggatgctgcagaaggggtactcgttcgtcatgtcagccgttctggacgaggaggccgccgagaggcagagggcaaaggacgccgcggccgcggccgcggccgcagctgccgcgctggcggccaagcaggaagctccgaagcaggaaccaccgccgccggtgcctgagaaatccgagaacacggagagcggccgtccaagaagcccgccaccgccagggcgcgcgcagacggcgaaaccgaaaccgaagcccaaggccaaggccgcgaccaccacggcgacaatgcccaaggcggcggcggccgtgacgtctacggcccctgtttaccagggggtgttctgccgcgacatggcggtggtgggaaccctgctgtcccgcggcggcgggttcgaccgcgctctcccggtgaagtgcgaggcaatgagctgctgacgaaacgtgacatgtgcgacgtggcgtgcaaggacaggcgcaacgtgagatccagcgaggtggcgggaacgcggtgatgtgtttgaattgtttggtcgtccagctcgctgtggtactgtacagctgggggggaagtgaacaggtggtattggcatttggtattgggtgggagtgggactgacggaggggagaaaggaaaatggcgagttttaagaggacggtaattttggctgcatcttcatgaatgagttgttacattg

SEQ ID NO: 92489 - DNA, 2764 bp, Zea Mays
cttgccccgccgtataggagtatataataacctcctctctcttctccccatctcgccttcgattgcccttccggccatcctacctcctaccctctccacctctcctcccacccctcccctccccttccgtgtcctcccctcgcctggggatcgattcaggctacgcgtggggttgcgtccattgatgcgagggaggcaatggcggtgtcctcgccttcttctgctccggagaagaagaggaagtggctgctcagcaacaggaaggtcagtgccgccggctcccgtcttcctctgctggctcctccaccatccttgagctgggctcccttcctctcccacagtcccacctgaacgtttcttggtgttcaagaactgcacgagagccaagcttgtgccttttgacttctggaggacttgacgtccgaatgccaggagggcgtagaaccgttcgcgtctctgaagctcgctgtgcgtgccttttgtttgtttcgtttcgttcaacaacagcttggttccagcgcgttctgtccggtggcttgtcctgttttggttccgtttgttttgtttgtctcccccccaaaagaatgatctcatcccagagtggtcaatccggctctgtttagagggaagaatgttgccttcgctgcggaaaatctgatgtttcccggttccgttttcgccaggtgaccgacaagtacctgcgtgaggcgaggaagattcttgcggcggcgccagagtgtggcggcggtgacgcggtggcggcgctcggcctggtcgacgcggcgctggagctgtcgccgcggatggaggccgccctggagctgcgggcgcgcgcgctcctcgcgctgcgtcgctacagggaggtcgcggagatgctccgcgattacatccccagctgcggcaagtcgtgctctggcgaggacacctcctcgtcctcgtcggcgtccctcttgtccactggctccggtgatctcggcacgatctcccgcgccaagctcctctcgcccgaccgccaccgctccgacgacgcggaacctgacgcccgccccgtccgctccttccgctgcttcgacatctccgagctcaagcgccgcgtccttgccggcctctccaagaacccgaacaccgatacccagtggaggtacttggtcctcggccaagcttgcttccacctcggcctcatcgaggacgctatggtgctgctgcagaccggccgccgcctcgcttcggcggcgttccgccgcgagagcgtgtgctggtcggacgacagcttctcgtcgtcgtcgtcgtcctccgcgaccgccgcggctccctgcgtcccgtccggcaagacatccagctccggttgggcgttcataatcccggcgacggagtcggaggctgtgtcccagctcctggcgcacgtgaagctcctgctccggcgccgcgcggctgccatggccgcgctggacgctggcctcccggccgaggccgtgcgccatttctccaagatcctcgaggcgcgccgtggcgtgctgccgcacccgttcgccgccgcgtgcctcgtgggccgcgccgccgcgttccaggccagcgggcgtccggccgacgccatcgcggactgcaaccgcgcgctcgctctggaccctgcctacatcccggcgctccgcgcccgcgccgacctcctgcagtccgtgggcgcgctcgcggactgcctgcgtgacctggaccacctcaagctcctgtacgacgccgcgctacgcgacggcaagctcccggggccccggtggcggccgcagggcggcgtgcggtaccgcgagatctccggcgcgcaccgcaagctgacggcccgcatccaggggctgcgcggccgcgtcgccgccggcgaggcgtgcaacatcgactactacctgctgcttggcgtgcggcgcgggtgcacgcggtccgagctggagcgcgcgcacctgctgctctccctgaagctcaagcccgaccgcgccgtggtgttcggggaacgcctggagctcgtggacgagcaccgcgacctggaggcggtgcgtgaccaggcgcgcatgtccgcgctgctgctgtacaggatgctgcagaaggggtactcgttcgtcatgtcagccgttctggacgaggaggccgccgagaggcagagggcaaaggacgccgcggccgcggccgcggccgcagctgccgcgctggcggccaagcaggaagctccgaagcaggaaccaccgccgccggtgcctgagaaatccgagaacacggagagcggccgtccaagaagcccgccaccgccagggcgcgcgcagacggcgaaaccgaaaccgaagcccaaggccaaggccgcgaccaccacggcgacaatgcccaaggcggcggcggccgtgacgtctacggcccctgtttaccagggggtgttctgccgcgacatggcggtggtgggaaccctgctgtcccgcggcggcgggttcgaccgcgctctcccggtgaagtgcgaggcaatgagctgctgacgaaacgtgacatgtgcgacgtggcgtgcaaggacaggcgcaacgtgagatccagcgaggtggcgggaacgcggtgatgtgtttgaattgtttggtcgtccagctcgctgtggtactgtacagctgggggggaagtgaacaggtggtattggcatttggtattgggtgggagtgggactgacggaggggagaaaggaaaatggcgagttttaagaggacggtaattttggctgcatcttcatgaatgagttgttacattg

SEQ ID NO: 92490 - DNA, 114 bp, Zea Mays
aatgaaggttcaagggtccaggacgtacgtggtggcaacaaaaagaaaaggggacaagatcatcccattgttaagcttatcggatcaggcaggttggcacacgtctacgtgttg

SEQ ID NO: 92491 - DNA, 1235 bp, Zea Mays
ctctgcagattggcggcagcaaagcaacacgcgcctcgatcctcctcgcccctccggcctctcctcccctccctgcacccgcacctgcggagagcgccgcaagctagctgcagaggagcgagacagtagcaggaggaggacgagaggaagaagagatggcgggctgtgatggagccaagtcgtcggcgtccatggaggaagaggcatgcgcggagaagaagtacggagggatcgcacccaagaagcccttgatatccaaggaccacgagcgcgcctacttcgattctgcggactgggtgctgggcaagcaagccgcgaacagcagcagcagcacgaggaccgcagccgcggtcgagtctctgaagcccaagctgaagagaacgccgcaccaccagctgccgcctcgtaagcccacctgcgcttccagttgagacgcatggccacgcgtcgcagctgctggaggaggagctcggtcagagtcaaggactgaggatgccgacgagctcgagctcggataaatgttttagctggtccggaatcgtagggacgacgacgagccagaaagatccgaatccgagatgccgtctggcttcttggcgagcagcgcctgttattgtgtgccataaagaacggatcaattaattatcaattgtctggctgaattctggcatggcacctggtgtttgaatgacctacagctacagaagcccagtatttggacacgggccgtgcaattcctcacgcaggccgccggctttgttgggctcccccaccgttcgaggctcgtggccagccagccagccccatccactgtctatccttctcagcgtaggtagtagacggcctacccccgatttcggcccagctcctactgctttctgcaagtaatagtgaatttggttccaccaaatataattatatacgtaacacgatttgagctcatcatgcggatctagcttttgcgccagaaagaaaagatgatcacatgggctacaccaactgactagccctgttggggcatgctgtttttgccctctacgtacgtacatgcgatgggcgtatcattggcagatcagtctaaccgctagctcggggtatgaatgactgccgccgtgatcctcatcaagggtggagctgttaggaggtatttgaaaaaaattagtgacctctatggaattatgtgaggattgtccccctccctgctcatcagctcgtcgcaaacgctgaaacgcacg

SEQ ID NO: 92492 - DNA, 1205 bp, Zea Mays
ctctgcagattggcggcagcaaagcaacacgcgcctcgatcctcctcgcccctccggcctctcctcccctccctgcacccgcacctgcggagagcgccgcaagctagctgcagaggagcgagacagtagcaggaggaggacgagaggaagaagagatggcgggctgtgatggagccaagtcgtcggcgtccatggaggaagaggcatgcgcggagaagaagtacggagggatcgcacccaagaagcccttgatatccaaggaccacgagcgcgcctacttcgattctgcggactgggtgctgggcaagcaagccgcgaacagcagcagcagcacgaggaccgcagccgcggtcgagtctctgaagcccaagctgaaggtcagttggaccatcacaacaacacccacccacacagctcaagctgatagcgaaactccacttccactccacctgaatgagtccatgtgatctctctccagcaccgatgagactgaactcgctaacggtctgtccctctctccctgtccagagaacgccgcaccaccagctgccgcctcgtaagcccacctgcgcttccagttgagacgcatggccacgcgtcgcagctgctggaggaggagctcggtcagagtcaaggactgaggatgccgacgagctcgagctcggataaatgttttagctggtccggaatcgtagggacgacgacgagccagaaagatccgaatccgagatgccgtctggcttcttggcgagcagcgcctgttattgtgtgccataaagaacggatcaattaattatcaattgtctggctgaattctggcatggcacctggtgtttgaatgacctacagctacagaagcccagtatttggacacgggccgtgcaattcctcacgcaggccgccggctttgttgggctcccccaccgttcgaggctcgtggccagccagccagccccatccactgtctatccttctcagcgtaggtagtagacggcctacccccgatttcggcccagctcctactgctttctgcaagtaatagtgaatttggttccaccaaatataattatatacgtaacacgatttgagctcatcatgcggatctagcttttgcgccagaaagaaaagatgatcacatgggctacaccaactgactagccctgttggggcatgctgtttttgccctctacgtacgtacatgcgat

SEQ ID NO: 92493 - DNA, 486 bp, Zea Mays
ctctgcagattggcggcagcaaagcaacacgcgcctcgatcctcctcgcccctccggcctctcctcccctccctgcacccgcacctgcggagagcgccgcaagctagctgcagaggagcgagacagtagcaggaggaggacgagaggaagaagagatggcgggctgtgatggagccaagtcgtcggcgtccatggaggaagaggcatgcgcggagaagaagtacggagggatcgcacccaagaagcccttgatatccaaggaccacgagcgcgcctacttcgattctgcggactgggtgctgggcaagcaagccgcgaacagcagcagcagcacgaggaccgcagccgcggtcgagtctctgaagcccaagctgaagagaacgccgcaccaccagctgccgcctcgtaagcccacctgcgcttccagttgagacgcatggtaatgtagcttgcgtaggtagtagacggcctacccccgatttcggc

SEQ ID NO: 92494 - DNA, 2194 bp, Zea Mays
cgccacggcggatctgcaccacccgctcctcatctccgccctccacatataaaaaacggcaaagcgcccccacttgttcggacgactctgcgcgcttccatcccccccccccccccaacagtcccacaccacctgcatatctccgtgcggccgtgccaagtcaaagtcgcacctcagctctgccgaggttggcattggtggtggtgacccggcgatggcggcggagcgggacatcgacgacctgccgcggaacgacgccaactacacggcgctcacgccgctctggttcctcgagcgcgccgcgctgacccacccggccagggcctccgtcgtgcacgggcccgtgcgctacacctgggccgacacctacagccgctgccgccgcctcgcctccgccctcgcgcgcagatccgtcggccacggaagcacggtagctgtaatagccccaaacatccccgcgatctatgaagctcattttggagtgcccatggctggggcagtggtcaactgtgtcaacattcgactaaatgctgccactgtagcatttctcttggagcactcctcagcagaagttgtcatggttgaccaagaatttttcaccctggcagaggattctttgaggattatcgcagataaaaagaaaggcacttttgaacagccacttctaatagttattggtgacgcaacttgcgatccaacaaccctccaagacgctttgagaaaaggagccatcgattatgaggcattcttggaaagtggagatcctgaatttgcttggagaccaccacaggatgaatggaagagtatcgcgctaggttatacttctgggacaacttctaacccaaagggtgtggtattgcatcacaggggggcttacctaatgtcactgagtggtgctttgatatggggaatgaacgaaggcgctgtttacttgtggactttgccaatgttccattgcaacggttggtgctatacatggacacttgctgctctctgcgggacaagcatatgtcttcgtcaggtttcagcgaaggccatcttctcagctatagccaacgagggcgtgactcacttctgtggggcaccggtcgtcctgaacaccatcatcaacgcccctccagccgacacgattctccccctacctcgtgtcgtcaacgtcatgaccgctggcgctgctccgccaccctctgtcctggcggcaatgtcgaagcttgggttccgcatcactcacacctacggcctgtcggagacctatggaccatccacggtgtgcgcctggaagccggaatgggacaggctgccagccgacgagcgcgcccggctccacgcgcgtcagggcgtccgttacgtgggcctggagggcctggacgtggtggacccgaagacgatgacgccggtcccggccgacggcaccacgatgggggagatcgtgatgcgcgggaacggcgtcatgaaggggtacctgaagaacccggaggcgaacgcggaggcgttcgagaacgggtggttccactcgggcgacctgggcgtgcggcacggcgacgggtacgtcgaggtgagggaccgcgccaaggacatcatcatctccggcggggagaacatcagcagcctggaggtggagaaggcggtgtacctgcacccggcggtgctggaggcgtcggtcgtggcccgcgccgacgagcggtggggggagtcgccgtgcgcgttcgtgacgctcaaggacgccgtggaccgctccgacgaggcggcgctggcgcgggacatcatgcggttctgccgcgagaagctgcccggttactgggtgcccaagtccgtggtgttcgggccgctgcccaagacagcgaccggcaagatcaagaagcatgagctcagggccaaggccaaggaactgggcccggtcgggaagagcaggatgtgatcgagcctcgagctcgtcttgctttgctacactgtactattcgtaggatggatggaagttgtatactacagactacagtgcaaactgcgtttcttctgtataacaccactactgtacgaacaatacagtcgtgtctgagcttttcttttgccagtgaggactgaactttgtatgaagtatgaactcgcgaagggcgctgcaacactgctcccacttgtatattccaaatttccaagggtacagtaatggcaagacagttaagaagttgcccaaata

SEQ ID NO: 92495 - DNA, 1489 bp, Zea Mays
gtttgaatttttcaaatcataatgcaccccacccttcgttgatggactggccggagggagtacgttctgaccaaaacttagcgttcttgaatcacttgtttggttctaactttctttgtttagttctgactttccttggtaattcctttcttcttcttttttgtaattttgagtcattgagggtatggcgtttatttaaggctttttgttgaagtaatgaagaattacaaaacacatgataaaagagttgttcttctccatgcacccaagacacctacgactacgacgagcaggtttattcatctaattaataggagtctgttctaattcgcaactgactgttctttttttcattgtactatgcgctgacaggtttcagcgaaggccatcttctcagctatagccaacgagggcgtgactcacttctgtggggcaccggtcgtcctgaacaccatcatcaacgcccctccagccgacacgattctccccctacctcgtgtcgtcaacgtcatgaccgctggcgctgctccgccaccctctgtcctggcggcaatgtcgaagcttgggttccgcatcactcacacctacggcctgtcggagacctatggaccatccacggtgtgcgcctggaagccggaatgggacaggctgccagccgacgagcgcgcccggctccacgcgcgtcagggcgtccgttacgtgggcctggagggcctggacgtggtggacccgaagacgatgacgccggtcccggccgacggcaccacgatgggggagatcgtgatgcgcgggaacggcgtcatgaaggggtacctgaagaacccggaggcgaacgcggaggcgttcgagaacgggtggttccactcgggcgacctgggcgtgcggcacggcgacgggtacgtcgaggtgagggaccgcgccaaggacatcatcatctccggcggggagaacatcagcagcctggaggtggagaaggcggtgtacctgcacccggcggtgctggaggcgtcggtcgtggcccgcgccgacgagcggtggggggagtcgccgtgcgcgttcgtgacgctcaaggacgccgtggaccgctccgacgaggcggcgctggcgcgggacatcatgcggttctgccgcgagaagctgcccggttactgggtgcccaagtccgtggtgttcgggccgctgcccaagacagcgaccggcaagatcaagaagcatgagctcagggccaaggccaaggaactgggcccggtcgggaagagcaggatgtgatcgagcctcgagctcgtcttgctttgctacactgtactattcgtaggatggatggaagttgtatactacagactacagtgcaaactgcgtttcttctgtataacaccactactgtacgaacaatacagtcgtgtctgagcttttcttttgccagtgaggactgaactttgtatgaagtatgaactcgcgaagggcgctgcaacactgctcccacttgtat

SEQ ID NO: 92496 - DNA, 904 bp, Zea Mays
ccgacccgcccgccccttagccacccggagcgccattcgcaccccctgcccgtgtggctccgctccgctctgctgtgctgcctgcgcggcgcgatcggcctcgacccgctgggtctgggtgagagagtaaaatgggcaacctggtctcgggtgccgcggcggcgagcggcggcggcgggaagctggtgatggcggacggcagcgtgcgggcgctcagcgagccggtgtccgtggcggagctcatgatggaccacccgcgccacttcgtcgtcgacgcgcgcgtgctcaaggcgctggcccggcgggagcgccatcatcatcagcagcagcagcagggcggcggggccaaggtcgcgccgctgccggccgaccacgtgctcggcgccggcggggtgtacgtcctgctgccggccacgcggggcaaggtgtcggccgaggaggcgcgccgcgcgctgtcggcggcgcggtcccgatcgatgcggggcctcaggcgccagctgtcgtcgtccaagaagagccagcaggcggaggcagctgccgcccaagagtcgccgcagcaggaggcgaccgctgagtcctcccctgaggacgaggacgacgcggaggcggcggcgaggccggaagggttcgaggagcaccgcctggcgttcctgagccgggagctgtcgtgcaaggggtggaagcccagcctgcggaccatcgaggagcgcgatctgcccaagaagacgcccccccaattggctcttcttctggtaaagctccattgcctcctctgatccgtgagccgatcgagaaggtgtcggccgaggaatcgtctttgttgttttttttcttctattcttccttgtcaaaatcagatgtggttgaagacgttgaacccgtcgtaagaccaacatgtttgtat

SEQ ID NO: 92497 - DNA, 1368 bp, Zea Mays
atgacggagcaacccgtcgcggccgaccgacgagcccggcagcatcgcccaccccagcttctggtcctccccgttttctttctcttcctcgtcgcgccgtgcgccctcttcttgttcaggtcgtccgacttggcccttatcccccgcatccgcatcgagtttgaccgccgcgaggctctatctatcgcacctacaaatgtgccaacgccagcacagccagtgccactgccatcgccgccgccaccttcaccagcaccaccgcctccaggtccggctgcagacgacgacgaggagcgacgacggctcccgcctccgcgccagctgacggacccaccgtactcgcttggcccgaccgtcgactacgacgcgcgcagggcccagtggctccgcgacaacccgcggttcccggccttcgtcgcgccggggaggccccgggtgctagtggtcaccgggtcgtcaccgcgccgatgcagcgaccccgacggcgagcacttgctgctccgggcgttcaagaacaaggcggactactgccgcgtccacggcttcgacatcttctacagcaccgcggtgctcgacgccgagctgtcggggttctggtccaagctgccgctgctgcggacgctgatgctcgcgcacccggagacggagctcctgtggtgggtggactccgacgtcatcttcaccgacatgctcttcgagccgccgtgggacaagtacgctgctcacaacctcgtgctcccgggctccgaggagaaggtgtacaccgttaagagctggatcggcatcaacgccggcagcttcatcatccgcaactgccagtggtcgctggacctgctcgacgcgcttgcgcgcatcggcccgcgcggccccgtgcgcgagatgtacggcagggtcatctccgagacgctctccgaccggcagccgtacgaggcctgcgaccagtcagcgctcgtctacctgctcatcactgagcgcggcaggtggggcgacaagacgttcctcgagagctcttactgcctcagcggcttctgggcctacatcgtggacaagttcgaggagatgcggcgtgattcgacgacaccgccggagcccggccgcgaacggtggccgctgacgacgcacttcatggggtgcaagccgtgcggcgggaaagactcgacctacgacgccgcttggtgccggcgctctatggagcgtgctctcaacttcggcgacgaccagatactcaacctttacgggttccagcacaagtcgctcaacaccaccgccgtgcggcgcgttcggaacgacactggtggaccgctggacacgggcgacgaggagctcggccgcctcttgcatcccacgttcagagctgccaacttgtga

SEQ ID NO: 92498 - DNA, 221 bp, Zea Mays
atgttatgtttgcagatatggacctgagtggttttctccacattaggaaagctggaagagccttttgaactcagttttttgctaacagtggtgatatggtgaaaccgagttttgtgtgtatgtaccaacagctaaaatgtaaacacgacattatcatagctgagtacatgaataatgatctcttatatcttattgtaaaatctgaaacagttctcctgtag

SEQ ID NO: 92499 - DNA, 2772 bp, Zea Mays
gtcccggtgccggggaggagagtgtgcttatgctccgctgccgccgacgatagcggctcggaagcggagtcctccgcggcggagggcgaagaggctgcgcgtggggaggaaggcgagggggaaaatgtctctgcgatcgtgcccgctgtcctccgccccgaggattgccacacggtcatagctttgcctttgctacagcgaccactatttccaggattttacatgccagtctatgtaaaggacgcaaagctgttgcgaactttagatgaaaatagcaaaaaatctacaccatatgctggggcttttcttgtcaagaatgaggaagataatagcattcatgaattgaaagggaaagaattgttgaattgtcttcatgatgttggcacgcttgcccagataacaagaattcaaggagatttggtggtgctacttggtcaccatcgtatacagatatctgagattgttgttgatgagccacttacagttaaagttgatcatctcaaggaactgccttatgataaggatgctgttgtcataaaggcgacatcttttgaagttatatccactttaaaggatgctctcaggacaaactccctttggaaggatcaagttcaagcctatacccagcatatgggtgacttcaactatccaagactagcagatcttggtgctgctatttcaggcgccaacaagttgctttgccaggaagttcttgaagagttagatgtatgcaaacggttgaagttgactcttgagttggtaaagagggagttagagattagtaagttgcaggaatccatagcaaaaacaattgaagagaaaattactcgagaacaacgccgctacttgttgaatgagctacttaaagcaattaagaaggagctaggattggagacagatgataaaacaactttgtcagaaaaatttaggggaaggattgaagcaaaaaaagacaggtgcccccctcatgtcttacaagtcatggacgaggagctcactaagcttcagctgctagaagctagctccagtgagttcagtgtaacccgcaattatttagactggctaaccgtattgccctggggagattatagtgatgaaaactttgatgtgcaccacgctcaacatattcttgatgaagatcactatggtctagctgatgtcaaagaaagaattttggaattcatagcagttggaaagttgagaggaagttcacaaggtaagatcatatgtctttctgggccacctggagttggaaaaactagtattggacgttcaattgcacgtgcactaaaccggaagttctacagattctctgttggaggtttggccgatgtagcagaaattaagggtcataggcggacatatgttggggcaatgccagggaagatcgttcagtgtttgagatcagtaggaacagcaaatcctctagttttgatagatgagattgacaagcttgggaaagggcattcaggtgatccagccagtgcactattggaactttttgatcctgaacagaatgctaactttcttgatcactatctagatgcccctgttgacttatccaaggttctttttgtttgcactgcaaatgtcattgagatgataccaagccctctactggacaggatggaaatcattgctattgccggttatataactgatgagaagatgcatattgctaggaattatttagaaaagaagacaagggaggcctgtggcatcaagcctgagcaggttgaggtcacaaatgatgctcttcttgctcttattgaaaactactgccgtgaagctggcgtacggaaccttcaacaacagatcgaaaaaatttatcgaaatatagctctgaaacttgtccgtcaaggggtatcaaatgagtcacctcaagatatcatggtagtagaagcagaaaaaaacccggttaattttgacgttgcgacaaaagtagaagataagaactcgaagaattctattgcagaagatgcttcagtggacgtgagcccaattgattcttctcttgataatattaatgtggtgcctttaacaacagagtcagaagtagaggccaacaatgaaagcacacatagaaatatggaagtgcttgtagacaagcctgaggagaaagttgttgtcaatgcgtctaatcttggtaattttgttgggaagcctgtgttccaagcagagcgcatatacaatcagactcctgtcggagtggtcatgggtttagcttggaatgctatgggtggttcgaccttgtacattgagacagcaaaagtagaggaaagcaaaggcaagggaacactttttgtgacaggccagcttggcgatgtcatgaaagagagcgcccaaatcgcacatacagtttgtagagctgtattactagagaaagaaccaaataatcccttttttgcaaagtcaaagctgcatttgcatgttcctgctggagccacaccaaaggatgggccaagcgctgggtgcaccatggtaacatcgatgttgtccttagccatagggaaatctgtgaagaaagacttggcaatgactggtgaagtaactctaacaggacgaattcttccaatcggtggggtgaaggagaaaaccatcgctgcaaggagaagcggggtaaagacgatcatattcccatcagcaaaccgaagggattttgatgagcttgcttctaatgtaaaagaaggtcttgaagttcactttgttgacaaatacagcgaaatatatgatttagtttttacaagtgacaccaagacgcaggaaagctag

SEQ ID NO: 92500 - DNA, 1586 bp, Zea Mays
atggacttctttggagctgctattgggtggggcttcaattggaaaattgctttgtttcttttggcagctgttccagaacttggcacagtacacgaggaagccttggatgatgctgacattgacctgcttcccataacttggacatcatcttcttgttctgcttcatcttccattacatcgtcatctagtaggactgggtatggcgctgcagtaggactgggtatggagcactgcactgggactgggtctgggaaccgggacctggagcaacgagcaatggcgcctggagctcgggaccaggagcaatggcgcacctggctctggcggctctaccgggttggagcctgtaggtggagggaagagggaggagggaggaggggccggcggcgtacctggctctggcggctggcggctctgggcacgatggcgtctggcggctgggcgcgacgcgtctggtcgtctggcggctgggcgcgatgtcctctggcggctgggcgcagggacttgttgcaagctgaggacaccaggaaacccttgtttgctactgctcaaggtacgttatgtggtcatttaaggacccatgggattttagtggactctatcaatgtctcaattgaagtacaggtagccatgtttatgaaatttgttggccatagatggacaaatagatctgttggttttgaattcttgcggtctggagagacagttagtaggtactttaacgctgttttagatgctttatgtgtcctatcacgtgacctcattaccatgagaaccacgaagacacatccaaagatatctaatagcccgggaaggtttcatccatactttgaggatgacctaggtgatgactctgacactttaccatctcctaaaattccatctcaagttatcgagcagagctcatctagctctggaatcaagcgtccaagaggagatgccataccagtcaagagagatgtgagaccacagagtcgcatggcaaagataggagatgaaatcaacactactttgatggatctccgaaacgaacttaaacaacaaccacctccacctgttatagcttctttgaactctgatgccgaattatggcaaaggcttgaaaaaatgacattgactactgataaaaaactgatagttgggacatttctagcatcaaaggatcaaaagggcatgcgtggtttcttatccgcttcagctgaaacaacattttcagtcacgggtattcaagtttttgagtgattcaacactactgtgaagtgattaggctcaactaggtactcttttgtggatggaagggtggtgttgttggctggctgttttgctgtgaattccttaggtggttgcctgttattttgctcagtggccaggtgatgtatatggcggtggtgatgcctgattcttttgcacgtcttcgaagttgatcaataaggcttaaggagatggatggtgctgctcatagctgaatgtgtgtgtgtatgtgtgtaatagcaactacctcagactgttttgaatctattttagacctattaatcacctgtaatgaacatgttgtggagctattatgaactgattattagcttatc

SEQ ID NO: 92501 - DNA, 742 bp, Zea Mays
tatttgcagcaatatcatgctcaggtgaaaaatctgcgatactttacagaattgcacatatcgagtactacaaggctagaagcacaccatcaaatgtttctaaggattacacctgccttggaactacagtaggagctcctaaatgttacttataataaacagcaaacctcgttttattccacaccaagccagactgaatcaacgaaggatcatacccgatccattgcacgtctacacatgtcgccatcatgccgagctaagctgctagctagatcaagtgacagcgatccaacctcgcgcgcgcgtggttcagtcctcgtacgtgcggcactcgtcggtctcggggttgtccttgcagtactcctcgagcgggtcggcgcccttctgccggtcgcgcaagtggctggcggccgcgctgagctcctccacctcgtcccacgccgccacgcactcgccgctcaccgggtcatctgcgcacgtctcctgggcctgcttgatgctctcggacaccttctttgcgagatccggcggcgtgggcggcgagctggccgccacgcccacaaaccggcggtgcgcgcgcaccggccggacgacgatgaacgctacgaccctctggcgggacggctgcgggaggcttctttgagccgagaaagcgggcaaggcggccacggcagtgactgagatggccatggctcggtgattgggtactcttggagtagcgatagagaagataaaatgtttt

SEQ ID NO: 92502 - DNA, 693 bp, Zea Mays
atgaacctcagggacagcaaggaaaaacttggctgcagtgcccttgattatgaacaggagctggagactgccaggaccatctccagtgttgagaagagctacgagctgcccgatggccaggagctggagactgccaggaccatctccagtgttgagaagagctacgagctgcccgatggccaggagctggagactgccaggaccagctccagtgttgagaagagctacgagctgcccgatggccaggttatcacaatcagtgcagaaaggtttaggtgccctgaggttctattccagccatccttcattggcatggaatctgctagcatccatgaagccacgcacatgaagtgtgacgtcgatatcagaaaggatctgtacggtaatgttgtcctcagtggtggttccaatatgttctctggtattggtgaccgcatgagcaaggagattactgcacttgcccctagcagcatgaagatgtggatctccaaggaagagcatgacgaatctggtccgggcatcgtccacatgaagtgcttctgaatttcaggagcagtatatatgttgcttgcattttcagttagttgggatgcaagtttctcccgtggtctctctagcattcttcattctttctggatattgaagagcagttggccatggagcattgtgcaaggtggtaaagtcgatttatgt

SEQ ID NO: 92503 - DNA, 844 bp, Zea Mays
tccactggtctacataactaacataacatccttgtgtatgatcaaacaagaaaacaaagcaatgtttcagaagaaagaaaccttataatcaggatgccctggtcgagcttcctcgctcgctccctgagcgcatgctggccatggaacttgttcagcccaccctggtcaagcacaaacatcagcatcggcagaacgaattagctaccacaacaaataattaatacaccaaaacgaagaggccgtcgatcgggtatgcatgcttcctgcccctttcctcacctcctgctaagaggaaaaaaggaccggcagtaagggagtggaagcaggggcagaaattacgggtgattagcgtgggcgagaggctgggttacaatggacctgggtggggtggtgatggccgcggacgacagtgcttcagagctcggcctgctcggcggcggcggatataccggggacggggcaaatacagccaggggagaggacgacgagaggcaacaggtcgaagcaggcgacgccagcatccgtcgtcgtcgtggacgcggtggctgccaccaaggaggcgacaccgttcttgctgccgtcaatgtgagcttgtgtgcctcctcacagagccactcaccattgcatcgtagatctaggcgagcggcgacggcacgaggaagctgaaggcgttgaggctgagctagaggacgagcttggacgaccaccacactgagtgccacgagttgcggcagtcgtgcacctctctggcgtccacgtcgggcggggttggatgcggcggcaggattggcatctatcgcggcggcggcgggttacgatggatggggttggggtagggtgcaag

SEQ ID NO: 92504 - DNA, 318 bp, Zea Mays
atgcatgcttcctgcccctttcctcacctcctgggtggggtggtgatggccgcggacgacagtgcttcagagctcggcctgctcggcggcggcggatataccggggacggggcaaatacagccaggggagaggacgacgagaggcaacaggtcgaagcaggcgacgccagcatccgtcgtcgtcgtggacgcggtggctgccaccaaggaggcgacaccgttcttgctgccgtcaatgtgagcttgtgtgcctcctcacagagccactcaccattgcatcgtagatctaggcgagcggcgacggcacgaggaagctga

SEQ ID NO: 92505 - DNA, 2451 bp, Zea Mays
aatgtacacatcagaacgaggcatgaaactggccttggccgtggacgcgtgaagcgcgccatgcgcgtccgacgtggacgtaatgagctactacttcagagccacatgtgtccacgcttcatcagaaagaaaacacctgcacacgtcaactggagctgccatcagtttagtttacatgctgcatcgtctgaaggccagatcagtgatgagcgaaacattctatatataccctcagtccctgttccagttctcgtcaagctagcagcacgagttgtcgaacacttgcctgctcttgagctcaagctatcatcagctgcgtcttgtgcacagcaacagcttcccaaccgcgcgcaactgtaccagcgaaactaccaactgccatatggaggcccagaacgtggaggttgctgccctggtgaagaagatcgcggacctccacgccgacatcaccaagctgccgtcgctgagcccgtcccccgacgtcaacgcgctattcaccagcctcgtcatggcctgcgtcccgccgagcactgtcgacgtgaccaagctcagcccggactcccagaggatgcgggaggagctcattcgcctctgctccgacgccgagggccacctcgaggcgcactacgccgacatgctggccgccttcgacaacccgctcgaccatctcggccgcttcccatactttagcaactacatcaacctgagcaagctggagtacgacctcctggtccgctacatcccgggtctcgcgccttcccgcgtcgccttcgtcgggtcaggccccttgccgttcagctcgctcgtgctcgccgcccgccacctgcccaacacgacattcgacaactatgaccggtgcgctgccgccaacgaccgtgcgcggaagctggtccgcgcggacaaggacctgaacgcgcgcatgtccttccacacggtggacgtagccaacctgacggatgacctcggcaagtacgacgtcgtcttccttgccgcgctcgtcggcatggcggccgaggacaaggccaaggtggtcgtgcaccttggcaggcacatggcggacggagcggctctcgtcgtgcggagcgcgcacggggctcgcgggttcctatacccgatcgtggatcccgaggacatccgtcgtggcgggtttgacgttctgacggtgtaccacccggacgatgaggtgatcaactctgtcatcatcgcgcgcaagatcgacgcccatgcaaacacggaggtttctgccctggtgcagaagataaccggcctccacgccgccatcaacaagctgccatcgctgagcccatcccccgacgtcgacgcgctgttcaccgagctcgtcatggcctgcgtcccaccgagccccgtcgacgtgaccaagctcggcacggacgcgcagaggatgcgggaggagctcatccgcctctgctccgacgccgagggccacctcgaggcgcactatgccgacatgctcgccgccttcgacaacccgctcgaccatctcggccgcttcccttacttcaacaactacgtcaacctgagcaagttggagtacgacctcctggttcgctatgtcccgggcatcgcaccttccagaatcgccttcgtcgggtccggacccctgccgttcagctcgctcgtgctcgcctcccgccacctgccgaacgtgatgttcgacaactacgaccggtgcgccgccgccaacgaccgtgcacggaagctggtccgcgcggacgagggtctgcgcaagcgaatgttcttccacaccgccgacgtcgccaacctcacggacgagctccgcaagtacgacgtggtcttcctggccgcgctcgtcggcatggcggccgaggacaaggccaaggtggctacgcaccttggcagacacatggcggatggagcggctctcatcgtgcggagcgcccacgaggctcgagggttcctgtacccgatcgtcgatcccgaggacatccgtcgcagcggcttcgacgtgcttgccgtgtaccacccggacgacgaagtcattaactccgtcatcgtcgcgcgcaagatcaacgcccacgtgaaggggcttcaggatggacacgcgcatgcgcgcggtgtggtgccgatagtgagcccgccatgcaagtgctgcaagatggaggcgaacacgctccaccaaaagagggaggagatggcgacggcgtaggtgtccatctgatgcatggaacttttgaggacccgcgccacgtggtaacaataattacgaatcgctgtttcaatctctcgtgtaactgttgttgtcatgccttgtgtgtaagtttttaataatgacgtgattttcctatgtgatgatatatgcaagttttgccaccactttttatgtgacgtacatcgacgaggatgtgcacaatgcacgtaaaaagaatactgttttagaaagggtcgatctaatgatttatcttctcactc

SEQ ID NO: 92506 - DNA, 3137 bp, Zea Mays
gagacggaagccaagcctccaagggggccgtcgcagaactcgcgccaccgcccgccatggcttcgtcatctaaggcctccgactcctcctcccaacgatccaagcggtcggatcaagggacgggcagggaagccgctcccgcctctgttgtcccgatccacgggaacctgacgcagttgatacgccaaatcaaatcgaggcgcctcttgtacatcaaggagaaattggaggcgaacaggaagacgctgcagaggcactcctgcgcgctgttcgacgtggcagcggcggcggaggtggcgtcgaggggcagcgatggcggcaacgctttgtcgcagcgagcggcggagggacagttcaggctcgctgggtcagacctggcacacgggataggggagagggacgtggtgtacatgcaggaggagaacctggcgtccgggacgctcgtgctctccagctcgggcgctgccgcgcagcggacagtcgtgcggttcgtgaagctgccgttggttgagaggatccctccgtacaccacttggatcttcctggacaaaaatcaaagaatggctgatgatcagtcagttgttggtaggagaagaatttactatgatccaatcggaaacgaggctctgatctgcagtgacagcgatgaagaaattccagaaccagaggaagagaaacactttttcacagagggagaagatcaattgatatggagagctactcaagagcatgggttaaaccgagaggttgttaatgtcctctgccagtttattgattcaactccatcagaaattgaggaaagatctgaagtcctatttgagaaaaatgagaaaaactctggatcttcagataagatagagaggcaactttctcttgacaaaactatggatgccgttctggattcttttgataatctcttctgccgcagatgcttggtttttgattgtcgcctccatggttgctcacagaatttggtattcccaagtgagaagcaaccctacagctttgagcctgatgaaaacaagaagccatgtggtcgtcagtgctaccttcgatggagagaaggatttcaagagattcatgatgttggtcttagtggctgtgcaacatataatatggaatcaggaactgtctcacacaaagttgatgttagtattatgtctgaatcagaagattcaaaccgtgagaaaggcaacattaggtccatgacactagttggaaccagtggatcaaaaataatttcttctgttagtgctgaagaaagcactactccgccttcagcagatacctctgaaacagagaatgcatcctctgatatgcctcccagtagtttaaggaaatacaagatttcaaaacgtggacctaggtacagggagcgttctcctggcaaaaggcagaaggtttttacttatgacatttcttttgcaagcaatatactgaataaactttcgattccggagattcgcgacacaagactagagtctagagaacctggaggtgataaactacaaattcttgacgagtccactaagaaaacttcaagcaaagatatctgtggagaaagcccaattactactactgaaaatgtgggaagagagagtaaaaaagtatcttcaacaaagaatttcttggagcacactctttcatgttggagtgccttagagcgagatctatacttgaagggcatagagatatttggaaagaacagctgtctcattgccagaaacttactatctggtatgaagacctgcatggaagtggccaactacatgtataacaatggtgcagcaatggcgaagagacctctcttgaataaatccatctcaggcgactttgcagaaactgaacaagactacatggagcaagacatggttgccagaacaagaatctatcgtcggaggggccgcaatcgaaagctgaaatatacttggaagtctgcagggcatccaactgttagaaaaagaattggtgatgggaagcaatggtacacacaatataacccatgcgtgtgccagcaaatgtgtggtaaagattgcccctgtgtggaaaatggaacttgctgcgaaaagtactgtgggtgttcgaagagctgcaaaaacaagtttagaggctgtcattgtgcaaaaagtcaatgcagaagcagacagtgcccctgttttgcagccagtcgtgaatgtgatccagatgtttgtaggaattgttgggtgagctgtggagatggttcactaggtgagccacctgccagaggtgatggttatcagtgtggaaatatgaagctccttttgaaacaacaacaaaggattttgttaggaagatctgatgttgcaggttggggtgcattcatcaagaatcctgtaaataaaaatgattatcttggagaatatactggtgaattgatctctcacaaggaagcagacaaacgtggcaaaatttatgaccgggcaaactcatcatttctgtttgatttaaatgaccagtatgtgttggatgcttatcgcaagggggacaaattaaagtttgcaaatcactcatctaaccccaactgctatgcaaaggtgatgctggtggctggcgaccatcgggttggtatctatgcgaaggagcatattgaggctagtgaggaactcttctatgattatcgttatgggcctgaccaggctccagcttgggctaggagacccgaagggtcaaagaaggacgaagcatccgtctctcaccatcgagcacacaaagttgctcgatagctgaagagcagctccggatgatacaatatgcagtaaattatatatttaatacatgatttagtcctagttcattatacgaggacttcgttggtagataagcatattgtatattcattagtgaataaactcccatacatcaagttggggaataagtgcatataaatattttttaccttaggtcggaaggtgacaaactgacaaccttgttaggttgagtaaagttagtgcttacaggttttcaaactggtgtggccattgctagagtatcaaatagctgagatggctacaactatagccttgtttgtatttttttttggcaagagggatggaatttatttgccaaatgtacacattgttgcaggaagtatttaatgatttaggaggtgttcttca

SEQ ID NO: 92507 - DNA, 3091 bp, Zea Mays
ggagacggaagccaagcctccaagggggccgtcgcagaactcgcgccaccgcccgccatggcttcgtcatctaaggcctccgactcctcctcccaacgatccaagcggtcggatcaagggacgggcagggaagccgctcccgcctctgttgtcccgatccacgggaacctgacgcagttgatacgccaaatcaaatcgaggcgcctcttgtacatcaaggagaaattggaggcgaacaggaagacgctgcagaggcactcctgcgcgctgttcgacgtggcagcggcggcggaggtggcgtcgaggggcagcgatggcggcaacgctttgtcgcagcgagcggcggagggacagttcaggctcgctgggtcagacctggcacacgggataggggagagggacgtggtgtacatgcaggaggagaacctggcgtccgggacgctcgtgctctccagctcgggcgctgccgcgcagcggacagtcgtgcggttcgtgaagctgccgttggttgagaggatccctccgtacaccacttggatcttcctggacaaaaatcaaagaatggctgatgatcagtcagttgttggtaggagaagaatttactatgatccaatcggaaacgaggctctgatctgcagtgacagcgatgaagaaattccagaaccagaggaagagaaacactttttcacagagggagaagatcaattgatatggagagctactcaagagcatgggttaaaccgagaggttgttaatgtcctctgccagtttattgattcaactccatcagaaattgaggaaagatctgaagtcctatttgagaaaaatgagaaaaactctggatcttcagataagatagagaggcaactttctcttgacaaaactatggatgccgttctggattcttttgataatctcttctgccgcagatgcttggtttttgattgtcgcctccatggttgctcacagaatttggtattcccaagtgagaagcaaccctacagctttgagcctgatgaaaacaagaagccatgtggtcgtcagtgctaccttcgatttccacagtggagagaaggatttcaagagattcatgatgttggtcttagtggctgtgcaacatataatatggaatcaggaactgtctcacacaaagttgatgttagtattatgtctgaatcagaagattcaaaccgtgagaaaggcaacattaggtccatgacactagttggaaccagtggatcaaaaataatttcttctgttagtgctgaagaaagcactactccgccttcagcagatacctctgaaacagagaatgcatcctctgatatgcctcccagtagtttaaggaaatacaagatttcaaaacgtggacctaggtacagggagcgttctcctggcaaaaggcagaaggtttttacttatgacatttcttttgcaagcaatatactgaataaactttcgattccggagattcgcgacacaagactagagtctagagaacctggaggtgataaactacaaattcttgacgagtccactaagaaaacttcaagcaaagatatctgtggagaaagcccaattactactactgaaaatgtgggaagagagagtaaaaaagtatcttcaacaaagaatttcttggagcacactctttcatgttggagtgccttagagcgagatctatacttgaagggcatagagatatttggaaagaacagctgtctcattgccagaaacttactatctggtatgaagacctgcatggaagtggccaactacatgtataacaatggtgcagcaatggcgaagagacctctcttgaataaatccatctcaggcgactttgcagaaactgaacaagactacatggagcaagacatggttgccagaacaagaatctatcgtcggaggggccgcaatcgaaagctgaaatatacttggaagtctgcagggcatccaactgttagaaaaagaattggtgatgggaagcaatggtacacacaatataacccatgcgtgtgccagcaaatgtgtggtaaagattgcccctgtgtggaaaatggaacttgctgcgaaaagtactgtgggtgttcgaagagctgcaaaaacaagtttagaggctgtcattgtgcaaaaagtcaatgcagaagcagacagtgcccctgttttgcagccagtcgtgaatgtgatccagatgtttgtaggaattgttgggtgagctgtggagatggttcactaggtgagccacctgccagaggtgatggttatcagtgtggaaatatgaagctccttttgaaacaacaacaaaggattttgttaggaagatctgatgttgcaggttggggtgcattcatcaagaatcctgtaaataaaaatgattatcttggagaatatactggtgaattgatctctcacaaggaagcagacaaacgtggcaaaatttatgaccgggcaaactcatcatttctgtttgatttaaatgaccagtatgtgttggatgcttatcgcaagggggacaaattaaagtttgcaaatcactcatctaaccccaactgctatgcaaaggtgatgctggtggctggcgaccatcgggttggtatctatgcgaaggagcatattgaggctagtgaggaactcttctatgattatcgttatgggcctgaccaggctccagcttgggctaggagacccgaagggtcaaagaaggacgaagcatccgtctctcaccatcgagcacacaaagttgctcgatagctgaagagcagctccggatgatacaatatgcagtaaattatatatttaatacatgatttagtcctagttcattatacgaggacttcgttggtagataagcatattgtatattcattagtgaataaactcccatacatcaagttggggaataagtgcatataaatattttttaccttaggtcggaaggtgacaaactgacaaccttgttaggttgagtaaagttagtgcttacaggttttcaaactggtgtggccattgctagagtatcaaatagctgagatggctacaactatagccttgtttgtatttttttttggcaagagggatggaatttatt

SEQ ID NO: 92508 - DNA, 405 bp, Zea Mays
atgggcttggttaggtgccacggggtttctaaagctgctcgtgcctgtgttagggatgacttggtggtgccgaggtctccctactttccagtggattccgcggcggggcaagagcgtgggccgtcgcccatggtgatggagcggttccagagcgtcgtcagtcagcttttccagcacaggattatccggtgcggtggtcctgttgaggatgatatggccaacatcattgtagcacagctgctctacctggacgctattgatcccactaagcccctggataagatcaatgtagatactgaccgcgactactttatgagcgcaaaagaagcaaaggagtatggccttattgatggagtaatcatgaatcccctcaaggcccttcaaccacttccagcttccagttag

SEQ ID NO: 92509 - DNA, 559 bp, Zea Mays
ctcccagtctcccactccatccatggcgatcgccaccactacctcttcctcctcgctgaccattcgtctcctccacccgaaccccaacactaaccccgctcccagatctctccagctcctcagtagcaggaggtgcgctcgtgccgccgtagccggaggcgcggtgccttacggggctgctccccggcgtgggatttggtcgatcagggatgacttggtggtgccgaggtctccctactttccagtggattccgcggcggggcaagagcgtgggccgtcgcccatggtgatggagcggttccagagcgtcgtcagtcagcttttccagcacaggattatccggtgcggtggtcctgttgaggatgatatggccaacatcattgtagcacagctgctctacctggacgctattgatcccactaagcccctggataagatcaatgtagatactgaccgcgactactttatgagcgcaaaagaagcaaaggagtatggccttattgatggagtaatcatgaatcccctcaaggcccttcaaccacttccagcttccagttag

SEQ ID NO: 92510 - DNA, 991 bp, Zea Mays
attatttattatataacgcaaccaagtcactagtttctgagtatcagtctctgttatcaggcactacatgtggctggccaggttgcaggtgcatctgtttcaacctcacctcttccatatggtacaatgactagtcaatgtgaagcccttggattgggcaccaggaagaagctatcgagctggcttgtcaatggacacgaatcaaccccggacaatcctatgccaagccttcccactgcccatcattccatcattcccaaggtgcggagaaggcacatctgaaacatgtctcccagaatgctgttatcattaaagctcccacctgccagccccttcgataacttcctgaaggctgcctatcgcacccagcccgagctgtgatcgatttacctaagaacaaccctcttcacgagtgctaggctgcagtaccaaagcatagggtactagattatctaaaggaacttatctatgacgttgttttagttgtagtagcgtaactatgtgtatctatctactagatgtctgtaacgtttgcatatgtatcatcttacgactgtgcctctgtagttgtaagccgcgagttctgtgtcgcatgttcagactgagttgtatgagaatactgagtatgcttggcactcctgtatacagtatgcttgccaaaacgtttcttccgaggtcatccttttacacactccctacaattcagatgcctgaactttggtttcttcaggcgtctcctctccgtcacggcagtagacatggtggcggggttacggtttcgagattttggagatctccggtttatgactagagataaaagtgtgtttggttctggactataccagaatcgatttggtaatatttcttgtagatgttgcatctggtggctccttaaaactgaaactgaacctggtggcttgtgactagagataaaagtggatatcttaattgtttgaacaaatttaatattttaaaataaatatgtatgaaa

SEQ ID NO: 92511 - DNA, 3743 bp, Zea Mays
acatttctgggttttgggtcgtctccacgggctgggtttggggtcggtcggcggcggcggcggagctaggagtggaggcctgagatatactccaagcgggagtctgggcgctctctgcggtcggagaggcgcgggtgagatctacgagggccgctgcgtcgttctcgcagggccggcggaagacatgggtttcctctcggcgaagctgctgccgtcgtgcgagagcgtgtgcgtgtgctgccccgcgctgcgcccgagctcgcgccgccccgtcaagcgctacaagaagctgctcgccgagatattccccaagacgcccgatggtgctccgaatgagaggaaaatagtgaagttgtgcgagtatgctgcgaagaacccattgcgcataccaaagattgccaagtttctagagcagaggagtcacaaggagctgcgctctgcccatgtgaacttcgtcagaatcatcactgaagcttacagcaagctactcttcatttgtaaggagcagatggcatattttgccatcagcctagtgaatgtccttaccgagcttctagaaagcaagcaggagaatgttcacatccttggctgtcaaactttagcaaactttattaacagtcaggtagacaacacatatgcacgcaatattgaaagcttggtgcacaaagtatgtgcactttcacgtcgacaaggagaggatcacaggcttcttagggccgcaagcttgcagtgtctgtcagcaatgatctggttcatgaaggagcattcatacatatttgctgattttgatgagatagtgcattcagtgctggaaaattataggacagaggaatctaatggtggtggtgatgacagacatgcattgcagcataattgggttgatgaaatagcaaggtctgagggtagacctggtgtaggtggtggtaatgatgtgaatattaacactacaactattaggttgcggccagcaagaaattcgtcagctcttacaagggatgaacgtgactccccagaagtatggtcacatatttgtgtccaaaagcttgcagaactggccagagagagtacaaccatgcgtcgcattctagatccgatgctttcatactttgatatgaagaaacagtgggccccacgacatggcttggctttgcttgttttgtctgatatggcttatctggaaaagagttcaggcaatgaacagctgattctaaccaccatcatccggcacttggatcacaaaaatgttttacacgatcctcagacaaaatcagatattattcagacagcaacgtccttggcacgacaacttcgatctcgaggatttgctgttgaacttgtagtggcaggtgacttgtgcaagcacttaaggaaaacacttgaggccgtggaatcaggcaatgttgaagatcagaatttgaacgaaccccttcagattgtcttggaggactgtcttatggaagttgttagaggaattaatgacgtacggccactctatgatatgatggcaatcacattggagaatttgccttctatgccaactgttgccagagcaacccttggaagcttgctgatcatttcacacataatctcgttgacatcagtatcttccaacaatctgatggtatttccagaagcacttctccagcagatactgaagtccatgttacatactgatattgatactcgtgtgggagcacaccacatgttttctgctattattgtccgagggccaagccatctgcggagtgaatcagagtacctatatgaaacaaaaaagcagtctcggaatacatctgtatttgcttcagctactgctctactggagaagttaaggagagaaaaggagagtttgagttcagataagcctcgaaatatcatgcatgatgatgtgaaggaaatgaacatgcatgaagaggataaacgaaaaaacccagcttatttctctaagctggtttcctctttcattgaaagatgtgcaacacgaagttctgtagaggagaccaatattgccatgctaactgaagatcaaaccaaccaattgctgtcttcattctggattcaggcaaatcaaacagataataccccttttaattatgaggctattggacattcatacagcctaacagttctttcttcccgccttaagaattcaagcaatggcaatatcattcagtttttccaattgccattatctcttcgaagtgttgctttaaccccgagtgaagttctgccggcttattgccaacggtctatttttacattagcaatgagtatgctggcctttgctggaaaagtttgtcacgtcgctgaactgtcggacttgctaaggtgtttttcatcttccaaaattgacccttacctaagaataggtgaagacttgcaactctatgtaaggttgcaatcggatctaggcagctatggttctgaaagtgatcaagagattgccaaatccatgctttctgactgcaggacaaaagtagggattaacgatcatcgagtgcttgatgttattgcctctgcactttctaatttcattgagatgggcaaggatgtaatagtgaaggagctgactgagttgttcacgcctgaagagatgcctctgtttgggtcgaattcagcacttgactgggccaacttcaatgcacaagcattttctgatgaatccctttcttttgatgaggaatgttcaagaacctcttcagtagattgtggcttgcacgagtcaccaatcaccaacactgctagctctatctcaaagattactctaccacagtctgttccacatgttttaggtgtcggtcaattgttggaatcagcactacatgtggctggccaggttgcaggtgcatctgtttcaacctcacctcttccatatggtacaatgactagtcaatgtgaagcccttggattgggcaccaggaagaagctatcgagctggcttgtcaatggacacgaatcaaccccggacaatcctatgccaagccttcccactgcccatcattccatcattcccaaggtaaaccctgccacgttccgcacatcatctgaatcatgttctgcagtaaagctcccacctgccagccccttcgataacttcctgaaggctgcctatcgcacccagcccgagctgtgatcgatttacctaagaacaaccctcttcacgagtgctaggctgcagtaccaaagcatagggtactagattatctaaaggaacttatctatgacgttgttttagttgtagtagcgtaactatgtgtatctatctactagatgtctgtaacgtttgcatatgtatcatcttacgactgtgcctctgtagttgtaagccgcgagttctgtgtcgcatgttcagactgagttgtatgagaatactgagtatgcttggcactcctgtatacagtatgcttgccaaaacgtttcttccgaggtcatccttttacacactccctacaattcagatgcctgaactttggtttcttcaggcgtctcctctccgtcacggcagtagacatggtggcggggttacggtttcgagattttggagatctccggtttatgactagagataaaagtgtgtttggttctggactataccagaatcgatttggtaatatttcttgtagatgttgcatctggtggctccttaaaactgaaactgaacctggtggcttgtgactagagataaaagtggatatcttaattgtttgaacaaatttaatattttaaaataaatatgtatgaaa

SEQ ID NO: 92512 - DNA, 454 bp, Zea Mays
taatcacatatagagatgtcacatagtgactttgaagaatgttttgtatatttcatcttttcaagtctgcttatattgcatcttctcatgtcaacgtcaacttttcctacttctcttaccaggatccatgatgcctctggagaacttcattttcatgtcaactatctggatgtcttcattttcatgtcaactctggccttccctatctctcaggatcccatcaaacactagtgctacactggaaaacttcatacactattcacatactccatttctatgaactaaaagcatgaactaagtttttcctctgttttttctatgaaccaaaggaggcctcggtgccaacttcgaatacaaatggtaaattttgctctgatgaaaaatgtgaaacaacggccagatacaacagtagttgaaggataaagaataaaggccaaactaactaaaacaacac

SEQ ID NO: 92513 - DNA, 474 bp, Zea Mays
tgagcaatcaccatgaattttaatcacatatagagatgtcacatagtgactttgaagaatgttttgtatatttcatcttttcaagtctgcttatattgcatcttctcatgtcaacgtcaacttttcctacttctcttaccaggatccatgatgcctctggagaacttcattttcatgtcaactatctggatgtcttcattttcatgtcaactctggccttccctatctctcaggatcccatcaaacactagtgctacactggaaaacttcatacactattcacatactccatttctatgaactaaaagcatgaactaagtttttcctctgttttttctatgaaccaaaggaggcctcggtgccaacttcgaatacaaatggtaaattttgctctgatgaaaaatgtgaaacaacggccagatacaacagtagttgaaggataaagaataaaggccaaactaactaaaacaacac

SEQ ID NO: 92514 - DNA, 5402 bp, Zea Mays
atggggcaaatcgatcggcatgtgtttcggcgtgattataattttttcttgtcaagaaacagcacaattttcgacatagacattgaagcgtttcaactgaagccttggagacagcaaggagcggatcttactgactactttaattttagtctggatgaagaaggctggagaaagtattggtgtagcatgcttagtacaccactttttgtgcagaagcaattaaggttaggggctagatcacttgtaaatgaaacatcaggattggagcaggaatcatacaaattgaaatctgcgaaagcaatgtccaacgtagcaaatgattctggatctgaaggaagaaatgacattggcaagccaaaaggtagagcaatccatgttgaaggcagtgcgtgcgaacgtgttccttcagcagacttgtggcgtccaatacaaagggattcagatgttgtgattcaagtaaacatgacactttcaccatcaaatcagtccacttcggatgacagctcaaagttaaatcacaagggtgtggctactgaaagggtgtttgataaggaagtttatgatggaggttcctcagagggtgttgggagcaaactggacagaagagattcttattttgcacgtgaccaatctcctagccctgattattctgatgtactttctggagaatcaaaagaaaatcactattttaagagatccaatagacattcagatttcagggacttctttgaagccaccaaacttcaggatgagcatgtcaaatctgatttttattgctatccaagtaagccagacagagaaaatagtgaaagctgcagacgtggttataccccttctactgatgatagaaacatggcatctaaacttctgtggatgggtgaagctcctttcactgggcgaggcaagtctggtgatctttttttgggtcacaacagcgaccgtgacttcaaatctcgacataaagcaagaaaaggacagaggagacagagtttagatgacagaaggaatgctatatttgttgaaaaagaaaaaccaacagatagctatcatagtacgtgtgataggaagttcgtgaagagaagatctagctcatcttccctgaggaccaactatcacaattccgtttgcaatcaatcttatgagcagcgttattcacctcttgaaaaaaaagctctgaaaaacgatgagcattactttagcgatgagtctaattaccaccataggcagtctttgtcatgtgacatcaatgaaggagatattgacaagtgcttctcttcagcgaaggagtggcaacgagatggtgaccatatataccattcaatggtaaaaactgatatgcctgatgctaatgatggacgcatgtacagagataggtatagtccggaaaagaaaatagccagacatgaccatagcatggatgttgaattttcccattacactgattacagattttgcgagtggcggagtctggaggtaagaggcagatacagagataaaggaaaatttgccaaaagcaatgatgggcatttcagacatgctaaccatctcgagttgtattctggcctcaacaattttgagagggacaaacctgctactggcttccctgttatgagctcaagaaacagatgcatcgataacaaagaagtctgcaatgctaagatgacacaaaataattgccatgggtatcatcaaaagaacaagcaacatgattcatcattttgtattggcaacattcctcgatatgctttgcgcactgatacttatgctgaaaagggccattttgttctgccaattaagaggaagctttattctgatctgggttccatggaccaaaggactcttgctgatttgccacttctgaaaggaagattgatgcatggccaatccattgccagtgacaggaggatttatgctttgaagctgcataagtcgacaaagaaaattaatacagaagccatttgtagttccagtgatatgagaaatattaatactctttcaaacatttgtgttggcagaagacatgagctggataatgctgataacatccacttgaatgatagaaaaataaagtttgagagggaaggtaatgagttaagacgtgtaattgaagataaccaaaagggaagccatcctgtggataaggatttgcacacttctagacataagcatgtacatcagaagctgtggaaacagaatctgagtcaccgtcactcaggcaatcaggatttggagaaatcagcagaccagaattgtctaaataaagatgtggagatcgaggaaggagaattgattgaagaggaccataataatatcatttataaaagcaagcttaagcaggaaaatgttgtactgaaatcagttattgaaacaagttcagcagagcagttacaggtgaataatgcaacgtcgaaggatgctacctgcaacaacagagctacaagagaatctgatgagaaacacattcttgaggctgctaaatgtttctctgtgtttatgtattcaagtttatctcttcatactctgaatgccatcatctccagagttctttttattattatgcagcaattgtgtttttccccgattaagccagtcacatacaagttgcagtctgcagttagttgttgccttacccactctgtcaggctaatatatctgtctgagtcagagagaagaacggacatttgccctctcgtcagaaggcgaacacgcgagcagctccattgccaagagaatttggagaacgctgagacgacacgatcgtgcccactgcccacgagaggagttgccgcctgtcaaaggctggaagcggggacttgtggggaagatgggaagccgccttcaactcctgcagacagaataacagaaatatcgaacgacgtacacactccagctccgacaccgtcatccgtcaagtcgtcaactgacagtgcactcggcggtggttcgaacgccgaaccgacgtggcgcgctgacgacctccaaccgtgccctcatcccagcctcccgcttccgtccctgcaaggtccaagcccggtacggcaccgcatccgagagggcagacccgtcagtccaggcccctcgtccttcactcctccttcgcctctcaaaggcgcgcctcgctccaccattcccactggcgatttgcaacagacaagctccactagagctcggccggcatccatggcgatgcggctcctgtccccgtccacgccgcccccacgcttcccgagccccggccagaaggcacccgcctccatctccgcatcgtcttcctcgtacttctctgtccgcttgcgccgcgcgcgcgcggcggctgcagcggctgcaggcgcggccgcggcgggcgggtccgaccggcgcagcggacgcttcgagggggaggcgatgagcggggcattcgacaggggcctcgcggagatcgcgaggaaggtgccgctctttgagcccacagcggacggggagctcgccgctgcggctggcgagcggccgttgcctatcaatctcgagctctggctctaccgcgtcaaagtgcacaccagaaagttcgagttccctgaagcagaaaaacttctggacaagtgtatctcattctggcctgaagacggacgtccttatgtggcgctggggaagctgtatagcaagcagtcaaggtatgacaaagctagagcggtgtacgaaagggggtgccaagcaacgcaaggcgaaaacccatacatttggcagtgctgggcagtcctagaaagcaagggtggaaatattcgaagggcacgcgagctatttgatgccgctactgtggctgatgcaaagcatattgctgcttggcacgggtgggcaattttagaaataaagcaaggaaacataaaaaaggcacggaacctacttgggaaagccctgaaatattgtggaggaaatgagtatatttaccaaactcttgctttgcttgaagctaaagcagagcgctttgaacaggcacggactttgttcgagcaagccagtcaatccaatccaaaaagttgtgcaagctggctagcttgggctcaggtagaaatgcgtgcaggaaacaataccatggcaagaaagctctttgagaaagctgtccaggctagtcctaaaaaccgattttcatggcatgtatgggcactatttgaggcaaatgaaggtaacattgacagggcaaggaagttgcttaagattggacatgctgtaaatcctagggaccctgtaattctacagtcactcgcgctactggaatacaacttttcatctgcgaatgttgctcgtgtgttattcagaaaagcgtctcagattgatccaagacatcagccagtttggatagcttgggggtggatggaatggaaagaaagaaatgcaagaacagcaagagctctctatcaaagagctttgtcagtcaattcaacaaatgaatgtgctgctcgttgtcttcaggcttggggagtcctagaacagcgtgctggtaactacacggccgctagacgattgttgaggtcttcactgagtataaactcccaaagtgaggtgacatggatgacatgggcagcacttgaggaggaacagggggatccagttcgagctgaagaaattcggaacctttactttcagcagcgtactgaagttgtggatgatgcatcctgggtcataggcttcctcgacatcatcgaccctgccctagacagcgtgaagaggctactaaacctggatcagccttctagaccggcgaggcaagatgatgttaaaagcacaacagaaccgtgtcctcccactgccaagtcttcagaaacttctgcgggcaatgatgctcgtaacaacgggagcgaagcaatggggactctaacaagtgatttcgatttggatgctttcatcaagaagaggctggccctcgacccatcggagctggatgccgtgctcgagggctctgacccgaggggtgttgtttctcagaggaggaaacagcggctgcccaggaagccactccctcttctccctgtcccgtaaattttccagatcggtctgtctcatttccattccaccggtaaaatccataagggctagtttgtttgagactccatttttttccaagtgttaaaaataaaaatcccttgaaaaaaatgaggttatcaaactagccctaaatccctaactgtagcagcctgcaatacgtgaatatgtgtgaggactaaggagatgacgtcccctgccgctgccatagcaatcaccacacctgttaattgtcattccagccacgtgtatgtaattctgccaccatttgttagtaaagtctagctctgtacataaattagactctttttgtctacataatatcgccggactaagttatcgagaagtattttgacaatggtagtgccattacttcaacaccttag

SEQ ID NO: 92515 - DNA, 2475 bp, Zea Mays
atgctgatgtctattgatcatcctggtgaaagacatttgagggactcttttctttttggacagggtgtttgataaggaagtttatgatggaggttcctcagagggtgttgggagcaaactggacagaagagattcttattttgcacgtgaccaatctcctagccctgattattctgatgtactttctggagaatcaaaagaaaatcactattttaagagatccaatagacattcagatttcagggacttctttgaagccaccaaacttcaggatgagcatgtcaaatctgatttttattgctatccaagtaagccagacagagaaaatagtgaaagctgcagacgtggttataccccttctactgatgatagaaacatggcatctaaacttctgtggatgggtgaagctcctttcactgggcgaggcaagtctggtgatctttttttgggtcacaacagcgaccgtgacttcaaatctcgacataaagcaagaaaaggacagaggagacagagtttagatgacagaaggaatgctatatttgttgaaaaagaaaaaccaacagatagctatcatagtacgtgtgataggaagttcgtgaagagaagatctagctcatcttccctgaggaccaactatcacaattccgtttgcaatcaatcttatgagcagcgttattcacctcttgaaaaaaaagctctgaaaaacgatgagcattactttagcgatgagtctaattaccaccataggcagtctttgtcatgtgacatcaatgaaggagatattgacaagtgcttctcttcagcgaaggagtggcaacgagatggtgaccatatataccattcaatggtaaaaactgatatgcctgatgctaatgatggacgcatgtacagagataggtatagtccggaaaagaaaatagccagacatgaccatagcatggatgttgaattttcccattacactgattacagattttgcgagtggcggagtctggaggtaagaggcagatacagagataaaggaaaatttgccaaaagcaatgatgggcatttcagacatgctaaccatctcgagttgtattctggcctcaacaattttgagagggacaaacctgctactggcttccctgttatgagctcaagaaacagatgcatcgataacaaagaagtctgcaatgctaagatgacacaaaataattgccatgggtatcatcaaaagaacaagcaacatgattcatcattttgtattggcaacattcctcgatatgctttgcgcactgatacttatgctgaaaagggccattttgttctgccaattaagaggaagctttattctgatctgggttccatggaccaaaggactcttgctgatttgccacttctgaaaggaagattgatgcatggccaatccattgccagtgacaggaggatttatgctttgaagctgcataagtcgacaaagaaaattaatacagaagccatttgtagttccagtgatatgagaaatattaatactctttcaaacatttgtgttggcagaagacatgagctggataatgctgataacatccacttgaatgatagaaaaataaagtttgagagggaaggtaatgagttaagacgtgtaattgaagataaccaaaagggaagccatcctgtggataaggatttgcacacttctagacataagcatgtacatcagaagctgtggaaacagaatctgagtcaccgtcactcaggcaatcaggatttggagaaatcagcagaccagaattgtctaaataaagatgtggagatcgaggaaggagaattgattgaagaggaccataataatatcatttataaaagcaagcttaagcaggaaaatgttgtactgaaatcagttattgaaacaagttcagcagagcagttacaggtgaataatgcaacgtcgaaggatgctacctgcaacaacagagctacaagagaatctgatgagaaacacattcttgaggtaatggaaaagatgcaaaaaaggagggaaaggttcaaagaggctattgcaccaaaaaaagaagtcggtgacaagaaagacctatcggctttagcatgcagtacagatttcatccagaatcaacggcctgctaggaaacggcggtggggtggtaattgttggatgctggaaatgccttgagagtttgtccgtgatggtttcttcaacaaggtgttctgcttatgttgctcaaaacattttactgttatgtttacttattctgatggctgggttggggaaacaaaatatagaaagcatattcttcaggcacttttatagatatagtatcttgcatagtttaagagtaaaaaggttcgacttcaaatgtaacgtgtttgtggggttctttcaaaccactggagatgatttactatcccctaagatgagatttaaatggtttcctttctgcaggctgctaaatgtttctctgtgtttatgtattc

SEQ ID NO: 92516 - DNA, 545 bp, Zea Mays
atgcccccacaagttctagggttttaggtccaaggtttttgtgcaaccttcgtccgcgcgccaccaatttcttagcaattagtacctcacacgtgctccctctgctgctgcgccgctctatggctgacccattggacgcggccgccgccttcggtgtatccaccaacgacaacaatgtcgacgacgtcgaggacctttacgcggacctcgacgagcaggtcgccgccgcgctcgctgccgcaggggagagtggcggctcaaacgcgagggattccgaccccctcaccgacggcgagggggagttcccggagcccgacgagaacgaggcggtggatttgggcgacgggaccgagggctacagcagcagcgatgatgagagcgatgatggccttcgcatcgtgctgaacgaggacaccagcgcgccactgccgccgccccctgtggggcgcggcgagggatgcgtggctgaggatgaggagggagatgatacgagcaaccgtgtgaaggtttcatctgttaacgatggcgggtgggcaacggtatga

SEQ ID NO: 92517 - DNA, 1653 bp, Zea Mays
gctgaatgctaggtggttcacaggggtactcgtcaactcctgctgttcacgggtttgaagcgaaaattcgcccaaaccaggccggcgacggacgcctcctcgttctccacgccgccgccgccgccgccgccgcgttggctaggttgacctgaccgatcttgacttctctaggctcttgcatccccgacgacggaaatagcctccgagtttccaacagggtggctccggtcgaccacgaagcctcgatctgcatgacgaggctactcgtcatcctgttcgccggggcgaccctagtagtcgccaccaccgcgcacgagcaccatggtgaggcgcccacctgcgccggaggcagcgagcacgtgcttgcggagttccgccccggtgaggtgaccgtggacgggcacaacgaggactgggagagcgtggaggcctcggagttcgcgctgctgccggctctagatccagacgatgataaggcctactccggcggcaagatcgccgtaaaggctgtgcatgatggcgtcaacgtcttcttcttgcttcaggttgatggggcttacgcttacactaaaggggaaagtaacaaatgcccttctgttgctctgatgttccaagttggagagaaagccacattttacaatatgggaggatgcaaagatatgccaggttcatgcacaagtaaaagttgtagaggtcatgaggttgacattatgcacttctcaattggaaatgctatccctggacgactttacggtggcaatcacatagacaatgcagctgggaatggaaacgacagatttggtcaccttgttgatgtctatgcatggaatccacattgccgatacctcgatggagtgggccctaaagagaacaattcaaatgctcaaaatgattggcatggggcttggtggcacagttcattgaccttccattcaggctttgttgatgacgataatccttatggacaacaagatgagaagggtacatattattttgagttttcaagacccttaagaacaatggatcaatttcagcaggatgcacaattcacaataggacgtcccagcaatatgtccgtagccttgtggtacccagacgatggcaaagcatggagcaactccgatcattactcagccagctgcaactggttggttttggatatacaaccttcgtccgaagctacgtattaccgtccagctcctaatcgctcttgggatgctgcaactggctttgctttacttctttcagtggtagccatttgcatgtccatctttgtgggctaccgattttctaggaacaggagcactgcccagtttacaccacttgaacagatccagtttgctgaagaacgccattgattggaattgagattaggcgaagcatcaagcaacaatgtttcatctgttccaccattgtacctccaaagttgacagattgctgcattgaagttttgaaccgggttgttgtgatccagtatagggagatattgaaagcatacacgatacataatttaattacagactgccggtttttatcgtaggaaacaatttctatatgctatacatcaaaccggttattggcggctcatgactttgacgattgtttcattggttgcataatatttgaatatatctaaatttggttcgaatgctg

SEQ ID NO: 92518 - DNA, 1522 bp, Zea Mays
actcctgctgttcacgggtttgaagcgaaaattcgcccaaaccaggccggcgacggacgcctcctcgttctccacgccgccgccgccgccgccgccgcgttggctaggttgacctgaccgatcttgacttctctaggctcttgcatccccgacgacggaaatagcctccgagtttccaacagggtggctccggtcgaccacgaagcctcgatctgcatgacgaggctactcgtcatcctgttcgccggggcgaccctagtagtcgccaccaccgcgcacgagcaccatggtgaggcgcccacctgcgccggaggcagcgagcacgtgcttgcggagttccgccccggtgaggtgaccgtggacgggcacaacgaggactgggagagcgtggaggcctcggagttcgcgctgctgccggctctagatccagacgatgataaggcctactccggcggcaagatcgccgtaaaggctgtgcatgatggcgtcaacgtcttcttcttgcttcagggaaagtaacaaatgcccttctgttgctctgatgttccaagttggagagaaagccacattttacaatatgggaggatgcaaagatatgccaggttcatgcacaagtaaaagttgtagaggtcatgaggttgacattatgcacttctcaattggaaatgctatccctggacgactttacggtggcaatcacatagacaatgcagctgggaatggaaacgacagatttggtcaccttgttgatgtctatgcatggaatccacattgccgatacctcgatggagtgggccctaaagagaacaattcaaatgctcaaaatgattggcatggggcttggtggcacagttcattgaccttccattcaggctttgttgatgacgataatccttatggacaacaagatgagaagggtacatattattttgagttttcaagacccttaagaacaatggatcaatttcagcaggatgcacaattcacaataggacgtcccagcaatatgtccgtagccttgtggtacccagacgatggcaaagcatggagcaactccgatcattactcagccagctgcaactggttggttttggatatacaaccttcgtccgaagctacgtattaccgtccagctcctaatcgctcttgggatgctgcaactggctttgctttacttctttcagtggtagccatttgcatgtccatctttgtgggctaccgattttctaggaacaggagcactgcccagtttacaccacttgaacagatccagtttgctgaagaacgccattgattggaattgagattaggcgaagcatcaagcaacaatgtttcatctgttccaccattgtacctccaaagttgacagattgctgcattgaagttttgaaccgggttgttgtgatccagtatagggagatattgaaagcatacacgatacataatttaattacagactgccggtttttatcgtaggaaacaatttctatatgctatacatcaaaccggttattggcggctc

SEQ ID NO: 92519 - DNA, 271 bp, Zea Mays
aacacaaacactaacttaacctatgtgtttcagtttgaaagagagagatctgaatcttctaactccttgaggcgaagcaaagaacacatcaccgaactagagcaaaggatatcctacatgaaaaaggtaatttctcatgcagatgattgtaatattactatttccatttaatcttttatcttcatgtttatgtgattgaaggagttatgctcaacaaaggatactgcagctgctactgaacaacgtctgggtgctgaactttcaactgtat

SEQ ID NO: 92520 - DNA, 832 bp, Zea Mays
ggatatagtacgttgttggtcgtctaagatcagatcaccatagtacgtgcaggcggaggacggaaaaaaaattaggtatggctcggcggacggcggaagctcggcggtcggcgtgtcgcgctcgcggacggatctgctcggcggacggcgaagccggaaggcacagcagctcggcggacggagggacagggacaggcggacagcggctcgacaggcgaacggaggcacaggggcaacggcgcgtgctccggccgagcggacggcgggctgaggtgcggagctgctcctgctcgccttctcgggccgtcgggcgaacggcggacggcgcgccggagtcgcggagcggctcggtccgaggctccaagcccgagtggacggcggacggcgggcggagcgcctgagcagtgagcagcggaggcgcggagtcggcggagaggctcggtccgagcccgagcggacggcgggcggaggctggaggcgcggagctgctcgcctgctccgctgctcgggccctcgggcgctcgccggacgggcggaccgcggacggtggccggagaaccgtagccgcggcgcgccggcgcggctcggggcctcgggccaagcggacggcggacaatcgccagagcccagaggcgcagacggtgctgggaccgttggctcgggcctcggcgctcggcggcggacgtgcgggatggcggacggctcaagcgctcgggcggctgactgattagggtttagaagctgggctggattttttttttatggtttgagccataataggccataatgggccctccgcccctatacgtgctaatgatcgtgtttcgtggct

SEQ ID NO: 92521 - DNA, 358 bp, Zea Mays
cgcggcgcgggcggccgctgaagtcttctcgcccgcccgccgcattgaccgcgatttgtgtggcgactggcgagccgcgagctagcaccgccgcactggcgcttggtgcactgcccccccccccccccccccccccccctccccccgcaccgcacgtcgacggggagacgatgctgagatcaccagctgcatttatgtcggcacatagtgaaggacgacggcacaactacccgcgcacatgctagggcgacttcggctgccggggaacatgatcggtggagagcgaactggcgagtggtgtggcgaataatatcgcttgtccgatcgacaagtacaccgctcgatcgggtcgcggaga

SEQ ID NO: 92522 - DNA, 768 bp, Zea Mays
cacaccgccgccgatgccacctccacctccacctccgcctccgcctccggcaccaccaccataacctccaccgccgccagagccaaggccactgccactaccagcgccagcaccaccaccgtagcctccaccagcgcctccaccatagccgcctccagagccacttcctgctcctgcacctccaccgtatccaccgccagtacctccaccagctcctccaccgtaaccgcctccggcacctccgccataccccccgccattgccgccacctgcacctgctcctccaccgtaaccaccaccagccccagctcctcctccgccaccaagaccaccgcctccgccctcaccaccgccgagacctccaccagaaccacccccaaggccgccgcctccaccagcacctccgccggcaccaccaccataaccacctccttcaccaccaccaagccctccgcctccaccagcacccctgccggcaccaccaccataaccacctccttcaccaccaccaagccccccgcctccgcctaagccacctccagctccaccgcctgcacccccaccgaaaccgccacccttccctcctccaaaccctacaccgtgtccaaggccaccgccactgccataccctcccccgccaccaagcccgcaaccaccgcataggttctgcttctccaaggaccgcgcctcggcggccaccgcaagaaccaccgcgacggccagccccagaagcgccatgttccacgcaccgctcggcgccctccccat

SEQ ID NO: 92523 - DNA, 1738 bp, Zea Mays
cagattttgacaaggtcattagtcctgtatccgttgcacatttctcacagtacaagttagttgatttgctactcaagaagcttgaaggtattggtttccagacatgctttcccagtgagattggtaactcaacacaagatttggtactggaaagcaagatattgatgggacacaagtgcacatcccttgatcagactgatgagggcattctggttggagcatcagttaacaatggagggatgataatagagagaaagctacactgtggtcttcttatagggacagatggcgcaagaagtacagtgcgtgaattggcaggtatatctatggaaggtgaaagggatttgcagaaactggtcagtgtgcattttcttagcagagatctaggcaggtatttgtccagtcagaggccagggatgctgttcttcatttttaatccaggtgcaattggtgtactagttgcacatgacctagagaatggggaatttgtattgcaggttccattttatcctcctcagcagatgtttgaagattttagtgctaagttgcagagaagtacatctgctgcaataatcgagtaatcctctctggtgatgccgcacaccggtttcctcctgctggtggttttggaatgaacaccggtgtccaggatgtacataatttggcttggaaattgggcttactgctgaatggtgtcgcctcaccatcaatattacaaacttatgagtcagagcgccggcctgttgcaattttcaataccgaacttagcgtggagaatttcaaggcagctatgtctattcctacaacccttggccttgatccaactgttgcaaactcagtgcatcaagttataaatagaagcctcggatcaatcattccaagaaatgtgcagaaggcagttctagaaggattgttttctcttggtagggcacaagtctcagactatatcctgaatgagaaaaatcccattgggtcgttgagactagcaagattgagaagtattctcgatgaaggcaaaagtcttcagctgcagttccctgcagaggatcttggcttccactatgcagaaggtgctctagttgttgaagctagttgtgagaagactcatgaaggagaaaaactacagcattctaagagggcatcaagagagtacatcccatctgctaaggttggttcgcggcttccccacatgctagtaagagaagtgcctgcttcgagtgagggcgcgttctcaacactggacctagtgagtggggataaactcgagtttgttctcatcattgcaccagtgaaagagtcatatgagattgcccgtgccaccctcaagatagcagatgagcttacgctatcagccagagtatgtgtaatgtggccacgaggttcgactgatgctgaagtggaagagagcagatccgagttgacaccctggacaaactacatcgatgtcgaggaagtgcctagggtgtcgggtggttcatggtgggagatgtgtcgtattagtaggaagagtgtccttttggttaggcctgatgagcacatagcatggctaacagaactggacagggtgagggatgctgagtcagaaattaggagggtcttctctcatgttctgtgcctaaatagccaccgggtgtaagaatttataaatttccttccatttaggctttgtttagatactttggtattcactttaatccacatgtatggaagcggattaggttataaattaaattaattt

SEQ ID NO: 92524 - DNA, 1938 bp, Zea Mays
atggagatcttccgcaagttggatggcttggccagggacattgagaggtcccagccaccagtagatttgtggaggaagttcgtatactgtacttcactctccggttctgtccttggatcggttgatcacatgaaacaggaaggccagttcagttcttatcatgtcgagtgctttatgtcttgcacttcactgtattttgacaaggtcattagtcctgtatccgttgcacatttctcacagtacaagttagttgatttgctactcaagaagcttgaaggtattggtttccagacatgctttcccagtgagattggtaactcaacacaagatttggtactggaaagcaagatattgatgggacacaagtgcacatcccttgatcagactgatgagggcattctggttggagcatcagttaacaatggagggatgataatagagagaaagctacactgtggtcttcttatagggacagatggcgcaagaagtacagtgcgtgaattggcaggtatatctatggaaggtgaaagggatttgcagaaactggtcagtgtgcattttcttagcagagatctaggcaggtatttgtccagtcagaggccagggatgctgttcttcatttttaatccaggtgcaattggtgtactagttgcacatgacctagagaatggggaatttgtattgcaggttccattttatcctcctcagcagatgtttgaagattttagtgctaagttgcagagaagtacatctgctgcaataatcgagtaatcctctctggtgatgccgcacaccggtttcctcctgctggtggttttggaatgaacaccggtgtccaggatgtacataatttggcttggaaattgggcttactgctgaatggtgtcgcctcaccatcaatattacaaacttatgagtcagagcgccggcctgttagaatcttctcacacgctttctgttcatccaatcgtggagaatttcaaggcagctatgtctattcctacaacccttggccttgatccaactgttgcaaactcagtgcatcaagttataaatagaagcctcggatcaatcattccaagaaatgtgcagaaggcagttctagaaggattgttttctcttggtagggcacaagtctcagactatatcctgaatgagaaaaatcccattgggtcgttgagactagcaagattgagaagtattctcgatgaaggcaaaagtcttcagctgcagttccctgcagaggatcttggcttccactatgcagaaggtgctctagttgttgaagctagttgtgagaagactcatgaaggagaaaaactacagcattctaagagggcatcaagagagtacatcccatctgctaaggttggttcgcggcttccccacatgctagtaagagaagtgcctgcttcgagtgagggcgcgttctcaacactggacctagtgagtggggataaactcgagtttgttctcatcattgcaccagtgaaagagtcatatgagattgcccgtgccaccctcaagatagcagatgagcttacgctatcagccagagtatgtgtaatgtggccacgaggttcgactgatgctgaagtggaagagagcagatccgagttgacaccctggacaaactacatcgatgtcgaggaagtgcctagggtgtcgggtggttcatggtgggagatgtgtcgtattagtaggaagagtgtccttttggttaggcctgatgagcacatagcatggctaacagaactggacagggtgagggatgctgagtcagaaattaggagggtcttctctcatgttctgtgcctaaatagccaccgggtgtaagaatttataaatttccttccatttaggctttgtttagatactttggtattcactttaatccacatgtatggaagcggattaggttataaattaaattaattt

SEQ ID NO: 92525 - DNA, 911 bp, Zea Mays
atggagatcttccgcaagttggatggcttggccagggacattgagaggtcccagccaccagtagatttgtggaggaagttcgtatactgtacttcactctccggttctgtccttggatcggttgatcacatgaaacaggaaggccagttcagttcttatcatgtcgagtgctttatgtcttgcacttcactgtattttgacaaggtcattagtcctgtatccgttgcacatttctcacagtacaagttagttgatttgctactcaagaagcttgaaggtattggtttccagacatgctttcccagtgagattggtaactcaacacaagatttggtactggaaagcaagatattgatgggacacaagtgcacatcccttgatcagactgatgagggcattctggttggagcatcagttaacaatggagggatgataatagagagaaagctacactgtggtcttcttatagggacagatggcgcaagaagtacagtgcgtgaattggcaggtatatctatggaaggtgaaagggatttgcagaaactggtcagtgtgcattttcttagcagagatctaggcaggtatttgtccagtcagaggccagggatgctgttcttcatttttaatccaggtgcaattggtgtactagttgcacatgacctagagaatggggaatttgtattgcaggttccattttatcctcctcagcagatgtttgaagattttagtgctaaggtatgcgagcaaattattttcaaattagtcggatgggagccagcagatgttcatgttttagacataaaaccatgggcaatgcatgctgaagttgcagagaagtacatctgctgcaataatcgagtaatcctctctggtgatgccgcacaccggtttcctcctgctggtggttttgg

SEQ ID NO: 92526 - DNA, 89 bp, Zea Mays
ttgtaaaatgtggcacaatgagcatgaggtgctttgcccttcgatttgatatggacgaccaagattgtgagactgctacagttgcagtc

SEQ ID NO: 92527 - DNA, 707 bp, Zea Mays
tgtcttgaacaacaagctccacgtgctttaggaacctaatgatgtcaaggtctgatttcaaatggcctttgaatgcattattcaagctcttgtttagttgtgtacttcgcattcctagtgacccccagcatgtagcactcagtctacttatgttttcaacatgcaaatgctgtcaagccaagttgatttactaacttttcctcacatagcatcaaatgcttcttcaaaatctgcctcttgttcgtactcatgcaagaattgaaatctacttggatggttggttcttcctcatcttggagctattcttcattctgataattttagtactttcatgcattttgtgatatatgccaagtacagaaaccatgccacacactagtgaacgctgcagccacagtctttcccatagcaatgtcctgaactcctgatcagtgaaatcgtttgtggttgtttttgatgtgttgataaaaatgcattgaacaaccacttgaacgactcaatagtttcatcatatgtcaaagcctagtttgtctccttttgtgtcctgctgttttcatgcgcagaaggaggctgcagttctgtgcgcagcaggagtttggtggtcttgtgttctgctttttttggcattgtactttggtccattttggactgttttcttctcttaatttaatgatgcgcagctctcctgcgtgttcacgaaaaaaaaa

SEQ ID NO: 92528 - DNA, 118 bp, Zea Mays
cgtacttttttatctcccgcagcggtttccctatattatcctgctatacccactacaactataaaatatcagtatctaactctattcatcttttattattttttcaactattaaatag

SEQ ID NO: 92529 - DNA, 1506 bp, Zea Mays
aggtcaaactcctctcccagcgttcgtagccgcgcgtttccgtccttcaaaatccccccgtccggccgtccccctcagcagaagttattaattagtcctcccgcgggcgtcccgtgtcgtgtcgtgtcgctcgcaatggaacgcgagagcgatgccggcttcttccaccacgacgacgcgcaggtggaggccatgcagcggcgcgtggacgcggcggcgcccttggccgacgacccctacaccatcttccgcctcccctcggccgtgcgcgagcgccggcgcgacctgtacgagcccaaggtcgtgtccgtgggcccgtactaccacggccgcgccggcctgggcgtcgcgcagcagcacaagtggcgcctcctccgcgacttcctctcgcggggggagaaggcggccgccgccggtggcctcggcgcgtacgtgcgcgccgcgcgcgaggtcgaggcggacgcgcgccggtgctacgccgaggggttcggcctgggcgccgacgagttcgcggagctgctggtgctcgacggctgcttcctcctcgagttcttcctcaagaagggcgaggggcagctcgccgcgcccgggggcgccaagtgggcgtggcaccacatgtaccacgacgtcctcctgctggagaaccagatacccttcttcgtcgtcgagaagctacacggcgtcgccttcgccggcgccgaccgcgaccgcgacgcgctcctggacatcttctgcaaggccttcgccggcgacctcccgtcgagccgcgtcatccggccgcgcagcgacaagaccatccaccacctgctgcacctgcactacgagtgcaacatccgcagcccagccgccgccgacagcgacaaggcccgcagcagcagcttcggcgacgccaacggcgcgtcgctggccatctggaagcagccggcgatcccgtcgccgcgctccggcgaaggcgccggcgccggcgccggcagcaaaggccgtctgacgtcgatgatcccgccggcgggcaagatggaggaggccggcgtggcgttcaagcgcaaggcggccccgcgggacctgttcgacgtcagcttccggtacggcgtgttgcacgtgccggcgttcgtgctcgacgagggcgcaaaggtgctgctcgcgaatctggtggcgttcgagcagggaggcggccgcgcggcgcggcagctggacgggggcaacctggtgacgggcttcgtggcgcttgtcgggtcgctcgtgaactcgcggagggatctggaggtgctccgccggtgcgggatcatgcactgcatgctacctgatgacgacgccgtagcctacttcaaccacgttgtacagtataccaccatggactacgaccggaaccttctcgccagcctattccgagacgttagggagcactgccattggaacagatgatcgctctgcaccgtgcttctatttggtatttgtgtataattacacttatttggcatcactgtcactactcactactacatgcaa

SEQ ID NO: 92530 - DNA, 104 bp, Zea Mays
ggagacagtgctcacggtggtatttgcgctagcgccgccggagatggcgagctacgcgatggtgccgacgacgggaaagtggtcgagggagatgaacagggaag

SEQ ID NO: 92531 - DNA, 352 bp, Zea Mays
tctcgtgtttttgctagagagctatggtttcaggtattgtccaaggtgaggctgcaaaatctgagtccaggattggaagtggcagtgtttcaggaatggtggagacaatctgagacccaattgagtaatgaacaaaggaaaggtttcaattcattagtgattctggtggcttggaggctttggaaacacaggaatgaatgtgtctgtgatgaagcctctccaagcatgtctagaatcctacaaaacacaagtgaagatgtcaggctgtggagtgtagcaggagcaacagcccttagaaggttatggccctagtttacggattgtggtctgtatattctgtaccccctctctc

SEQ ID NO: 92532 - DNA, 1950 bp, Zea Mays
agtgcggaagacccggccccagcgctggcggagaccacccccaggcacagcttcgataatttttgtctgattccggcgttccgcttccgcagacggcagacatgaagaccggagaagaagcgcgcccgaagcgcctgacctcctgccccatcattttcatcccacgcctataagtatccggtcctccgtcctcccctccacctcctttcccccgcctctccgccgcttcttccgcgcgcgccgcgccgcgccgccctcttcccccggctcctcgtgtttgtttctcttctcttcttatccgccgaagcccgaaggagaaaaacacccaccagaaacccaggacgaggaagagtctgcggccgatcgtggatgtcgccaccgacgaacggcgccatctcgctcgcctacgcgccgtccatgatgctgggggcgggcgccctgacgaacccgccgctcctccccttcgacggcttcacggatgaggacttcctcgcctccgccgacgccgctctccttggcgaggctggtaccgaccagaccctcctcctgctgccctcgtgccccggggcgaactgctgcggcggcagtagctccgaccagggtctcggagccctagcgtgtgaggtcacaaccgccggatccttctcgctcttgggccagcctgcgcctgggcaggtttcgtgggaggtgacgactgccgtcgctgcggaccgcaacaccttctcgcgcgcacgcgaccctgcgccctcaccaccaccgtccccggcgctgccgctcgtgcaaaccacctcccagtcccagaggacctccatctaccgcggggtgaccaggcacaggtggacggggcggtacgaggcgcacctgtgggacaacacgtgccgtaaggaaggccagaagcgcaaggggcgccaagtctatttgggtggctacgacaaagaagataaggctgcaagggcatatgacattgccgctctgaagtattggggtgataatgctactactaacttccctagagagaactacatcagagagatacaggatatgcagaacatgaacaggcgtgatgttgtagcatcactgaggaggaagagcagtggcttttctagaggagcatcaatctacagaggagtaacaaagcaccaccaacatggacgctggcaggcaagaatcggccgtgttgcagggaacaaggatctgtatcttggaactttcgcaaccgagcaagaggctgcagaggcgtacgacatcgcggcactgaagttcaggggcgagaatgccgtgaccaacttcgagcccagccggtacaacctgctagcgatcgctcaacgagacatccccatcctggggaggaagctgattcagaagccagctccggaggcagaagaccaggccgctctgagcgctcgttcgttctcccagtcccagcagtcgagcaacagcttgccaccgtatttcctcaccaacctcctgcagccgctgccgtcgcagcactcactagctcaggctctgccgagctacaacaacttggggttcggggagcccagcttgtactggccctgcccctgcggtgacccgggggagcagaaggtgcagcttggcagcaagctggaaatcgtggacggtctcgtgcagctggccaactctgctgcgaactgacagtgctatctgaaatgctggttgttttgcttgtgtggctcggggtcgggggtacgttcatggaactgatagcctgagccctgaagatagcggggtataacatacattgtgccgtttgtttgtcgtattttggtgtatcgtattttggtgtacaaaggcatccaagagtctagtcaagctaactagatgatattatcgggtgtatgatctctctaccggaatggcttaaggcattcaccacagacgaagtgctacattgttaatgagaaacaacactggatgtgtggttagtct

SEQ ID NO: 92533 - DNA, 117 bp, Zea Mays
gataattttaaaatttgacttatttagagacagagtggttcctagaataaatgtttttatcatcccatccctcacaaagctagtaattgaaagcacctagagggggtgaataggtga

SEQ ID NO: 92534 - DNA, 2522 bp, Zea Mays
ataatcctctttcgttgctcgccagcctgcatcctgagacactcccaaattcccaatgttccaccgcgccagctcgcgactttgatcccgttccagcctccgttccgttcgggtcctgctggtccattacccttgtaactaaaaccccaaatctgtctcaagtccgagcaatttcaaagcgtgaagctctgctcacgtcgtcgcctccgcgtccgccacccactcaacaacgcggcggcgaatcgcgggcggttcgccgccgaccgccgccgcctttccctcgccagccccccgctcctgaagcaatggtactggaccacgccatcaggggctcggcggcccgcagggctgagacccaaaccctagcgccagtgctgctcatgggcccgccgcctccaccgccgatcccaccgacgacggggatgtacctcccggggcccccaccccccgggacgctcctgccgcacccgatgcacatggcgctcccgcgtgaggtcatcatttacatggacgagtgtcggagccgctccctcctcaagttcatttccgacgcggggattgtgccttcgctagaggacgagcggaggagggagcgggtagtacgcgagctcggcaagatagtaatggattgggcaaagagggtggcctacgagcagggcaactggcactggatcgcttcagccacggtgttgaccttcggttcctatgccctgggggcgtatggacctgaatctgatattgatgtcctctgtattggtccttgtattgcatcgctgcaacaccatttttttgttgtcctgcgacaaatgctcgaagggaggccagaagtatcagaattgcattcaattgaaggagctaaggttccattgatgcgttttaaattcaatgggattttagttgactttccttatgttcaactcccagtgatcaatgctgcagaggctatgcatgcatttgatccccatgttctagaaaatgtggatgggccaagttggagatgtctatctggagtccgtgctaatagacaaatcattcaattagttcccaatatgaagaaatttcaatatttgttgcggtgcctcaaactatgggcaagaaaaagaggacttcattgccatctacttggcttcttcgctggaattcatttggctatccttgctgcatatgtttgccgcagacatccgaatgctagtataaatactctgttgtctttgttcttcgacatttttgttcactggccttggcctcttccagtgagtttgcttgatccgcctgttccttgtcggggtcctgatgggtgctccctcatgcccataatgttgccatgtattccaccagaattttgctcctctagtacaacagaaagtactttcagcaaaatcaaagaagaactttggcgtggctatgctctaagcaaggataccagaagtactgattttaactggagttggctctttgcaccttttccatatggtgcaagatacaaatgctttctccgcatagttctctctgctccgatgggagaagaattgcgtgactgggttggatgggtgaaatcacgattccgcaaccttcttctcaagctggagagtcttggtgtttactgtgaccctgatccctcagaacaagttgatcataccatcactgatccaaatgttgtattcttctggggtctcatctatagaaggaatattcaaatatgtataagttctctcaaagaagatttcatgaaaagtgtctgcaataacatctatggaaaggaaaaatgtgcccattcagacatcacaatgtccattgttgggcctccccagctgccaaaaagtgtctttgatctctcagtttactctgaaaagctgccacaacatatgatggggcaccaactaatgaagcagaactacaatgcagtcagttaggctcagctgtcatattgcgtgcgagcttcatatgtcaatatcacaacagcaagaagctgctgttgaagtcgttttcaacatcagatttgaatttttttttactgccctttttagatgtaggggcttgttcatgcctcgggaacaaggaatatgggagattttttccttgtgaagctggatgtcgatagctggatctcttcaagcatccagcaaaatgagatggaagcatctcttgaagcattcaagcgacttattcctgttatgaggtgtgtgtgcaggtacatgcatattcatgtacacatcatagcaattggtatacaagtgaggaggaggtacggtatagctgtatgtaaactgtagatgtaatgtttgtactcagcagcagaaatgtgtaaattgcttcctgttagcgctgcttctgggcacagatgctgaggttgatatggaggccatgaatggaagctatatattccaggccagtatgcaaatgcaagtgttttggatcgattcgacccacttttgttttttaggctgtaaaaaaactgtgtcctagaatccaaggattcttatggtaatgagtatgactttgtggaagaaaaacgtttactc

SEQ ID NO: 92535 - DNA, 943 bp, Zea Mays
gtcaagacgaaacaaagtgtcaaaacccaaaccaaccaagcaacacagcacaaggcgcctcgagccacttaaacagagcaagccgccgcggcggcgaccgggcgaccgacgccgaggctgcgcgccctgcgccgggatcgagaggggaaagggaaggggaccagccggctcgcttggaggctggagctcggcccggcgggcccatggggggacgcctggtgtccatgctccggtggccgccggacctgggcctgcccagcctggccgcgctgctccccgcgccgcccgcgcacctccgggtccaggtccaggagtggtggcagtggcagtggcagcggtcgcggcccgagcagctgggcgcggcggcgcggcggtggcccgagctcgtgcgggacgtcccggtcctggtggacgccgcgctgtggggcgtcgtcacggccgtcgagtccgtcgcgctcgtctccatgatgtgctgcttcttcctctgctgcggctgcacgctctgacgatgggctccgcagtgccgccgcctgccaagcaaagcaagtactgctgccgcctgccagtatgggtgatgattcctccgtccgtccccatggcgtccgatctcttcgggtttttttttttactgcgtgttggttgtggtggatcagctgtggctaggtggagttactgtcatggcaatggtaactaggatgtgatctgtgattgtatttgggcgccagttctccgccattttgagatctgacttgaagcagggtgctgtagcgatagtgcgggaaggggattgctaataaattggaagtaggtgcgtggtgggaacgcgaaaatatctaaagtatcgagtcagttgcgtaccagcgtactactcctgaacctctggaaccgactttgtagtttgtatcagtgcagtaataaaggcctcgtggtaccgtcctgtcct

SEQ ID NO: 92536 - DNA, 414 bp, Zea Mays
atgttcatttgctgtggactgccccgaatatgcatagccccagtcggtgttttacagggtaaacaccacactggtgatgtccgggaatttctccttgatggccgccttgataccgctgccgatggattccggcccgtcgtacctcaccaggcagtcctcgccatcgacggccaacacatccacgctcccgccgtagttcgcgatcgctggccgcagtatgtccaggtgccggttcaccgcctcggccgttgtctccgccgccggctggtccccgtcgaacacctgacggatttccttgaaagcgtcgccgaacttctccttgagcacacgctcgatgcccatattcatcgtcgtcgtcgagctggggcagctgccgcaagctcctacaagttgcaaaccatggaaatggactag

SEQ ID NO: 92537 - DNA, 291 bp, Zea Mays
atgttcatttgctgtggactgccccgaatatgcatagccccagtcggtgttttacagggtaaacaccacactggtgatgtccgggaatttctccttgatggccgccttgataccgctgccgatggattccggcccgtcgtacctcaccaggcagtcctcgccatcgacggccaacacatccacgctcccgccgtagttcgcgatcgctggccgcagtatgtccaggtgccggttcaccgcctgcagcagcacaaaaggatccgcttgccaatcagtgatagtattgcttag

SEQ ID NO: 92538 - DNA, 351 bp, Zea Mays
atggcccaacaggaacatgcttctgtgcgtctcatcgatggcactaaggtcaagaaaaggtcttgcaaggtcaagaagatccgacgatatagagatacgaagaagaatagaaaccttaaattaaaaaaaagctcaatcaaaaaaaagctcaatcaggataacaccatgctaatactagacatgaaccacgtgaaccgatgctcccggtggcataataactgcaggctctctctggtcttcatgccgagaggacacttcctcctgctcgcggggcttgccggtgacagagctcctcaccgtcgcaacgttgcagagcttcatcgtggcttccattattcggctccaagctag

SEQ ID NO: 92539 - DNA, 2571 bp, Zea Mays
tgtgaaagagggcaaaagaaaatttcggccacgtgaaccacatcttccttcgccacatccggagctcatgtttattaactgccacgagcccacaaacgtggcgcgccctgcgccgtacgatgccacagtagcctatattttacactttcccaaaccaaaaactatcctgtctgtcttaatcccgttccaatcgctgttacctgataattaccgcagcgatcgaaacgaaccagcctcaaacccatttccttcccgtgcttccttgttcctcctcatcccaaaattcgcaagcgccgattccaatcaggaaaccggaaacctttcttcctccgcaattcaatccggcgggccccgaagccggcgccaatggcggccgccgccatctctcacctccgccggggcgcgcagcaccacgcagtgctatgcatctcgctgtcgcgccgccgcttctcctcctccgccgtggccgcggcctccccgctcgccgcggccgcgcgccgcctcctctccacgacggcagactccgccaccgcgtccacgtcgggggagcactacaagccgccgcccttcgaccccttccgcgccgccaccctatcgccctctgctccgccgctagagtcggcccggctcgaggatgagcccccgagcagtccgccgccgcaggatgaggcggccgcgtccgtggcggcgcacgagcaggcgacgctggcctgccaggagctggaattggagggcctcaaggcgggggtggaggcggtgaagagcagggaggagtcgccggaggagaaggaggcgtggtggctgctcagccgagcggtcgtcaactactgcggtagcgccgtcgggacggtggccgcgaacgatccgtccaccagccagatgctcaattatgaccaggtgttcattagggacttcgtgccatcggccatcgcgttcctcctcaagggtgagagcgatattgtgaagaacttcctgctccacacgttgcagctccagagttgggagaagactgtggattgctatagtcctggtcaagggttgatgcctgctagtttcaaagttagatctgtacctttagatggcaatagcgaagcatttgaggaggttcttgacccagattttggagagtcagctattggacgtgtagcacctgttgactctggtctttggtggataattctgttaagggcatatggaaaaattactggagactatgctctacaagaaagggttgatgtgcagacaggcatcaggctaatactgaatttgtgcttgtctgatggatttgacatgtttcctacattgcttgtaactgatggatcatgtatgattgatcggcggatgggaatccatggtcatcctctggagatccaggctctgttctattctgctttacgctgtgcccgagaaatgattggggtaaccgatggatccaagaacttgatccgtgctattaacaacaggctcagtgctctgtcatttcacatcagggagtattattgggttgatatgaagaagataaatgagatttatcgctataagactgaggagtattcccatgatgctattaacaaattcaacatctacccagagcaaattccatcttggcttgcagactggattcctgtgaaaggcggttaccttataggcaatctgcagccagctcacatggatttcaggtttttctccctagggaatctgtgggcgattgtctcatctcttgctactcaaaggcaagcagagggtattctgaaccttattgaagccaaatgggatgacatagtagccaacatgcctcttaaaatatgttaccctgcactagagtatgaggaatggcgtatcatcactggcagtgatcccaaaaacacgccctggtcgtatcataatggtggatcttggcctacattgttatggcagttcaccttggcttgtatcaagatgggtaggcgtgacttggcacggagggcagttgaggtggcagaaaagaggctctcagatgacaagtggccagagtattatgacaccaggacaggaaggttcattgggaagcaatcacggctatatcaaacttggagcattgctggatatcttagctctaagatgttattggactgtccggagatggcatccatactagtatgcgatgaagacttcgagctgctggaaggttgtgcttgcagcttgaataagaatgctcgcaccaaatgctcacgtcgtgcggccaagtcgcaggttcttgtgtagttccatgcctgttcttgacccaaaagctgcaacgctccttcaacttgttgtaattgttcgtcacagaagctggcactagttactagttacttaagcagaatgatcacaaaccacctatgccgatttttttggcgagttcgtggttgatccatttatacaggagtatatgttgttgtctgtacattttatctaatggattttatgtatcctgctggtcaactcaagttgattggtagttttttttatgtaagcagacagcatgtaaatatcaccgctcgttacaagtgtactaaaagaaaagttagagagacataatgacggaatgag

SEQ ID NO: 92540 - DNA, 1968 bp, Zea Mays
acgctactggatacttccgatgcctgttccgctgtttctcttctcccgtgtcttctcccgtttacctgccgtgtgcgactactaggaggtcgccgccgccgtacgctcagcttctctgcgccggcgacaagcacccaccacaccaggattgtgtttattggatttgagtgtctgattgtgtcagtcaaatttgagttcatcacatccagcccccgcaaccccgtccgtgggcttccccatgcgctgtgtggcactacggtagccgaccctcagcagatcttgcgcggctgtcctcaccagtcgccaacggcctcctcgcccagtcgaccttctcagacagcacccctcgacagcacccaagcaaccgaccgaagtgagcagtgactcagttagagttgggagaagactgtggattgctatagtcctggtcaagggttgatgcctgctagtttcaaagttagatctgtacctttagatggcaatagcgaagcatttgaggaggttcttgacccagattttggagagtcagctattggacgtgtagcacctgttgactctggtctttggtggataattctgttaagggcatatggaaaaattactggagactatgctctacaagaaagggttgatgtgcagacaggcatcaggctaatactgaatttgtgcttgtctgatggatttgacatgtttcctacattgcttgtaactgatggatcatgtatgattgatcggcggatgggaatccatggtcatcctctggagatccaggctctgttctattctgctttacgctgtgcccgagaaatgattggggtaaccgatggatccaagaacttgatccgtgctattaacaacaggctcagtgctctgtcatttcacatcagggagtattattgggttgatatgaagaagataaatgagatttatcgctataagactgaggagtattcccatgatgctattaacaaattcaacatctacccagagcaaattccatcttggcttgcagactggattcctgtgaaaggcggttaccttataggcaatctgcagccagctcacatggatttcaggtttttctccctagggaatctgtgggcgattgtctcatctcttgctactcaaaggcaagcagagggtattctgaaccttattgaagccaaatgggatgacatagtagccaacatgcctcttaaaatatgttaccctgcactagagtatgaggaatggcgtatcatcactggcagtgatcccaaaaacacgccctggtcgtatcataatggtggatcttggcctacattgttatggcagttcaccttggcttgtatcaagatgggtaggcgtgacttggcacggagggcagttgaggtggcagaaaagaggctctcagatgacaagtggccagagtattatgacaccaggacaggaaggttcattgggaagcaatcacggctatatcaaacttggagcattgctggatatcttagctctaagatgttattggactgtccggagatggcatccatactagtatgcgatgaagacttcgagctgctggaaggttgtgcttgcagcttgaataagaatgctcgcaccaaatgctcacgtcgtgcggccaagtcgcaggttcttgtgtagttccatgcctgttcttgacccaaaagctgcaacgctccttcaacttgttgtaattgttcgtcacagaagctggcactagttactagttacttaagcagaatgatcacaaaccacctatgccgatttttttggcgagttcgtggttgatccatttatacaggagtatatgttgttgtctgtacattttatctaatggattttatgtatcctgctggtcaactcaagttgattggtagttttttttatgtaagcagacagcatgtaaatatcaccgctcgttacaagtgtactaaaagaaaagttagagagacataatgacggaatgag

SEQ ID NO: 92541 - DNA, 1637 bp, Zea Mays
acgctactggatacttccgatgcctgttccgctgtttctcttctcccgtgtcttctcccgtttacctgccgtgtgcgactactaggaggtcgccgccgccgtacgctcagcttctctgcgccggcgacaagcacccaccacaccaggattgtgtttattggatttgagtgtctgattgtgtcagtcaaatttgagttcatcacatccagcccccgcaaccccgtccgtgggcttccccatgcgctgtgtggcactacggtagccgaccctcagcagatcttgcgcggctgtcctcaccagtcgccaacggcctcctcgcccagtcgaccttctcagacagcacccctcgacagcacccaagcaaccgaccgaagtgagcagtgactcagttaggtaagttcagagataatgtttcattttttctacgaattttatgaatacatgctcctcttatatgaactgcaactatctctaccctagaacagacatcaacatgtacatgactattaaatttcctgttacattgttctacctatattgtaacaaatgtcctttcactgttgtcattatgtcaacttagttaattatatgggcactaatatattttttatttataaatacaccaacaatttacgaggagctgcgcccattcgttttcaaaattctaattgtaatgtccacttcttcagtagattcacagtgtacggaagggagccacttaatacttagtaaaacaccatcaggtaaccactttgtagttcaagtgagctgaatcgcccaaattcaagatagtgtatctctacatgctagtatgatttctttaaatatgcattgtgtgagtatatgctagatcacaatcttttactttcacaataggttcttgctgtcagtgaccacaatttggtttagttacaatgactatagcatgacctttacgatcatgccctcaagcatccagttttttttaccatatggatatgtgtggatacaatagcagttagttttattgtctatcccaattaagaatggccacaatgtagcatttgattgacatacacctctaatatatcgtacataagcaagaatatgtgaatacagtagcggtttgtttcattacctgaatttatttattaagaatggccataaaaaagggtgtttcgttacctatatatgaacacatactacactatatacaaattcaaaccaagtgtaactctggcatattgtttctaaaaacactaaccgttagttcatgtgatgttcatcctctttgagatttcatcagactgtgtttctaacaatggacaaaaaaggaataactaatgagttcaaacaatactattatgtccttcactaggaaactggtcagtacatagtttgcctctttatatataatataaatttaacaatgcaatttatagcttctttctccgatatatacaagctaaaaaaataagtgttcaactgtgtaggaacagtgagatcaatgattcaatgcctgcacctagatatgacatgtggtgattctgttgactgtactttaaactcaagttgtgaacaactaaactcaaactatgagtaattcattgtaacatataactgttgtcttttttacaatgttcactattgtcttgtgc

SEQ ID NO: 92542 - DNA, 1338 bp, Zea Mays
acgctactggatacttccgatgcctgttccgctgtttctcttctcccgtgtcttctcccgtttacctgccgtgtgcgactactaggaggtcgccgccgccgtacgctcagcttctctgcgccggcgacaagcacccaccacaccaggattgtgtttattggatttgagtgtctgattgtgtcagtcaaatttgagttcatcacatccagcccccgcaaccccgtccgtgggcttccccatgcgctgtgtggcactacggtagccgaccctcagcagatcttgcgcggctgtcctcaccagtcgccaacggcctcctcgcccagtcgaccttctcagacagcacccctcgacagcacccaagcaaccgaccgaagtgagcagtgactcagttagattcacagtgtacggaagggagccacttaatacttagtaaaacaccatcaggtaaccactttgtagttcaagtgagctgaatcgcccaaattcaagatagtgtatctctacatgctagtatgatttctttaaatatgcattgtgtgagtatatgctagatcacaatcttttactttcacaataggttcttgctgtcagtgaccacaatttggtttagttacaatgactatagcatgacctttacgatcatgccctcaagcatccagttttttttaccatatggatatgtgtggatacaatagcagttagttttattgtctatcccaattaagaatggccacaatgtagcatttgattgacatacacctctaatatatcgtacataagcaagaatatgtgaatacagtagcggtttgtttcattacctgaatttatttattaagaatggccataaaaaagggtgtttcgttacctatatatgaacacatactacactatatacaaattcaaaccaagtgtaactctggcatattgtttctaaaaacactaaccgttagttcatgtgatgttcatcctctttgagatttcatcagactgtgtttctaacaatggacaaaaaaggaataactaatgagttcaaacaatactattatgtccttcactaggaaactggtcagtacatagtttgcctctttatatataatataaatttaacaatgcaatttatagcttctttctccgatatatacaagctaaaaaaataagtgttcaactgtgtaggaacagtgagatcaatgattcaatgcctgcacctagatatgacatgtggtgattctgttgactgtactttaaactcaagttgtgaacaactaaactcaaactatgagtaattcattgtaacatataactgttgtcttttttacaatgttcactattgtcttgtgc

SEQ ID NO: 92543 - DNA, 236 bp, Zea Mays
aaaaatattgggcatggactctgacaagaagaaagaagagaggaacaaaaattaacattttcctttcctattttttctctgttttaaataggtctgaagtccattgcaagtaaaatatgcctatatggagttggaaagattgggtatgaggctcctcaaaatcgtgtcgtcatttttaatgcatttgcaggttgacgtttggctcggtttttagaatcttcactaatatgtgttat

SEQ ID NO: 92544 - DNA, 354 bp, Zea Mays
atggtctgctgcaaggagcaccagaggatctacactgagtggttcgccctcgccgactcaaaaaactcagatagtgagcctgacttcgaagagaccgaacaaaaaacaataaatgagccacatgtcaatgttagaagtgaacctcttacaacacgtcgttgtgcccttcaaccgtggatggatggtagcagtagcagcaacagtactgttgacctcccagatggtgtacctccagctccttcgagaagcaagaatgacaggctttctaaagaggaaatgattgcaacgatggatgaagttgttcagggacgcaagatgcaagtggaaaaagccactaaagagagtgaagattga

SEQ ID NO: 92545 - DNA, 1726 bp, Zea Mays
ccttcctggcctgccttctcttctcccgccttctcctcctcccagcacagcagcagctgtgaccacatcaccacacacacacacatatatacttggtcatcatccagcttccagcagccagctgcccgccgatcaacgtgtaggcggttcaaagggaaatctgctgatggacatggcgcacgagagatcagacgccagcagcgaggaggaggtgatggccggcgagctgcggcgcgggccttggacggtggaggaggacctccagctggtcaactacgtcgacgcgcacggcgagggccgctggaactcgctcgcccgatcagcaggtctgaagcgcactggcaagagctgccgcctccggtggctgaactacctccggcccgacctccggcgcggcaacatcacgccgcaggagcagctgatgatcctggagctgcactcgcgctggggcaaccgctggtccaagatcgcgcagcacctccccgggcgcaccgacaacgagatcaagaactactggcgcacgcgcgtgcagaagcacgccaagcagctcaaatgcgacgtcaacagccagcagttcaaggacgtgatgcgctacctctggatgccccgcctcgtcgagcgcatccaggccgccgcagccaacaataacgccagcggcgccggggttccgccagctggcgccgccgcggacgacacgccgctctcgtcgtcgtggcagcacggcggcggcgccgacgacgacggcggcctctacgcgtcgccggagctgcccacggacgcctgctggcctcccgcagactgctactactacccagccgccgctgaccaccagctactgaacaaccccgccgccgccgccgtcttcccggacctgtcaagcaccacggccgggtcgtcctctccgtcctcggattccggcgcggggacagcacaaccctggcccgcgccgctgggtggcgcagagtggttgaccaccggcgcctgctgcgacgcctccagcgccgccgccgccctgggcgggcagcagcaacaatcgtgcctggtcggggagacgtcgtgggcgtcatccgagctccccgagctgggcgtcgcggacttcgagatcggcagcttcgacgtggagagcatctggagcatggacgacagcctgtggttcacgcaggcgcagggcgtgtgaatccaagccaccaacacacgcggcgcgcgggcacggaaatcgatccacgttacggcatcatatatcggcggtggacatgcacccgcgtccatcggacacaagcagtacgtcagccgccgagggcgcctagctagctagcagaggagcagagcctgctgaagacacggggtagaagaaggagagacagagagggatattatttggaggaagccaagacgacggcgtacagtactcagttcaagatgctgttcttgggccgcccttgccttgccttgcctccggcaggagggactattcctccactccagttctactccgtttcttactaattctgttctcctgccttaattccgtagcggcaagtagctagtagtagggtatatacgcgcgcgccaaagaagaagacgaaaaaagaagtccagaaaaaataacgtagcttagcgttaataaggtgtttgtacgtcgcccgtctaattaatttttactcattcttttttgagtaaatacatagtatatatagtacatgaacgactgaaagttactgacgat

SEQ ID NO: 92546 - DNA, 109 bp, Zea Mays
gggaacgtagacgtgtaacgtgtcagtacagctacaagggttctacttcgacggcggctccagcggtccagcctcaggtccagcttacaccgtcgctatccattttccc

SEQ ID NO: 92547 - DNA, 2145 bp, Zea Mays
caaacgaaggcgcggagacgtgctgcagagcctgcagaggcttttcttccccccaccccacccatcgcgtgtgagtccacggtgtgatgtcacggagcggtggcggctttcccgattcactgtgcgggagaaatccccgtgcagccttcttccacctcctcctactctccgctattcgtcttcgctgatttctgccgctccaattccatcgcttccctgctttagaaccttctctgctagcttctccccgtcacagcttttggtgcctcgtcatcggcgaccaaaccgccggcgaccggataaactaagccagctccttcgctccgaaagtcgtctctcgtagagagcacttgctcacctgctccccgcccccctctgctggcgctggacttgctcggagtggagatccatccggacctggttcgatttcttcatttcgggttcgattcggtttttctatcccagagcgaaagatcaatatcacctgacacaacataacgatttcgtggaagccgaggttgcttctctgctcagtgggtggataactggattgtggattttgctaactacatgctgggttatcagcctatcataaggaaagcaaagaagagacaacaaagcaatttgttgtctctttcttaggagctggcgagtactcggcatggcagatgctagttcgaggactgacacctcgactgttttagacatggatgataagaatcaaaggttagaaaatggacagagtggagctatggccctggcttcgaattcatctgatcggtctgacagatctgacaaacctatggaccaaaaggttttacgacggcttgcccaaaatcgtgaggcagcaaggaaaagtcggctgaggaaaaaggcatatgtgcaacaactagagagcagcaagctaaaacttgcaagcctggagcaagaactccagaaagctcgacaacagggaatcttcatatccagttctggagatcaaactcatgctatgagtggaaatggagctatgaccttcgatttagaatattctcgatggcaagaggaagaaaataagcagataaatgagctgaggactgcagtaaatgctcatgcaagtgaaagtgacctccgtcttatcgtcgatgggataatggcacattatgatgagatattcaggctgaagggtattgctgcaaaggctgatgtgttccatatactttcaggcatgtggaaaacacctgctgaaaggtgcttcttgtggcttgggggtttccgttcgtctgagcttctaaagctccttgtgaatcagcttgagcctctaactgagcagcaattgatggggctatccaatctccagcaatcctcccagcaggctgaggatgcattgtcacaaggcatggaagcattgcagcaatccttggcagaaacgctggctgggtcccttggtccatcaggatcttccggaaacgtcgcaaactatatgggtcaaatggctatggccatgggaaaacttggcacactcgagaatttccttcgtcaggctgacaatctacgacagcagaccttgcatcagatgcaacgcatcctgacaattcgacaagccgctcgcgcgcttcttgcaatacacgactacttttcacgtctacgcgccctgagttctctttggctcgctaggccgcgagagtagcatcacccacgttggagtcactccatgggccgatctgtgaatgtggggctgctggctgcaaactcgcaacgcatttgcagatggctggagggtcagttctctttgtacaagttgtattaacatcttctggtctcatattgcgcttcagtgttgtacaagttagggtaaagcttgcatttaacttgtaagttatcatggattcatgattgacatattgtacaattgtattagcaataagaatagaagtacataaatgctggaaggactatccagcgtctatattggttggaaacgagcagcagaagcttgtcatgtcgattttgaatagtcggttgaagtgttctttttggggtctatagagaacaaagaaagcttcaggagaaatgtataggtattcaccagtctaccatagtgtgtgcttcggggagctccttgtgatggtaaaatttgataacgaggatgagttcagtgacatt

SEQ ID NO: 92548 - DNA, 854 bp, Zea Mays
acgaactttggtttcaggtcgtttgttgagcgcttggcgagcaccaacgttactgttgccaaagctgtcgctacctcctagcagcaaggtaccaccaccaggtgtgacagcagagaacccatcagcgccacttgaacctcccaatacaccaaagcagagctcgacgccggagccggaggtcgagcgcacaggggaaagacgcaagaaccgagcggcaagggagaagaaaccgagctggagctcgcaggggagtttgccgaggagggaaatgggcagggacgatgcggcgcggggagcaggagtcagggcgccgagcgggatccgagccagggccagggagatgggcgccaccaccttggcgggcggcagaggacgcgctggggaagaagcactacggcaagcgaacgtcagagcgctcggtccgagctggttgacgcgagcagggaggagcagagccgagcggagggctgctcgcgcggccccaggcgccaggagagagccgcggacgagggaggaagaaagctccctgccgagcttgaggggcgcggctatggagatcgggagcagggagggctctgagctcgcgtggccagggaagagcgaactgagggggaaagctgggagttgggcatcatcggagctgggcgagctgggcgccatgggagcttggagcggggaagaccacagcgcgcaggggaactccgcgagccagggagctgcgcggtaggggaagaggagcagaggaacacgagcttggggaaagggaaccggcgagcggcggagaggagcaagcgaccgagctgccgaacgcctgggagggacacagtggagcagggtcatgaggaagatgcagc

SEQ ID NO: 92549 - DNA, 7336 bp, Zea Mays
cagtggaggtacaggggtctgcaatacaggaggagtaacaggcctaatcaatatatactgacaatgctcataccatacacttaggctctgtttggatccaccccagctaaactttagccagcacctctgggatttgctttcagattttgaactgcagcttgacatagatgataaacaccttttcagcttagcctcaaatggcaaatattcggctaaatcttcttacaaaggccttttccttggctcaagttcctttgcatattataagatggtgtggaaatcatgggccccgcccaaatgccggtttttcatttggctagttactcagaaaagatgctggacagcgaataggcttgcaaaacgaggtttggatcacccggagaaatgtcttctgtgtgaccaagaggctgaaactatggaccacctgacttgtgtctttgcaagagaattctggtatcttttgctgagacagtttgggttgcaactccctcgcaccatagatggctgcttcctccttcctaggctggtgggaaaaggcagcaggagtagtaagtgggcttatcaaaaagggtctaaactccctcatcattttgggtgcttgagcgatttgaaatcaccagaatagatgggttttttatggttggaatttaaatataactctaacctttatctgggcaaaagaggagatgcatcggtgggaaatagcggggcaaaagacatttcttatctggcagcccccttagctgagtcctagggacttccctagtgtgtagtgtgtgggttatgttttcctagatggattcctttctgtatgcgtgcttctggccctcgtaaggttttttttttgtatcgggccttctttagaccctggttaccttttcttcttaatataatgaggtgcagttctcctgcgcatttcgagaaaaaaaactttagccaactaatatgaccagctaaagtttagctagggctgtttggatcctctagctaataggtgtatattgaccatccatctccattgtgctgaggagcacgaggcaagaaccctccgctgccaggatatgtgcgaccccaccaccagtgtggagcgtgagcggccctccgctgccggatgccacggccttgtctggggaggcgccatgccgctgggtccgccggggaacagtgctaccagctggtgtggcccgcttgtgggcggaggctggtgaaaatgcccaagcgtggtggaacggagcccgagggctcagatgtggaaaagacaggagggtaatttggtcattgagcacttttagctgggttggaacatataatgagataatggggttcttattagctaagaagcatttggctgatattttagctaggctgtttggatccactacagcttaatttagtcataaagtttagctggtggatccaaacaggtccttagctaaggaaacagatgactggttttaatttatatgctcaacaagtctatagcggaccaattggtgtcaggacaaaggaggtaggtagtgactgaagtggtggacaagaaagttgttgaaccaaatcctaggccatcaaacatcacattttaccattatagagcttttccctctattagaaagtttgaatgaataccaccaggcagaaacaattcaattttcagcctgcaagatcatccagcttctaatctagcctttcattgttgagaaagtgcagaccaagtgacactaatacaagatactcagttgcctcaaaatagtggagaccacacaaatcatgagccttgcatcctattaggacattcttgcaaagaaatttactgaaggaagaaaccttgtggcatgaaaggaaaaacagtcagtagtaaaaggaaaagtaaatctcttttccaaacagaacacaagaacagggtaaaataaaaagtatcgacaagctgaatattagattcaagattgttatggatggtactgttctagcatcagaggaaatccaccaatttaaagaaactcatatcacatttgttagaataatttatacaaggaagacaacaataagataactttgcagcttgaaatataatcaaagaacaatatagcacagcaagttatcgaagtgttagaatgaatggtgggacactttaaataagagtaaaagtagtaaatccactgtgtctgttcagtcgatgtgaaaatacacattaaaaataacatcaacaaataatgcttcatctgtgtagtcctactgaaaatccacaaaaggaacagctccaattccagataaagttcataaaaacaattgtcgcgttatatgaaagaccaattaaccattcagcttgcagccacagttttatcatgcatgttttagtaaatgaatcatgggctttttagttgctagtccctcagttccgacttctgaatgatacatcactttagctttgtcctaagtcaaacttctctaactttgaccaagtttttagaaaaaaatatattaatacatacaagttaaataaatgcactatcaaaacacatggagaatttaatgacattcatttaatgttgaattgttgatgcgtttttctataaacttagtcaaagatagagaagtttgtcctggatcaaaactaaagtgaactctaatttggaacagagatacagcgcttaagttagaatttgaatgctacagaaattgtttggtccgcagctacagttgtggcacacaaaaatgccataatttagtaataacatagtacacataattgacacaaattgtttgccacagttgtggcaaaaaaaacacatgtctgataaagcagctaaacaaatcttataacaggcaggtcaagggttcaaagctaagaaaaatctgcctaacctcaaataaggtcacatagcaaaacactgggatgaaaggttaaactagcctaactgtatactagttgcttacactatatgtacttgtttttcccagttctgtgtcaactctgcattttttgtggtcatactctgcacggcaagaagagtaggaccatatatagaacaacttgcaacacattacagaaagaaaaaaaagaatatatactatcctaaaaaatcggtcggggagagaatgaccactctcccggtattatattaagaagagaccgaaacattaatcccggccgagaaaaccttcgaacctgggcccccatcactcacgggtcggtgtcaaccgttcactctgcaacggtccaaccggagggtggcgcacaggacattgtaacccaagagcggatgggacacaacaaggagatttttttaactaagcccgaaaattcgccctgaggggaatcaaacctgggacttagaggtgctactcggaagccataaccactaagctagaggccctttcgcaagaatatactatcctattctgaaccaaatacaaatgccgctagttctttatcattctgaaaaataaaaaatattgccatcttctgaaaccttgtaacaaatgttactactccctccgtcccagtatataactgtaacaacctctggttcaaagactaagaaatgtatttaattctctctatcaacattaatactactgcattgatgtacgtgtgtctagagagagcacgccttatactatgggacaaatatattatgagacaagttacaccttatattataggaccgagggagtaggtctttacatcattattaactaaaacagtttctggagcaattaacaataaattaccaagcatatttatgtgaatgtttttagttttctcacaagccctacatacataatgccacaagctgcatcatgaaaggaaaggctcacacagacgcacagtgatctagttgtacagagcttgttggagcatcaatctcaacactaatttctcacatcactattaaaccatctaatatatgattagaaaatcaagcgagagttcaagaaacatcactctgttattatgaccaatgaacaacttgagtacactggaagctcccagttcagcaacggactgtctgacagcttaacagcttaagtatcatcaagaaaatattctgacaaaatctaccgctgataacgaccaaggaccaaccaaagttagagcaactccaagagcggtcttaaccagagtccttatttcaaatataggactttaggactcaaaaaatgctccaacagaggccttaatttaacaaaaaacgtgaaacaggatcgggctccgtctccacggtcccaaatatcggacccgaagagagcggccctatccacgttcccacgtttttttccaacgcctggacctttctttttctcccacgccgccgccgtttcctgcgtctcttccctcggtcgttcccatcttctctcgatcatcctcatcctcgccgtcatggatggaaggccacggtctcttcctcattcacgcccgacgtccaaggctcgacgaacttccatggagacggccctagatgcgatcgggagatcgcctcctgcctctcgcccggatccgcgaaggtctgcaatgctaccaggtgctgcggctcctcagtcgatccaagcacaggcacttcgtcatcgaacgatggcaactaatgtcaatctccattcatcatccagggcaccggctatataccagcaagatcccttggggactgctgatgattacagcgcattgcctggttactacacttccctactaagccaacaaacagaagatgtttttccatatgaaaataatttagacagtgagtgtgaagtcatggagtccccgccaataactgagttgaactcactgccaaaatcaaagggtcggtccaagaatttagtgaagatgaagatatcttattggtttcagcatatctcaatataagtaaagatgctattgttggaagagatcaaaaagagggtaggttttgggaaagaattgagaattactttcatgacaacaagacatttgagacagatcgcaacgcatcatcgttgaagcatcgatgggctataattcataaagaggtgagtgtatttcaagcataccatgaagccatagaaagaaagaatgggctatatctttgtgcttgtcgatgaatgctgataagtttgatgttccaacatgtgaaacccaaccatttgtctcagcgtcgctcttctcatagggcggctcaagacgacctgcgtctctttcatcttctattatcatattatgcattattatgcatgctttcataatgttccgaagtgtagctacatcccaaaaccttgctggacctcgaacaatggcaaatcgagcctgcagtacaccaaatgcacgttcaacatctttcctcagcgactcttgtgcagcagtaaaattttggtccttctcatttgcaggagccttgattgatttcacaaaggctgaccaatttggatagatcccatctgctagatagtagcccatatcatacttgtgcccattaattgtgtagttcactgctggagctttgccttcaacaagtctatcaaaaagatgagatctgtgcaaaacattaatatcattgagtgaccctggtagaccaaagaatgcatgccatatccataaatcatgagacgcaactgcctctagtataatagttggttctttcacatgaccacaatatgtgccttggtaagctgttggacaattcttccacttccaatgcatacaatcaatactaccaagcattccaggaaatccacgttgttcggcaatactaagtaacctagctgtgtcatcttcatttggagctctcaagtattgtgggccaaaaacctcacagacagccttgacaaatttccgtaagctctcaatagcagtgctttcaccaatcctcaagtactcatcaacataatctgctggaacaccataagctagctgtctaaaagctgctgtcaccttctgtagacatgaaaaaccgagaacaccagctgcatttctatcttgaacaaagtattcatcatgcttctctacggctttagctatccgcttgaaaagagaggaactcatccgaaaacgacgccgaaaaaacttctcgggatatgttggattttcagcaaagtaatcttgaaataattttctatcatgttcttgtctactccggtcatgaactttatgtccaaaaactgaacctcgacgctttttacgctggccatttttcctcttcttgtattgacccatcataagagccatgatctgatccagttcgtcatctatctcgtcatcctcctcaaggtgcctcatcgttcttttcattgcagacatccaaatgatcaagtacagtgagggtaacaaaatgatcaagtacatatatctaatcattgcagaaaattctacattcatcagaccataaatacaagtagcagaatcaaaaggattatacaatcaactataatagctactgtctactctactcacatagtacattagcttgcatactcaaattggtgatcgtgttgaggagggcttaccgcacatggtctgacatatcttgtggcactgacagaacagagaacgagcgtacgtgaagaacggtggccttttgcagcaggatggtctgcgcaccctcttccgcggagatggatgccaccctctgtagggaagaacgacggcgccctagaacatggatacgttcgtgtgtgcactagggatttgagggagatccgagggagggtagctgggaatcgtgattttgggcaggaagcagagcgcgcgcgggaaaacagagcgcgcgagccgaaaaacagaattagttgctaagcactacatttgaggccctgctgttggagttaaccaattaaattacgaataaattggtccctaaaacaaaatttaggacctaaatttagggccccttcttggagttgctcttagcatttgcgttctgacgggtgcaaaaacgtttcgccgcatttcgagcacaaactagtagttaagctactaaagtactaagtgagcaacttacaaataacttcacgaaattgcacgcgcacggcagcaaaattggttcatagagaaaagacgcttgtcggttggcatcaatcacaagcgaattaggacgataccaaaccttgccagcgacctccagatcgcgaccactcgtcgcattggaccctaacccaaccaaccaaaatcatgggcatcttcagatcacccgaccacctcccgagcaaacaagcatcgaaaccaaaccatagattgatcaaacgagcaagcaaaccgaaatagcggtgcgggatctcgtgatctgacctggggcacgaacatccgcggcgagagcgagtggccaggactcccgggtggcgatccggcgcctccaccgccacctacgac

SEQ ID NO: 92550 - DNA, 583 bp, Zea Mays
ggtcgttcccatcttctctcgatcatcctcatcctcgccgtcatggatggaaggccacggtctcttcctcattcacgcccgacgtccaaggctcgacgaacttccatggagacggccctagatgcgatcgggagatcgcctcctgcctctcgcccggatccgcgaaggtctgcaatgctaccaggtgctgcggctcctcagtcgatccaagcacaggcacttcgtcatcgaacgatggcaactaatgtcaatctccattcatcatccagggcaccggctatataccagcaagatcccttggggactgctgatgattacagcgcattgcctggttactacacttccctactaagccaacaaacagaagatgtttttccatatgaaaataatttagacagtgagtgtgaagtcatggagtccccgccaataactgagttgaactcactgccaaaatcaaagggtcggtccaagaatttagtgaagatgaagatatcttattggtttcagcatatctcaatataagtaaagatgctattgttggaagagatcaaaaagagggtaggttttgggaaagaattgagaa

SEQ ID NO: 92551 - DNA, 712 bp, Zea Mays
ataaacagaaagcagcagcctgttgaatggtaccaaaggagtctgggcagattcgatgaacaaatagaactacaaactggatccaactgcaatcagtgtccagaacacgcaaagccgtacagattcacacagcaggggaagcacggagtttcgatgacacaaatggagataagggtggcagcagggggactcaaacgttcagcagctacagctagtacggtttcttcatggggaaaacgaaggaaacaagacctgcattgcctttctaatatgcgatgcacggtttggtttcctccttcaattcccgcggggtactataccgttaccgcaggctttactcacttggccatcatgaccttgacgaactcctcgtagttgatctggccatcaccatcgacgtcggcctcgcggatcatctcatcgacctcctcgtcggtcagcttctcgccgaggttggtcatcacgtggcggagctccgccgcagagatgaagccgttctggtccttgtcgaacaccctgaacgcctccttgagctcctcctcggagtcggtgtccttcatcttgcgggccatgaggttgaggaactccgggaagtcgatggtgccgttgccgtccgcatcgacctcgttgatcatgtcctggagctcagcctcggttgggttctgacccagtgatcgcatgacagttccgagctccttggttgtgatgcaac

SEQ ID NO: 92552 - DNA, 1957 bp, Zea Mays
gtctctccccccgtcgagcacacaacacaccctcctcgtcctccaatccaatcaacctggtagactcgcttcgcttctcccccagccgtcggacggagctcctcgcagtcgcagcagccgccgatcagcctgcgctcgggctcagcgctggaaggtgttggaagagaatagcctgaaggttcacagtaaccttcatctgtcggaagatgtatcgggctaagagggctgcattgtcaccgaaggtgaagcgccgcgtcggcaagtacgagctcgggcgcaccattggggaagggaccttcgccaaggtccggtttgctaagaacactgaaaacggggaacctgttgctatcaaaatccttgacaaggagaaggttaagaggcacagattggttgagcagattaagcgtgaaatttgtatcatgaaattagtaaggcaccctaatgttgttcgactgtttgaggtgatgggaagtaaagcaagaattttcatcgttctggaatatgttaccggcggagagcttttcgaaatcattgctactaatggaaggttgaaggaagacgaagcacgtaaatacttccagcaactgattaatgctgttgattactgccacagtaggggagtgtatcacagagacttgaagctcgagaatttgctgcttgatgctgcaggaaatctcaaagtttctgactttggtttaagtgctttaaccgagcaagtgaaggctgatggtctgcttcatacaacatgtggaacccccaattatgttgcccctgaggtgatcgaggatggaggctatgatggtgcaactgcagatatttggtcttgcggagtaatcctctttgttcttcttgctggatatttacctttcgaggatgacaacatcatcgccctatacaagaagatttcagaagctcagtttagctgcccctcttggttttcagctggggccaagaacatgattaccagaattcttgatcccaatcctacaactagaatcacgatttctcagatactggagcatccttggttcaaaaaggggtacaagcctcctgtttttgacgagaaatatcaaactagcttggatgacgtggatgctgcttttggagattcagaagaccggcatgtgaaagaggaaactgaagatcagccaacctcaatgaatgcattcgaactgatttctctaaaccaggcactgaatctggagaatttgtttgaagcaaaggaggagtataaaagagagacaagattcacctcacagtgccccccgaaagagataatcacaaagatcgaagaagctgcaaagccgcttggctttgatgttcagaagaaaaaatacaagatgcggatggagaacccgaaagcaggtagaaagggcaatctgaatgttgcaactgaggttttccaaatagccccatccctgcatgtagtcgagctcaagaaggcgaagggggacactctggagttccaaaagttctacagaagcctgtcgacccagctgaaggatgttgtgtggaagtgcgacggcgaggtggacggcaacagcgcggcagcatgaaagtgccctttgaactttccactggacggcgccggttttcctttgtacatagcttctctttcggatgatcccgtgtccattgcagagtcggttttgcaagcaagttctttggtttatttgtagtaagcccggtgaaacaaccgccctggaggctgttgtggatgagcttactggcgtgtttagttcgtttcatggtcgggaggttggatggaatggaaaccacaatcaaggctgtagtagtgtgtgtagtaacgaagtagatacatgcatcagatggtgtaagggagtaccagctgttagttcatggtttcaagcttagccccccttcaatttgttcgatgatgtattacttcacaataaacattattacttagatgtatgaggtgagcacacttggtctt

SEQ ID NO: 92553 - DNA, 810 bp, Zea Mays
gtctctccccccgtcgagcacacaacacaccctcctcgtcctccaatccaatcaacctggtagactcgcttcgcttctcccccagccgtcggacggagctcctcgcagtcgcagcagccgccgatcagcctgcgctcgggctcagcgctggaaggtgttggaagagaatagcctgaaggttcacagtaaccttcatctgtcggaagatgtatcgggctaagagggctgcattgtcaccgaaggtgaagcgccgcgtcggcaagtacgagctcgggcgcaccattggggaagggaccttcgccaaggtccggtttgctaagaacactgaaaacggggaacctgttgctatcaaaatccttgacaaggagaaggttaagaggcacagattggttgagcaggtcagtatccgtccactattcctttctgagaccatgcactggctagcttcttgttatatccattttctgtcagtaccatgatgcatggatcaaacttttagttaactacaaacattgaggttaaaagcctttatgctcccctgtcgaagccgtgttgtgtgactttcgatttcgaaaatggtaaggagttcagtttgccatgcagccaatcatgtcctcgttcctaacagtcactagctggaccatgtgatttcctttcgtcaaaaatcaaaattcactgccgtcacttacatctttctatcaaaaggaacgaggtggagaatgaattttcttccttggatgctgccgtgacagcatgggagcataggaagatgtaacttcaattaagaaacgatacgtcgatactatacct

SEQ ID NO: 92554 - DNA, 538 bp, Zea Mays
ttagaatattgaagctgtgtttcccctctatgataagttgataataagacagatagtaatcactcgctgtcggcagaagttacacatcatggaccttacattgcaaattgcaatcatgcatataagcatggacatgtctgcacgacatgtgagtaaacatgcgattcaatcataccgttaaggcattgatcactcattcatcctgggcctggggctcaccatcatctccgttgtcagaatccaagggactgaaaaacttgccatccagcaggtacgagccgacggcgagccgcacgacccagacgtccttgggcttccgcgccatgatcctgctcgaccaaaaccaccatcaaggcactgtgtacggtccatcgtcatgtgctagagcaactagctggtaccttccgacgtcgccgggcttgacctgaccgctgttgtgccggagcgacggcaccgacgcggcggtcttgagcatcacaggcgcctcgacgatgatgatcggggagcccaccttgagcttcgctttcgtgtcgcccgc

SEQ ID NO: 92555 - DNA, 1249 bp, Zea Mays
aaaacgaagtaatccgcccctagattaattggtggcttactggcttgctttctagtctccggcacaagattccctctccagcggcgcaccaccgctaccatcctccgacccccaacccgaacccgccatgtcaccggcgccgtcgcgcccccgcatccgtccgtggctggtggtgggtgacctggcactggcggccgcgtgggtttgcgcgggcgcgctggtcaagctgctcgtttacggcggactcggcctcgggggacggcccgaggccgaggccgtcaaggtctcgctctccctcgtatacatgttcctcttcgcctggctcgaggctgcctcgggtggggcctcctacaatccgctcaccgtcctcgccgctgcgctcgcctcccacggcggacccgccgtgtacctgttcaccgcgttcgcgcgaatcccagctcaggtgattggggcggttcttggagtaaagctcattcaagtaactttccctaatgtgggtaaaggagcccgcttaagtgttggtgctcatcatggtgcgttagctgaaggcttagcaactttcatggttgttatggtatcggtgaccctgaaaaagaaggagatgaaaagtttctttatgaagacatggatcacaagcatttggaagaacacaattcatctccttagctcggatataactggagggattatgaaccctgcatctgcttttgcttgggcgtatgctcgaggagatcatacaacatttgaccacctactggtatattggctggcgcccctgcaagcaaccctgctgggagtatgggcggtgaccttcttcactaaaccgaagaagatcaaggagcaaaaggtagatgaaaacaagataaagaaggaatagactattcttgaattagagctagagcttcataccatcttcttagtcagataacttgtggctacacacaaggcgaaatgtttcgaagctaatctaagaaatggcaacctatcatggtcagcttctgtgaagtctccttgatgtgtattccttgtatctggcttagcttagattgtgcagaagcttgtaagcaactgctccaggcttccattcaagacattgtcgtattggaaacagtatatatggaagctaaagcttctcagagttgactcacaacctacactaatgttccacagcattgttgaaagtatcttgagttccattatctatgataatgggaaattgcaggtctcatctagtttccaggaaaacgaa

SEQ ID NO: 92556 - DNA, 1065 bp, Zea Mays
tatcaagctgtgacagatctgctatttcatcagacaacccagctgatttgtatgatgtccatgtctatacttcatcaggtgatatgttttccaaatctagaatgtttgataatacagcccgtaccggacccaaggtacttgctttgctattgctacctcagttgtcatccttttacaactggctggtaatgtcctacataatttgtattttgcaggcaattgttagtgaatatgctgtaactggaaatgatgctggccgaggaacactaatagctgctttagctgaagctgcatttctcattggattagaaaggaacagcgacgtggttgagatggcaagttgtgctccactctttgtaaacgacaatgaccaaaggtggaacccagatgctatagtctttaactcatggcagcactatggatgtccaaattactggatgctgcactttttcaaagattcaagcagcgccacacttcatccgtccactattcaactaccgaactacgaccaactggtcacatctgctatcacttggaataacccacatgatgggaacacttacatgaaaataaaggttgtaaattttggaagcaaagctgttagtctgaatatatctgtaactgggttggaaactgatattcagacatttggatccataaagacggttctcacgtcgggttggctgcgggatgagaactccttccaacagcccgacaaggtggtgccggcggcaagtccaataaccaacgcgggcaagcaaatgggtgttatattgaactcgtactccctgacctcatttgatctcctcttggactcggagtctcaggttcgagcctccatccaagcttatgattagtgtgagatgtgtcgtgtgcgtgcccacaatactcaataccgagatacgggtccccccaaggctccccacaaggctttcaatagaaaatacgatatttgtgaattattgtgaagtacaggcgtacagctggctatgtgtatgagattcaacaaatggtttctacgaccctaataaaggtataaaagcacctttcctcggatatcacaca

SEQ ID NO: 92557 - DNA, 1074 bp, Zea Mays
ctcacacatcattgctctgatccaaatgctggttcctatccttgcagttttctaaaacattgctggggttgcagcatgtgtacttgggcatagagggattgttacatcgagctagtgctttggtctctgctgtagcagagcgcaatgggcatccgggcttgttcggtttgctggttgttctatgtgctggttcttgtctgttccttgtgtcagatactttatgttggatcagtggcggctcaaactgctcagttgactgtggatgcttcacctcagaatgctcagataatccctggcaatatgtttggcatcttctttgaggaaatcaaccatgctggtgctggtggattgtgggcagagcttgtaagcaacagaggttttgaagctggtggttctaatactccttcaaacattgacccatggttgatcattggggatgaatcaaatattattgtggcaacagatcggtcatcatgttttgctagtaacccaattgcacttcgaatggaagtactttgtggagctagtgaaactaatgcttgcccatcaggaggagttggaatctacaatcctggttactggggcatgaacattgaaagaacaaatgtctatagagttaccatatacatcaggtcatcagaatcggtggagctaatggtttctttaacaagttcagatggtcttcaaaatctagcctctcatacaatcatgggagacaaagaagatttcgttgagtggacgaaggttgaatttgatttgcaatcaaattatataaatactaattcaagacttcagcttacaaccaccaaaagtggcataatttggtttgatcaagtatcacttatgccatcagatacttatatggggcatggtttccgtaaagatcttgcctctatgctggcaaatctgaagcctcgatttctaaaatttccaggtggcaactatgtaatgggaaattaccttataaatgcattccgctggagtgaaactgttggaccatgggaagagagacctggccacttcaatgatgcttgggcctattggactgatgatggacttgggttttttgaattt

SEQ ID NO: 92558 - DNA, 1384 bp, Zea Mays
cattacgcacgtccacatcgcccgccccccgccgttggctgccgtgacgacgcagcaccgcccacgcgccgcccgcaccagctgcccagccagcccagcgcctccccatccgcctccgtgttttataaccccgccttccgctcgcagctcgctcgccacactcagtccacccgttcccactcccagccagggttgccccgccgcttgcggttgcagctaccagagccgagaccgagagagcctgagctagacacgcagccagcaagcgccgagtcagcgagtccgacgacgccatggacgccgtctcctgcgcgggcgtggcgccgcagagcgcgctcctgtcccacacccactccttcgccgacgcggccatcgcgcgcgcgctgcacttctccctctccgatcacgccgccgcggacccgcccgccacgacgacggcggcgatgctgatgcaaggcgccgtggcagcgacggactgtaccccgacgagcgcagcggcgtcgccgtcctcgttcgcgcggtgccggctgggcccggcgggcgggcacgcggggaagcggcgccggccgcggccgtccaagcgcgcgcccaccacgtacatcagcaccgacgccgccaccttccgcgccatggtgcagcgcgtcaccggcgccgacgaggccgacctgcagccgccgcagcaggacgggctcggcctcggcctcctcctgccgcacctcggcgccgagcggttcctacaggcggcggggcacgcggcgccgcacgtcgctgctgcaccgtacacgcctgccccgcccgctgcggcagccgagcagcagccgctgtacccgactctggactcgtggaacgtgatgcacgggaagaagaccgaggtggtctcagccctgactggccaatgaaactgtcccgattgttccccatccgttccaggcaagcctgtacgtgcctgctcagcattagcatctaccgtcgatgatctgatcagcagacgatcccttcttttccatagcggcggagaagttgtacatcatatattcatatatcagttgggtggcctcgattccttgagtggtctaggggatggagtagcagagttgtgttaaacagagaaccagcagtcatgcacgcgttctactgtctcgcggtctgcagttgcatctgctgatatgcactttgcatgctttcccgtgatcccgtcaatgtgagcttactgctgcttgtgtaaaaatgtctctttggtagttgccacaaaattttcagctgcaccagcaccacgccgccgccaccgccacccccacccctaattggctttggttactgaataactttggagagggtaaaccattttggctattacagtaaaaaaaatataaacctctcttta

SEQ ID NO: 92559 - DNA, 1109 bp, Zea Mays
atgtcttcatgccagatgtatcatcatcaacaacagcttcagagccacagtcatttcctgtcttctaggcagacattccctccagaaaggcacatgcttctgcaaggagggagcattccagcagagccagggcttgtgctttccactgatgctaaacctaggttaaaatggacacctgaactacatgagcgttttgtggaggcggtaaaccaacttggtgggcctgacaaagctacaccgaagacaatcatgagactcatgggtgtccccggactaacactataccaccttaagagtcatcttcagaaatacaggctaagcaaaaacatccatgcccaagctaatggtgtaaatgcaaaaaatgtgattggttgcaccatggcaatggacaaaccacttgaaggaaatggatcaccagctagccacttaaaccttggaacccagacaaacaaatctgtgcacataggtgaagcccttcagatgcaaattgaagtacagcgccgactgcatgagcaactagaggtacaaagacatttgcaactccgcattgaagcacaagggaagtacctacaatctgtgctagaaaaggcacaggagacactttcaaagcagaatgcagggtcagtcggtgtagaaaccgcgaagatgcaactgtcagaattagtctcaaaagtatcgacagaatgcctccagcatgcatttacaggctttgaggagattgatggttcccaaattctacaaggccataccatccaacttggcgatgggtcagttgacagctgcttaactgcctgtgacggctcacagaaagatcaagatatcctgtcaatcagtctttccgctcacagaggaaaggagataggaggcatgacctttgatatacaagagaaagaaagaggaagagaggatttgtttcttgacaagctaagcatgacgcctccaggccaactagacaggcgtgagagaggaagttttagtatgacacggaaggcagcaaaactggatctgaacatcaatgataccactgatgggccacagaactgcaagaaaattgacttgaatgggttcaactggacctaggaagagttagcaaaagaccttgcaaatta

SEQ ID NO: 92560 - DNA, 115 bp, Zea Mays
cggaagcttggtttacacctgatacattggcattaaaaatcgaaaattcaatttatgaactattgtgcgtggaaaaaactgaatcaccaaataacatgaaaaaatacgatatcaa

SEQ ID NO: 92561 - DNA, 2136 bp, Zea Mays
ggagtcaggagaatccccggccgcccgtgcctttccgcctcaccacacgagtcacacggctcacacccacaccgcgccgcacccgtcccagcacccaactcaaccgctgctatcagctccagatccgaccgcctcgatcgggacgcgagcatctccatagcgaccaaccggccgccgcgggtgaccaacccagccgcgctttcccccgtcagatcccctcctagccagccatggccgagccccgttccgccctccgcccgcattgccactgttagtgccatggccaccgcctgccggagcccgctcgtctggctcttcgcgctcgccgccgcgctattcttcctctcctggtacctcctcctcaactccgccgcgggcccaaccgccgcccgccgccccaaccaggggctccgcctcggcggccccggtaggaaatgcgaccccgcggaggcgctgctgcgagtgttcatgtacgacctgccccccgagttccacttcggactgctcgactggaagcccccgggcttcggcggcggcgtgtggcccgacgtcagggacggcgtgccggactacccgggggggctcaaccttcagcacagcatcgagtactggctcaccctcgacctcttggcctccgagcagggcgcgcccacgccctgcgcagcggcgcgggtgcgccacgcggcggacgccgacgtcgtcttcgtgcctttcttcgcctcgctcagcttcaaccgccactcccgggtggtgccgcccgcgcggaacagcgaggaccgcgcgctgcaacggaggctcctcgagttcctcgccgcgcggcctgagtggcgcaggaccggcgggcgggaccacgtcgtgctcgcgcatcaccccaacggtatgctcgacgcgcgctacaggttctggccctgcgtcttcgtgctctgcgacttcgggaggtacccgcccagcgtcgccaacctcgacaaggacatcatcgcgccctatcggcacctcgtcgccaacttcgctaatgacaccgccggatacgacgaccggccgacgctgctctacttccaaggcgccatctacaggaaggatggtggttccattcggcaagaactgtattaccttctgaaagacgagaaagatgtgcatttctcatttggaagtgtagctggtaatgggatcgagcaggcaacacaaggtatgcggtcatccaagttctgcctcaacattgcaggtgacactccatcctccaaccgcctcttcgactccattgtcagtcactgtgttcccgtcatcatcagcgatgagattgagctcccgtttgaggatgtcctcgactattcaaagttcagcgtcatagtacgtggcgcagatgcagtcaagaaggggtttctaaagagcctgatcaaagggatcagccaagaagagtggacacgcatgtggaacaagctaaaggaagtagaaaagcacttcgagtaccaatacccatctcagactgatgatgccgtgcagatgatatggaaggctattgctcggaaggtgccctctatccgtctgaagattaacagactacggagattttctcggtttgatactaataggacagatgaaactctacccagtccttcttggctacagaatcaggcttcttgatttttggactagcaaactccagctttcaccatgttttcaatcctgccgaaacaagagttgatactgaagaccaaaccttaatcgcatgactgggggcagatgttacagctgcagacattaacggagagtaaagttgaaacactctagcataacagaattacatatccaatggcacatcatttttcttcatttttcttacttaagattcatccaaaatgtccttggctgcagactaaggacaatgaattttgtatgaaaagctgtacattctaggcggcaatataattactgaccagttacagttgctgagcattttgggttgacgtccactagtctaaagtcacatagggaaggttctgcagatggagagaagggagatgtaggttattagctggaggattgagatcggtatatggcattcggatagtcatatgccactaagataggggaagttagataatagcctctcttcctccacttgttttacggtttcac

SEQ ID NO: 92562 - DNA, 981 bp, Zea Mays
atgtaacttgttgaagaaggaatgcgggcagcacaacttgaggagaatagaggatcacaagttaatgttgctggtgatgacgaggcacctatgaggattgtcaaaaactacaagaggcctgaggagaggattcctgccgagagagacccaactaagtttgttgtctcaccgataactggagagctcattcccatcagcgagatggaggaacacatgtgcatctcactcattgatcccaagtacaaggagcagaaagagaagatgttggctaagatcaaggaaactacccttgcacctgatgatgaaatttcacggaacattgttggccttgctcgcactcgccctaatatttttgggaccactgaggaggaggtgtctaacgccgtcaaggcagaaattgagaagaaaaaggttgagcaaccaaagcaggttatttgggatggtcattctggtagcattgggtgcactgctactcatgcattatctcagattcagggtggtgaggaacagtttgatgcttccaatgttgctgggagacctattcctgatctagctccacttgtccgacctggcatgtcgctgcccccgacctcctcaaccacttcctcttgttagaaacaacctcctcagccacttcgctggtggcattgtcaagaatcgctcagagagtgatgctccctgctgggaagctgatgttgtggatgagagcgaggaaagagaggtaaagaaggtgaaatgctgatgcggtcgacgagagatcagattcagagttgctgccaatggttatcttgtgaagcagccaagcctaattatttatgccacataacctgtgctattgtaatgtgccacatgcttatatttgcaataaatagctctaggtggtcagctttgtctgccgcaataagcagtgtatcgatattgtggttttgaattgtttggatctaaataaagtcttgtgttcgatacaatttgcatatccaa

SEQ ID NO: 92563 - DNA, 4521 bp, Zea Mays
tcagtttttcaaccgcatccttacatcaggaatctgctgcaccctctcagcgccttcttccaggcaccatctctctagcgcgtcgcacccactcacagccagtcgtgatacgttcctcggcagtatgtccactgcgcctattctcagattcggagcgccgacggtttccagacaacgaagggattctaggccgcacaggcctccgggaagaaccgcaagatcagcacactggcgtatcctcagattcctgagagaccgcatcatccgcacggagaactgagtgagcctggggcaggagacaatctccagagattccagggacgggatgttctcgaagcacggaggaaaccgtcttccggggtaattctcgacgcgcagacgcttgaggccggtgtgcggacagagtgcctcgattaccgcctcgctgttctctatgccctgctgctgctgctgctgttgttcgtccttgcaggcgtcctcgctccacttcagcatcagttcgcgcaggtactccttcccgcgcagattggcctccgtggcaccgtcgctggtggcagcttccagattaagaatgcaaagctctccgcggatcttcaagttcctcagctcgttgatgttgcacctgcccccatccctggagaccacaacgaacctggaaagagtttgaagtgactgtagccggtctatgccactcggcatcgatctaagagcagtgactctatcccaatcgatatgcaagctaaggtgacgcaggttaactaagcggctcatgcctgcaggcagatccgtgagccagtagcagtccctgaggtcaagtgtctgcaaattgaataggccgcagaccgtttctggaagagtctttatcagagtattccgaaggttgaggtatctgaggtgtatgcaggacccaacggaatctggcaggaggtctagctcagtgtaactcaggtctagtgcacgcagacaagttaacttcgagaaaagtgttgttggtacctggttcaaaggtagtttcattgcggggcataatttcaagagcctcgaattttcatagcgatagatcttgtcgaatgcaagaggctcatctttcgggcacagtatagttgtataacgtatccactcgggatggtcgactaccggtgaatcctcaggtctgagagtcagagattcgtgtttagaaacaagttgtgctagctcaagcatcaaacttggcactctaaacttttgatcagggaagctgcgggatgtttcaaagaatgatctccataggagctcatcaaagcatcgtcctgcttccatctcaaccctttcccttccgttactcttaacaagaccatcagctatccagagtctgacgagctcatccttctcaaactcaacaccaggaggaagtattgaacagaaggcaaaacattgtttgagatgatatgacaagtgctggtaacttatctgcaaacttggtaatatgctgtttgtgttttcgccatctccgagaatctgcatttcacctagtatgttttcccactgttctttgtctccatgagtgtcggacagtagtaacccaagagatttagcagctaacggggagccctggcagtttgaggcaatgctccgcccaatgggttccagatcatgctgatctctgctgccccaccccgagaacgcatagagtttgaggatttgccagcattcttcatcttccaagccctttaaatggatgtttagattggtggaaatcatcctagacaccttttcatgctgagtagtgatcagaaccttgcttccttccgctccaccagtcaatgagggcctcagaaactcccagaactgaaagctctctgcccaaaggttatcaatcaccagcaagaactgctttttatgtaggtggtcgtgcagccgttgctgcaatatgtccaagcttagaagctcacatttttgattggtcgccgcttcgatgatcattttggtggcctttctgatatcacacctatctgataaccaaacccagatcttgtcggtgaagaagttttgtacctcaggatctttgtaaaccgattgtgccagtgctgtcttcccgatgcctgtcgttccccatatggaaatcaccgccatatctgcgctatccgaaaccagagcacggacaatctgctccttctcttcgttgcggccaatgggcctctcgtcgcgatgcgcggcagattcaaggaaccgtgggcgctgcgtcggctgagacgctgccctcgtcccgtccccggcctgcaacctataccatttcctgcccgtgttgatctcgtcgaggcgttcgttgatcttcgcgatcttctcatccagctcccaccgctgccgcgggccgagctcgacgctgggccatagccgcttccgcttccgtgattgctcggcggccgctagcctggacacggccgtgatggttcccaggcggtcgagcagggcgtcgacgtcgaaggcgacggccctaagctcccggagccagagcctgacagagtcgtggtcgatgaagcggcgttgctcggcgtcctcgagcacggcgcggatgcgttccttggtgcgccgcagcttgtcggcctcctcctcgacgttccacaggcggacgccccggtagcagagagcgtcgattaccgcgccgccaatcttatccgggagaccgagcgccgtgaagacgctcttcagcgggcggtcccccagcatgctgctcaaccaatccatggacgacgacgaggtgccgtgaaccaagaaggggggagttgacttgttctgggaacggggcgaaacgaaagcagagatcttgagctgtgaagagagccgtcgaacggaaagctcgtagagtggccgcgagttctttgctcgcgactggatggcatctcccaggaaggctcctggcaaagtagcagccagccgctctcggactcgggcaaatggacgaacgccttccgggcagagtggtcgcgtggggtcaggtcgggcgacaacgttacagaagtccagactccagaagaacaaagtcggtcaacagcaacttggcagcactgcagcacgtatgaacaggccgtgtaacggtgcgtttattttattaatagattatataagacgtttattttattaatagattatataagttgaattatgctgaaaagttaagagggtaaaatattactttaaaaccataaataagttaaaataaactattatttgatagcttatttcagcttatttatgattctatcttttacctttttaccataatctagcttgtataatttaggagtaaaataaatagatctaagtatgacacaatctataatacttcgatgtggcatgataatcatatacagttttaatggatgagtatgcatgcgtgggtagtcttgcgtgagcttggtcggttagatatgtctggtttgggtgtacgtgtggtgcaggtaaaatggtttgttttacatccgcccatacacacatatgtcgtcaaataaagttaacacatgtggtggctcaggatgagacgacacgggtaaccaatcagacagatagtgtctgtgctgatacaatatgagtccagtgatgtgcctggtcctccaatctggcacggtggtttggcatgagaccgacacgattaaggccttctggttaggctctttcagggggtgtttggttctgtggactaaagtttagcccgggtcacatcaagcgtttgactttcaaataggagtatgaaatatagacccaaccaactgtactagattcgtctcattttttaatcttcggctgagaaattagttttataatccgactatatttaataccccgaacggaggttcaaacattcgatgtgataggggctaaattttaacagggacaaaccaaacaccccctcaatggctttaaacggctcatttgaaaaatctaccaaacaggactcctctgctggtttatccgtaaaaattcgtaaaaataggaagaaattgctcctagaaatagaagctaggagcccaaaaggaggcttctctccgattctcctcaccacgtaaaaaacaggaggagctacatttcccactaaatgatgtactcttcctaaaaataaggaggaagttgtttttcgagaagagttagagccacggttgaaaggattgatgtaagagtcctacaaaaagggtctaaagagttggcacgattagacacgacttagactaactggtgggttatagatgagattatgatgtatgaatgtgatttataaaatgtgattgattatggttttaaatataataaatacactctatactgatataaatgttcgtgtttgttctagatcttttgatctcttaaagtgaaataatgactatactgatataaatgttcgtgtttgttctagatctttcgatctcttaaagtgaaatagtgactggactggcatggacaccactaggtgttaatactatataatatcgtcgcgacacggttagacatgtcgcgtctaggacgatggctatacagtagtgctagcat

SEQ ID NO: 92564 - DNA, 2707 bp, Zea Mays
acagcagcagagcaccatcagcaccagcacgcccacttgcctcctattatttgcgccagagggcagggcagggcagggcaggggccttggcgctacccccgttcttatccccacctcgtgcctcccctcctccccccttcccctctctcgcccctcctccctccgtctcgtctcccaggtcatggcaaaagctggagcaccgggaaaaataacaagtgggagataaacaggaagagctaggtgaatacttggagaaaaaggtcccccacaccccccacgcaggtgaatactacaagtagcagtacaaggaagagagccaatctgcccgtgactgccagtgagttgctcgggtgtggtggttagttgaggtcacgatgatgggaggcgggctgatgatggatcagagcgtggtgttccctggcgtccacaacttcgtggatctcctgcagcagaacggcgacaagaacctgggcttcgcctcactcatgccgcagacgtcctccggcgaccagtgcgtgatgggggagggtgatctcgtggacccaccgccagacagcttcccggacgccgtggaggacgacagcgatgacgacgttgaggacatcgaggagctggagcgccgcatgtggcgcgaccgcatgaagctgaagcggctcagggagctgcagcagagccgcggcaaggatcccatggctagcggtgggggcctggccgacggctcatccaagccaaggcagtcgcaggagcaggcccggcgcaagaagatgtcgcgcgcgcaggacggcatcctcaagtacatgctcaagatgatggaggtgtgccgcgcgcaggggtttgtgtacgggatcattccggagaagggcaagccggtgagcggcgcctccgacaacctccgtgcctggtggaaggagaaggtccgcttcgaccgcaacggcccggccgccatcgccaagtatcaggccgacaacgccgtcccgggcgccgagaatgagctcgcctcgggcgctgccagccctcattccttgcaggagctgcaggacaccacactcggctcgctgctctcagcactcatgcagcactgcgaccccccacagcggcgctacccgctggagaagggcgttcctccaccgtggtggcctaccggcgacgaggagtggtggccggagcttggcattcccaaggaccagggcccacctccctacaagaagccccatgaccttaagaaggcctggaaggtgagcgtgctcaccgctgtcatcaagcacatgtcaccagacatagagaagatccgacgcctcgttcgccagtccaagtgcctccaggacaagatgactgccaaggagatctcgacctggctggcggtcgtcaagcaggaagaggagctgtacctgaagatgcaccctggcgcacgcccgccggcatccactggtggcatcgccagtgccatatctttcaacaccacctcaagcgagtacgacgtggacatcgttgatgagtgcaagggggatgaggctggcaaccagaagacagcagtcactgacccaacctccttcaaccttggtgcggctatcctaagtgacaagttcctcatgccgacgccgatgaaggaggagaccgctgacgtcgagttcatccagaagaggaacgcccccgctcctgctgagccagagctaatgctaaacaaccgggtgtacacctgcaacaacgtccagtgcccgcacagtgactacagctatggattccttgaccggaatgcccgcaacagccaccagtacacctgtaagtacaacgatccgatcactcagagcgccgagaacaagcctctgccagcaccgccgcaaccacaagccttccagccggccttcagccaagccaatcaggcagcgaacaatctggacttcagcctgcctatggacgggcagaggtccatcgccgagctgatgaacatgtacgacaccaacttcatgacgagcaagaccatgagcagtagtgacagcgtcaccatcatggagaggccgaacgcgatgccccagaggatccagatggacgagggcttcttcggacagggcaacggagtcttcgacgacgtcaatagcatgatgcagcaacaacagcagcaggcaccacccgtggtgcagcagcagcagcagcagcagttcttcatccgcgacgacacgccattcatgagccagatgggcgacatcaccagcacggcggagttcaggttcggctctggtttcaacatgtctagcaccgccgccgccgctgattacccaggcgcggcgcagaagaacgacgggaccaattggttctactgaagaataaaacttgtagggctcctcgttataagcttcggattcctccatggatctcccaagttgtcaagtcttataggtcttcgttatataggttttgcagtagctgcaagacggctggaacctggaactggtttatacttgtatgtccggccagccataaacctctcttatttgcaaacttaatgttattcctagctttaagttgttagtctcagtctgctgtccatgtatatggctgttaaaatgcttgtgcttgtttctgtactacctgctgtttggtgtctgaatgaagtgttttcttcagtggttctgctcgacgtgtctgctcactgttgatgaggcacatcatcgctgctgctcttcacacaaacaacatgactgacatattc

SEQ ID NO: 92565 - DNA, 807 bp, Zea Mays
agtgatctccccatcccttccccacatgtcaaacagagcacagaccacagcctcctccggaaagcaggaatcccaagaagcagcgacggcgacggcgacgccatggctctactaacggcgccacccgcggcgctggtcgtcctcgccgtggcggcggcgctgctggccctgctgccgcgagggagcgcgcagatatcagcaccgccggcgggcgcccccgcgccgtcgtcgtcgctggactgcgcgggcgcgctgctgaacctgacgccgtgcctgacgtacgtggagcgccgcagcgcgctgacgcgcccggagaagggctgctgcggggcgctcgcggccgtcgtgggcggcgacgacgccgcctgcctgtgcgcgctcctggccgggaacggcgtccgcgtcgacaccgtgcgcgcgctcgcgctgcccaccatctgccgcgtggacgcgcctccgcccaggctctgcgccgcgctcggcatgcccgtcgccgagccgccgggcggagccgccgcggacgcgccgatggactcagggtccgacgcgccgtcgaccacaccggcaacggcggccgcgaacggcggtccgggggcctcgagacggccgtacatggtggctgctctctcgcgcggctgtctcgtcgtcatcctctccacgctgctgctgtaactctcgtaggcggcacggcgctctcggcaccacgcaccgtagagctgccgcgcatctgtacaggtgtaaatgtacacacgcgttccgccggtgatggaatcaattcgggcgtcccgtccatgccatcaacgtccg

SEQ ID NO: 92566 - DNA, 821 bp, Zea Mays
agtgatctccccatcccttccccacatgtcaaacagagcacagaccacagcctcctccggaaagcaggaatcccaagaagcagcgacggcgacggcgacgccatggctctactaacggcgccacccgcggcgctggtcgtcctcgccgtggcggcggcgctgctggccctgctgccgcgagggagcgcgcagatatcagcaccgccggcgggcgcccccgcgccgtcgtcgtcgctggactgcgcgggcgcgctgctgaacctgacgccgtgcctgacgtacgtggagcgccgcagcgcgctgacgcgcccggagaagggctgctgcggggcgctcgcggccgtcgtgggcggcgacgacgccgcctgcctgtgcgcgctcctggccgggaacggcgtccgcgtcgacaccgtgcgcgcgctcgcgctgcccaccatctgccgcgtggacgcgcctccgcccaggctctgcgccgcgctcggcatgcccgtcgccgagccgccgggcggagccgccgcggacgcgccgatggactcaggtacgtacttacactacacggcgcgctctggtctgccggttttcgataagctcgcgttctacaatgatgtgggctgcctgcctctgcctggtgggaattagcgaccgattaataaacaactttgaaggcgtcgtaggtactctagggaactatcttgtcaactctgcgtgatttgcctgcctagactagattctctcgggtacggtacctcaaagcttgcgatactgtctattggttgtattgtatttgtaggcgtagctaataaaaactacattatattggc

SEQ ID NO: 92567 - DNA, 1678 bp, Zea Mays
atctcacccccccgcgcgctgcagtgtgcaggccctgccgtctgccgcaaaagagagcactaggaaaagaagtgctgcggcgttgcgaggtgggggacgaggacgaggccagaacgccccaaaaccaaaaacccccagaaccccgacctagggttacgccatcgccatgggatctgttgcctccgccgctgtgccaccacctcctcctcaatcagcgctgcctcaggcgggcgcgccgccctacgggcccgggctcgccgggatcctcccgcagatgtcgaagggggaggagaagaaggatgagaaggtggactacctcaacctcccctgccccgtgcccttcgaggagatccagcgcgaggctctcatgtctttgaagcctgaactttttgaaggattgaggtttgacttcacaaaaggattgaatcagaagttttctcttagccacagcatttttatgggctccttagaagttccagcccaggcatctgaaactattaaagttccaactgcacattatgaatttggcgccaattttttagatccaaagttaatgctcattggaagggtgatgacagatggaaggcttaatgctcgtgtgaaatgtgatttgacagacaatctgacgttgaaagtaaatgcacagcttacccaagaggcacattactcacaagggatgtttaacttcgactacaagggaagtgactatcgagcacaattccaaattgggaacaatgcattctatggtgcaaattatattcagagtgttactccgaacctatcaatgggaactgaaatgttctggcttggtcaccaaaggaagtctggaattggttttgcctctcgctataacacagacaaaatggtgggcactctacaggtcgcaagcactggaatagttgccttaagttatgtccagaagatttccgagaaggtttcccttgcgtctgacttcatgtataaccatatgtcaagagatgtaactgccagctttggttatgattacttgcttaggcagtgccgcctaagaggcaaaatagactcgaatggtgttgttgccgcatacttggaagagaggttgaacatgggtgtcaacttccttctatctgctgagattgaccattgtaagaagaactacaagtttggttttggaatgaccgtaggagagtaattctgccaaaacaattgctgtgagcgcacatgagatacttatgcagtcggcttcgcgcgtatgttgacttgttaaagatatttcaggtctcagttttgactgatcaggttttgccattgcgccgtggaaaaacacaggccgttgctgctttacagggttttgtatttcagtgttttttcagctacttgagcatgggggccatgattctttgttcatcttggatgtaactagctgattggtgttccaacaatgttgtattggcggaacaatttttacctttttaaatcactaccaatccacctcactaggccttttctgtaacatcatacacgagccgtacgatttcaaagcatatcaccatttagcacttgacatatttgatgctgtcatgtgcttttgttcatccattgcaagtaagaaagttcaaatcgttttttacacaagttcttgctgcataaatgagaatgtggaatcattatactagaaagaattagcgcgtgtttggtg

SEQ ID NO: 92568 - DNA, 1633 bp, Zea Mays
aaccttaaaagtggaattggttccaatctcacccccccgcgcgctgcagtgtgcaggccctgccgtctgccgcaaaagagagcactaggaaaagaagtgctgcggcgttgcgaggtgggggacgaggacgaggccagaacgccccaaaaccaaaaacccccagaaccccgacctagggttacgccatcgccatgggatctgttgcctccgccgctgtgccaccacctcctcctcaatcagcgctgcctcaggcgggcgcgccgccctacgggcccgggctcgccgggatcctcccgcagatgtcgaagggggaggagaagaaggatgagaaggtggactacctcaacctcccctgccccgtgcccttcgaggagatccagcgcgaggctctcatgtctttgaagcctgaactttttgaaggattgaggtttgacttcacaaaaggattgaatcagaagttttctcttagccacagcatttttatgggctccttagaagttccagcccaggcatctgaaactattaaagttccaactgcacattatgaatttggcgccaattttttagatccaaagttaatgctcattggaagggtgatgacagatggaaggcttaatgctcgtgtgaaatgtgatttgacagacaatctgacgttgaaagtaaatgcacagcttacccaagaggcacattactcacaagggatgtttaacttcgactacaagggaagtgactatcgagcacaattccaaattgggaacaatgcattctatggtgcaaattatattcagtgttactccgaacctatcaatgggaactgaaatgttctggcttggtcaccaaaggaagtctggaattggttttgcctctcgctataacacagacaaaatggtgggcactctacaggtcgcaagcactggaatagttgccttaagttatgtccagaagatttccgagaaggtttcccttgcgtctgacttcatgtataaccatatgtcaagagatgtaactgccagctttggttatgattacttgcttaggcagtgccgcctaagaggcaaaatagactcgaatggtgttgttgccgcatacttggaagagaggttgaacatgggtgtcaacttccttctatctgctgagattgaccattgtaagaagaactacaagtttggttttggaatgaccgtaggagagtaattctgccaaaacaattgctgtgagcgcacatgagatacttatgcagtcggcttcgcgcgtatgttgacttgttaaagatatttcaggtctcagttttgactgatcaggttttgccattgcgccgtggaaaaacacaggccgttgctgctttacagggttttgtatttcagtgttttttcagctacttgagcatgggggccatgattctttgttcatcttggatgtaactagctgattggtgttccaacaatgttgtattggcggaacaatttttacctttttaaatcactaccaatccacctcactaggccttttctgtaacatcatacacgagccgtacgatttcaaagcatatcaccatttagcacttgacatatttgatgctgtcatgtgcttttgttcatccattgcaagtaagaaagttcaaatcgttttttac

SEQ ID NO: 92569 - DNA, 1627 bp, Zea Mays
ggatgttgggccgatacacgctaatacccggggggcagaaaaatccccacccgaggcgtggaagacaccgtcgctctcctcgcgtgcgagcgccgccactgcatcttcccatcgatctccgccgaccccgcatcttcccatacgagctgtgtttctccaagttcgctgctggccatatcgacgtcgtcatcctcgatccagacgagtgcgtgtgccatctccacgggtcttcgacagatttagcaagaatgtttggaagaggatctcctaggatgaacttgatccaagctgcaactatgaaaaaaatatcccccagatctactactaacaagcgcaagaagagaacatcaccaaaagataaagagaaagagttaaagagagactacaaggctcttaaagaggcaaggcaacaaagcggggtatcatgggatgagaggttgtgtagaatagaagcagaagaacccatttggaataacctcaccactagtaacgagagacttaagaagtttcggactaaatctttcccactatttgaggctttaggagagctatatgatggaaatattgctgagggaaccatgaattttacttctattgagccttctcgacctcctgtcacacaaccttgtcaaggtgctgctacacagccttctcaagctgctttcacacttacacaaccttctcaaatcgctttcacacaaccttctctagctgctttcgcacgaccttctcgaaccgcttttagacatccttctctagccgctttcccacagccttctcaagccgcttttgcacagccttctcaaaccattttcacacagccttctgaagccactttcacacagccttctgaagccactttcacacagccttctgaagccactttcacacagccttctcaagccgctttcacacaaccttctcaagctaatatctcacaagccatttgtgatgaagatgatgagctcagagtattggatccaccagcccctgcatcagtgagcaaaagggcaaaaaatgttggtactggtaattcaagaacaagaattaacaagcgtacacaagatgggaatgtggttgagatgatgggaaggtttctagaaatgaaagaaaaacaagctgaggcggatgaaagggccacaactaatgcaaatgaggatgatttccctattcaaacatgcattgctattgtggatggaatggaagagttttctgatgatgagaaggttgattcttatgatgtttttaaggatgcccaaaaccgggccattttcatgactgccaaagatgctacgcgcataaaatggttgaggaagaagattgcaagaacatgatatgatatatgaagctaaagtaatgaaggatgattttgtagtatcgtccagcataaagaaagaaagctgcaatttgtgctattgtcagagatggatatttaactttagcaatttgcaacttttaagtaatctgttaaattaaagatgagatcttgcagacttttcttattacctaatggattctcttattagctgattcaaatctaatcatgcatattgtagtaaggactatgtatgttgaatcaatgactctggttcaattttaaatatcacatgtgttttaagtttcttaa

SEQ ID NO: 92570 - DNA, 1911 bp, Zea Mays
ggatgttgggccgatacacgctaatacccggggggcagaaaaatccccacccgaggcgtggaagacaccgtcgctctcctcgcgtgcgagcgccgccactgcatcttcccatcgatctccgccgaccccgcatcttcccatacgagctgtgtttctccaagttcgctgctggccatatcgacgtcgtcatcctcgatccagacgagtgcgtgtgccatctccacgggtcttcgacagatttagcaagaatgtttggaagaggatctcctaggatgaacttgatccaagctgcaactatgaaaaaaatatcccccagatctactactaacaagcgcaagaagagaacatcaccaaaaggtattttgttacctattcttgcttattttcttgtaatagttggtcgtcacatgctttattttcaagaagagaacatcacatgctttattttcttgtaatagttggtcgtcttagagcaaactggaatagtggactagaaaagggtttagttgaaattcttcaagatcacaacaatgattgttataagggtcaaaatgggtggtcatcggaagcatggaatagaattgtcaagttattccatgagaaattctcttatgtcacatttacaaaatgccaaatccaagataaagagaaagagttaaagagagactacaaggctcttaaagaggcaaggcaacaaagcggggtatcatgggatgagaggttgtgtagaatagaagcagaagaacccatttggaataacctcaccactagtaacgagagacttaagaagtttcggactaaatctttcccactatttgaggctttaggagagctatatgatggaaatattgctgagggaaccatgaattttacttctattgagccttctcgacctcctgtcacacaaccttgtcaaggtgctgctacacagccttctcaagctgctttcacacttacacaaccttctcaaatcgctttcacacaaccttctctagctgctttcgcacgaccttctcgaaccgcttttagacatccttctctagccgctttcccacagccttctcaagccgcttttgcacagccttctcaaaccattttcacacagccttctgaagccactttcacacagccttctgaagccactttcacacagccttctgaagccactttcacacagccttctcaagccgctttcacacaaccttctcaagctaatatctcacaagccatttgtgatgaagatgatgagctcagagtattggatccaccagcccctgcatcagtgagcaaaagggcaaaaaatgttggtactggtaattcaagaacaagaattaacaagcgtacacaagatgggaatgtggttgagatgatgggaaggtttctagaaatgaaagaaaaacaagctgaggcggatgaaagggccacaactaatgcaaatgaggatgatttccctattcaaacatgcattgctattgtggatggaatggaagagttttctgatgatgagaaggttgattcttatgatgtttttaaggatgcccaaaaccgggccattttcatgactgccaaagatgctacgcgcataaaatggttgaggaagaagattgcaagaacatgatatgatatatgaagctaaagtaatgaaggatgattttgtagtatcgtccagcataaagaaagaaagctgcaatttgtgctattgtcagagatggatatttaactttagcaatttgcaacttttaagtaatctgttaaattaaagatgagatcttgcagacttttcttattacctaatggattctcttattagctgattcaaatctaatcatgcatattgtagtaaggactatgtatgttgaatcaatgactctggttcaattttaaatatcacatgtgttttaagtttcttaa

SEQ ID NO: 92571 - DNA, 528 bp, Zea Mays
ggatgttgggccgatacacgctaatacccggggggcagaaaaatccccacccgaggcgtggaagacaccgtcgctctcctcgcgtgcgagcgccgccactgcatcttcccatcgatctccgccgaccccgcatcttcccatacgagctgtgtttctccaagttcgctgctggccatatcgacgtcgtcatcctcgatccagacgagtgcgtgtgccatctccacgggtcttcgacagatttagcaagaatgtttggaagaggatctcctaggatgaacttgatccaagctgcaactatgaaaaaaatatcccccagatctactactaacaagcgcaagaagagaacatcaccaaaagttggtcgtcttagagcaaactggaatagtggactagaaaagggtttagttgaaattcttcaagatcacaacaatgattgttataagggtcaaaatgggtggtcatcggaagcatggaatagaattgtcaagttattccatgagaaattctcttatgtcacatttacaaaat

SEQ ID NO: 92572 - DNA, 2477 bp, Zea Mays
ccgaaccagcagaggcgcagacggacaggcacttcactggcttctgctaccgtgccgctcctccgtctcccgctacaaaatatttcacgggagaccctgctctctccgattccggcgtccactcgtcgctcacggaaaccgctcggagcccgacgccgcgagatcaccggccagcctcgcgctcgacacgggagaggcgaggcggtcgagtggcccaccctacgccgctctgacagtgagcaatggcggcagcgtcgaggaaagaggaggagaggaacgagcgagtcgtgcgggggctcctcaagctgccacccaaccgcagatgcgtcaactgcgacggactcgggccgcagtacgtgtgcaccagcttctggaccttcatctgcgtctcctgcagcggcatccaccgagagttcacgcaccgtgtgaaatccgtctccatgtcaacgttcagcacgcaagaggtcgaggctctccagaagggtgggaaccagcgtgccaaggaatcattcctgaaggatttcgatacccagaaaatgaggctacctgatagcagcaactccggcagtcttagggacttcataaaagctgtctatgtggagcgaaggtatgctggcggtagattttctgaaaggcctccaagagacaaacagaaccaaaaggcccatgaagaagagcatagaaggccaaattcctaccattcattttcacagagcccaccttatgattatcagtatgaagaggggcgcaatggcaagcgatctgcatttctaagtaggaagcctggttcagataaggggcatcaggggaagatttctggattttgttacagttcacatagcttgcatcagagaatgtctcgggatggatttactggtgagaattctgtatcgaggacttctaactgctcagggtccagcattagtgacacagttagaactgcaccacaatcacctaattttcctgatagtggatgtttcagcccccctgtggtacaagatcaatcaaatgtacatagttcttgtggactcactagttcacagagagctgtatcggcaggagacctagattctatctctcttaaatcaggcaaatcaaacttatctgatttgatttttgagaatgataatgttcaccgaactgaaaaatcctcaaattccgctgctccaagtttcatagccttttctgatgctattagtgctccaaatcaagctagctttgattccaaagcttctcaggaacaccatgtcactaccatagatcaatctgtagatctattttcaaatacgcttactgaaactccatctgctgataaggtgataccaacagctcattcaatggacaatgctgggtgggccacatttgatacacctccagaacaaaagcagcctgcactcactgggctttcttatgtttctgctacaagcatcgataaacaagctcttaatcatgatttgttttcatctgaatcaaatgatgagctaacatggttccggagctctaaggatgatgcttcggttaccaatcataatcagtctactgctacatctcttgatacatgcagttctgagccttggagtattttcgatgcctccagtggtagtacccagtacactgtcaagggagatctatcattaatgacttctagattgcaagagcctaaaggaacaatgaacgaaaatagctctcagctttggcattcatttgatgatgctaatgggatcgtttgtgctcagccacgaattgatgaccacagcaatacagcaagcatttctctatcaaccagcaatccatttgtgtgctctatagttttaaaggaatcttatgacgatgattcccacaaagtattgatgggtgaattgacacctaatacattgattgctgcttcctcagagccatctctgggaggaccctctactgagcagatgccattaaatccatttgaccttccatttgacactcagtcggggactcctgatctgttcatggacgtaagttcattgcaagaggccttgcctagcccagatctgccaaccttccttgatggtttacctgaaagatggttctccagcagctcttgtgcttatgttccatcagcgtcagcgtcacatggtggactgccgtgccttgtcgagcggggccccaactgttccttgctgaatataccagttggcactttatcagctggaaatccttttgtatagagggcatcacagtgaaaataatctgcgtcttggacttggcatgttcctttggtttggtgatcttagagctaggaatcttttctgtgcgaaccgggacaccttgcaaggttaccagaggaggtggggaatatgatagcgtccccaggacccactggaggaatgtttagtaattgtgagtttctgatggaggaatgtgtgtattctttctcggttcatgtactctaggacatgattattcagcactaccgggcatcctcccggtacatttctttc

SEQ ID NO: 92573 - DNA, 1480 bp, Zea Mays
cttctcacgcaccttctttccttcccctccccaacttcgacccttcccctgtccatctctctccttttttttttggtttcctcgcgtttaaagcttcgaggccgaatcgacctccagttctcgagacgactcgtctccctctttcaataagttcggcagggtaggacggcttcttcctctgcgccttcaccttcgcctgcgctgccggggctcgtcgcatggtttttaaatcgggtttgtaagttttagatctttatgtcaactaccaatctgaggcggcgactccatcatggagacgttgatggaaggaaaaacgagcatgttgacatatccagtgctgattccctcaatgaacctctattagggaagtccaatgatgacaactttggatcagaggtgtatgatcctagaaaacaggatctgtgggatgatgatatgaagaaagaacaactacactggtcatttcttttctcaaacttgattacacaatgggcacaatggttagcaagcattattgtgagctcaggatctatctttggtagattatcccccttctcttcagagaaccaaataaatccagtatatcttagccctttacaggaacaaaggttggatactttaagacacagattgcaaatctcttttgatggctcccgtattgaacatcaagatgccttgaggcaactctggcgtttagcttatcccgctcgtgagattccaccactcaaatctgaattatggaaggagatgggttggcaaggcaacgatccatctactgatttcaggggtggtggactcatatcgttggagaacctcatcttttttgctaggaactaccctaattcatttcagatgcttctgaacaaagtacaagggcagagatcagattgggagtacccttttgcagttgctggtatcaacgtttcattcatgctggtccagatgttggatctgaagtcaagtgttccatcttctaagtatggaattcgtttccttgaattgcttggacgtgatgagaacgcctttgaccacctgtactgtgtggcctttcggttgcttgatgctcagtggcttgtgaaacgtgcctcctatatggaattcaatgaggtcttgaaatcaacaagaactcagctggagcgggaactggttctagatgatgtgctggaggtgaaggacctgccgtcctacactatgctggatgagtaagctaaagccgagctgttgaacttggacgctggagaattgactaagctggtctgatggctaatagttatctagcgtatgctgatgtctgatcctaaatgcttaggcggcccacatgccattttacattgccgcatattttttttcttgttgtatactgaggtcttatgaggtgtttatatatgattcctttgtaaatattgtgtttgttatatgttatccttttggacatgctggttccaaggaaataaagcaatcgatctcgtattcattttca

SEQ ID NO: 92574 - DNA, 1646 bp, Zea Mays
cttctcacgcaccttctttccttcccctccccaacttcgacccttcccctgtccatctctctccttttttttttggtttcctcgcgtttaaagcttcgaggccgaatcgacctccagttctcgagacgactcgtctccctctttcaataagttcggcagggtaggacggcttcttcctctgcgccttcaccttcgcctgcgctgccggggctcgtcgcatggtttttaaatcgggtttgtaagttttagatctttatgtcaactaccaatctgaggcggcgactccatcatggagacgttgatggaaggaaaaacgagcatgttgacatatccagtgctgattccctcaatgaacctctattagggaagtccaatgatgacaactttggatcagaggtgtatgatcctagaaaacaggatctgtgggatgatgatatgaagaaagaacaactacactggtcatttcttttctcaaacttgattacacaatgggcacaatggttagcaagcattattgtgagctcaggatctatctttggtagattatcccccttctcttcagagaaccaaataaatccagtatatcttagccctttacaggaacaaaggttggatactttaagacacagattgcaaatctcttttgatggctcccgtattgaacatcaagatgccttgaggcaactctggcgtttagcttatcccgctcgtgagattccaccactcaaatctgaattatggaaggagatgggttggcaaggcaacgatccatctactgatttcaggggtggtggactcatatcgttggagaacctcatcttttttgctaggaactaccctgtatagaacttagatctgacacctttttctgttgtcttcctaattttttgatttttgaccattcacctgtacacattctcgtgcagaattcatttcagatgcttctgaacaaagtacaagggcagagatcagattgggagtacccttttgcagttgctggtatcaacgtttcattcatgctggtccagatgttggatctgaagtcaagtaatttcctgttcccaattcccctttacacatatctgcggatttcacattttgttgtttgaactgtcatatttatgcaggtgttccatcttctaagtatggaattcgtttccttgaattgcttggacgtgatgagaacgcctttgaccacctgtactgtgtggcctttcggttgcttgatgctcagtggcttgtgaaacgtgcctcctatatggaattcaatgaggtcttgaaatcaacaagaactcagctggagcgggaactggttctagatgatgtgctggaggtgaaggacctgccgtcctacactatgctggatgagtaagctaaagccgagctgttgaacttggacgctggagaattgactaagctggtctgatggctaatagttatctagcgtatgctgatgtctgatcctaaatgcttaggcggcccacatgccattttacattgccgcatattttttttcttgttgtatactgaggtcttatgaggtgtttatatatgattcctttgtaaatattgtgtttgttatatgttatccttttggacatgctggttccaaggaaataaagcaatcgatctcgtattcattttca

SEQ ID NO: 92575 - DNA, 1545 bp, Zea Mays
ccctccccaacttcgacccttcccctgtccatctctctccttttttttttggtttcctcgcgtttaaagcttcgaggccgaatcgacctccagttctcgagacgactcgtctccctctttcaataagttcggcagggtaggacggcttcttcctctgcgccttcaccttcgcctgcgctgccggggctcgtcgcatggtttttaaatcgggtttgtaagttttagatctttatgtcaactaccaatctgaggcggcgactccatcatggagacgttgatggaaggaaaaacgagcatgttgacatatccagtgctgattccctcaatgaacctctattagggaagtccaatgatgacaactttggatcagaggtgtatgatcctagaaaacaggatctgtgggatgatgatatgaagaaagaacaactacactggtcatttcttttctcaaacttgattacacaatgggcacaatggttagcaagcattattgtgagctcaggatctatctttggtagattatcccccttctcttcagagaaccaaataaatccagtatatcttagccctttacaggaacaaaggttggatactttaagacacagattgcaaatctcttttgatggctcccgtattgaacatcaagtgtgtattactgatgtagattggttttctaggttgacatcatctcatgaagtaaattaattaataatttatgggctttatcattattaggatgccttgaggcaactctggcgtttagcttatcccgctcgtgagattccaccactcaaatctgaattatggaaggagatgggttggcaaggcaacgatccatctactgatttcaggggtggtggactcatatcgttggagaacctcatcttttttgctaggaactaccctaattcatttcagatgcttctgaacaaagtacaagggcagagatcagattgggagtacccttttgcagttgctggtatcaacgtttcattcatgctggtccagatgttggatctgaagtcaagtgttccatcttctaagtatggaattcgtttccttgaattgcttggacgtgatgagaacgcctttgaccacctgtactgtgtggcctttcggttgcttgatgctcagtggcttgtgaaacgtgcctcctatatggaattcaatgaggtcttgaaatcaacaagaactcagctggagcgggaactggttctagatgatgtgctggaggtgaaggacctgccgtcctacactatgctggatgagtaagctaaagccgagctgttgaacttggacgctggagaattgactaagctggtctgatggctaatagttatctagcgtatgctgatgtctgatcctaaatgcttaggcggcccacatgccattttacattgccgcatattttttttcttgttgtatactgaggtcttatgaggtgtttatatatgattcctttgtaaatattgtgtttgttatatgttatccttttggacatgctggttccaaggaaataaagcaatcgatctcgtattcattttc

SEQ ID NO: 92576 - DNA, 1573 bp, Zea Mays
aagatgaatgtttaactggaactagcgagtgtgataaaatgttccttatcggcggaaggggcagatatttttcggttctgtgacggctttccgagtttggtggattgtgtcgagagagtcagagagggacaccaaagccggctacggccagtccccagtcagcctagcttcgctcgctgttcgttcgtcctgatagcttgaaaccgccatggccatggggctccccggccaccgctgctgccgccttcccgctctcgggtcggtcactccactctgtcccgccctcgctcgcaggcccctcccgcggacctcggatctccgctactcctccctcgaagcccaagctggggacactattggggaggaggtcctgcgcatgttccttgaggagaggcaactgcacggcgatttcgtcaccaagatctctgacatggtctggaggaggaatggcggcaatgttgatgcggttgaggcgaccacagaccaaggcaatgctgtagatgttgctcagcctgaagacgtgcgggaagatgttgtggacgacggaatgttgagactagcggcaaccagaggttgggtgcccggtgacagcagccctcctttgagcaagaggctttcagctaaggattggcagaatgagagagacaaaaggaaggagctgaatcttttgaaatatgaagcactcaaggatgaattgctgctcttgaccacagggattggagcagcatgtagtttatactgtctcctggttttctctctcgagactgctgtcagttatgctttgggggttggtttcagctgcttgtatcttcaacttctgtgtcaacatgctgataacctatcaaagcaagatattccacaagtttttctaaagaagaaagtgaagaaaattggcattacaagtgaagatttgaagaatacaatagagaagacattgggtggtggaagagtagctctttcatccccaaggcttgtgattcctgccgtgatttttggattgtcagctttatcagaccacttcaaaaatagttttttcagttttgaggttcttccagggatgatgggtttcctcgcatacaaggctgcagctttggttcaggtctacagagataacgaggatctccgcttgatacttcctgaggaagaggatgctgacagtgaaagcacttgatgcatacaaattagagattatgttaacctgttgataaaaacagaacggtctgatttactgagtcatgcttcagttctgaaaaaaaatctcttaaggatatcctaaaattcgtttgcttgaacagcctagtgccaggagtccaggacagctcactactattaaaatgagatgtaaaattacctgataatgtcataatttttcacaaaccaaacaacttcaactcgtcatagcaaggcttctgattgttaacccagacaagagagtttttttttactattatgatactcataagaagtggcttctctacaatagtatcaatagattggaattctctataatgatatttgtaagcgaggaacttctccaaaacggtatttcaccaatacttattgtattttctta

SEQ ID NO: 92577 - DNA, 778 bp, Zea Mays
ttttttttactacagattatgagtatttgtaatctatgaagcacatcgatctgatgttttggttccaggtactggctttcagggacataaaccctcaagctccaacacacattctcatcatccccaaagtcaaggatggactaactggcctggcaaaggctgaagagaggcacatagaaatacttggctatctcctctatgttgccaaggttgttgcgaagcaggaaggacttgaagatggctatcgcgtcgtcatcaatgacggcccaagtggatgtcaatctgtttaccacatccacgttcatctcctcggaggcaggcaaatgaactggcccccaggctaagaatatcttgtgattgatcagtgctaatgccaaggactgctactccatttctctagaataatccctgtaatttccataaaagctagtgcgcagtgcgctgaccttgtgctatatttgtggaattaccggaagcatgctgctgtgatctatgattggacacaagaaacttgtaactggtactcctatcatcgattgacttgtccttattgatcagctgatgggggttgcccactggccttgctgatctgcagaatcttcttgccagtctttctaccttttttttaatctaagaacaatagcttcgatacctgcatggctgcattcgtttcgtttatattggtttaacagcaaggctgtcgaaatagccaaatccaaatatagtattagaagggcatacttgaagcacgtcattaggtcaggtcgcgtgcttgaag

SEQ ID NO: 92578 - DNA, 944 bp, Zea Mays
atgagggtaaaatggtaatgttccggagaaagccagggtttcttcggaggctttatttatcgtttatccacggaacttccggtgccggcggcgaccacttgtggcgatccatccctcaccatgtcgtcggagaaggaggcggcgctcgccgccgtgctcgatgacagcccaaccatatttgacaagatcatcaaaaaggaaataccttctactgtggtttatgaggacgagaaggtactggctttcagggacataaaccctcaagctccaacacacattctcatcatccccaaagtcaaggatggactaactggcctggcaaaggctgaagagaggcacatagaaatacttggctatctcctctatgttgccaaggttgttgcgaagcaggaaggacttgaagatggctatcgcgtcgtcatcaatgacggcccaagtggatgtcaatctgtttaccacatccacgttcatctcctcggaggcaggcaaatgaactggcccccaggctaagaatatcttgtgattgatcagtgctaatgccaaggactgctactccatttctctagaataatccctgtaatttccataaaagctagtgcgcagtgcgctgaccttgtgctatatttgtggaattaccggaagcatgctgctgtgatctatgattggacacaagaaacttgtaactggtactcctatcatcgattgacttgtccttattgatcagctgatgggggttgcccactggccttgctgatctgcagaatcttcttgccagtctttctaccttttttttaatctaagaacaatagcttcgatacctgcatggctgcattcgtttcgtttatattggtttaacagcaaggctgtcgaaatagccaaatccaaatatagtattagaagggcatacttgaagcacgtcattaggtcaggtcgcgtgcttgaag

SEQ ID NO: 92579 - DNA, 1093 bp, Zea Mays
aatggacttctctctcccgccccttctctcttcgtgatgctcctctgcttgccttgccctggtgtggtggtgtctagtcaagtacgcttccgaattaaaagcgctctggcctgcaacctgctgtctgctccgtcctcccacggccggccgcctgcccgcgtcttcttcgccacccctcttctccggtcccgcacctgcatttcttgaccccttcctccaccgcagccaaacaatgtctccggcgccgagttcgcatcactcgcagatcaattcgaggaaggagaagcggatgaggaaggtggacaccttcgcgccgcacaacgatggccaccaatggaggaagtacggcgagaaaaagatcaacaacaccaacttccccaggtattactacagatgcacgtacaaggacaacatgaactgcccggccacgaagcaggtgcagcagaaggaccacagcgacccgccattgtacgcggtcacgtactacaacgaccactcgtgcaacagcgcgttcctcccgctctccccctccgagttccagctgcagacctcgtccgggaaggccgtctccatctgcttcgactcctcgtccgggacggcggcggcggcggccgccaccaccaatgccagcggcggctcgccctcttccagcgcggcggcggcggcggcgcggcgaggcacgccgccggaagtcagcaacccgcccgtgctgcggcggtctgagacgtacccgtggggcgccggcgccgtggagcagaagccggcgtcctgcagcaccgagtaccacgacgccttctcggctggcgccgccgccgtgccggaggaggtggtagatgcaggcagatttggatctatcaggttcttccattttttgtaaattgatcactcagtggaaggaaggcaattgatgcctttacttcgacaaactaatatgatacagtcatacagatgtcttcttttcttccttcttctttttattccttcattacatgccgaagcttactacatattcgcatgttacttttgttttcttgattcgaaatcgaaataccaatgctaattttaatccaacacttcgtttctgcaatggctt

SEQ ID NO: 92580 - DNA, 405 bp, Zea Mays
atggtggtgccttccctagacagcctgcgcaagctaggcgacagggacgcctgggatctagtgggcgcgaacgatggcgtgggagaatttgtcgtcacctcagctcgccctccacctcctgcaatgcgctcgagccctcggcttcggcaatcagcggtgggggccacactggacgcaacgttgggttggggaggagcgctgcaatgggattttggatcagagatggtgcaggagcaggagaggaggctgggagagccatcgcgggaggagatgccagaggagttgtcatgggaagagatgccggaggagatgtcgggtgtcaaggggatgactgcgatggtccttgagggtatgacgacgcacgcgggggtgagaagacagacgagcacgacgtttcggggttag

SEQ ID NO: 92581 - DNA, 3749 bp, Zea Mays
ccctcccctgttctctcgcccgaacacggcgaccgtcgctccaaaacacgaccttcacgcgcgcgccgggagcggcatgcccgggaacgcgggagctgagggtccgtgcctcccggtcgtctgacgccgcgccggtcatcgcccacgcctcctcgcccggccatggccgaggaccacgggtcgtcgcgccacatgtcggcgtcgcagaaggagctgggcgacgaggacgcccgcgtggtgcgcgtggccgacgccgcgcgcaccaacgagcgcctcgacctcgcgggcaacgccgtgcgcaccgccaagtactcgccgctcaccttcctgccgcggaacctcttcgagcagttccaccgcctcgcctacgtctacttcctcgccatcgccgtgctcaaccagctgccccagctcgccgtcttcgggcggggcgcctccgtcatgccgctcgccttcgtcctcctcgtcaccgccgtcaaggacgcgtacgaggactggagacgccaccgctccgaccgcgccgagaacggccgcctcgccgcggtcctctccccggccgcccccgggggcgcccagttcgtcccgaccgagtggaagcacgttcgagtcggcgacgtcgtgcgcgtcgtgtccgacgagtcgctcccggcggacatggtcctcctcgccaccagcgagcccactggcgtcgcttacgtgcagacgctgaaccttgacggcgagtccaacctcaagacccgctacgccaagcaggagacgctgtccacgccgcccgagcgcctcgccggggccgtcatccgcagcgagcgcccaaaccgcaacatctacggcttccaggccaacctcgagctcgaaggggagagccgccggataccgctcggtccgtccaacatcgtgctgcgcggctgcgagctcaagaacacgccctgggccgtcggcgtggtggtttacgcggggcgggagaccaaggccatgctcaacaacgccggcgcgcccaagaagcgcagccgcctggagacgcacatgaaccgcgagacgctcttcctctctgccatcctcgtcgtgctctgctcgatcgtcgccgcgctctccggcgtctggctgcgcacccacgaggaggagctcgagctcgcgcagttcttccacaagaaggactacctgcaccgcgacaaggacaatgactacaagaactacaactactacggcatcgcggcccaaatcgtgttcatcttcctcatggcggtcatcgtgttccagatcatgatacccatctcgctctacatttccatggagctcgtcaggctgggacaggcctacttcatgatccgagacacgaggctgtacgacgagtcctccaattcgaggttccagtgccgggccctcaacatcaacgaggacctaggccagattaagtgcatattctccgacaagaccggcacgctcacgcagaataagatggagttccggtgcgcgagcattgacggaatcgattacagtgacatcgcacggcagcggcctcctgaaaagggcgatcggatttgggcgccaaaaatatcggtgaacaccgatccggagctggtgaagttgatcagggatgggggcgataccgagcgagggacgcagactcgggagttctttctcgccctggcatgttgcaacaccattgttcccatgatcgccgatggtccggaccctaaggagaaggtgatcgactaccaaggcgagtcaccggatgagcaggcattggtctctgccgctgcggcatatggctttgtgctagtcgaacgaacatcgggccacattgtgatcgacgtccttggtgagaagctcagatatgatgtccttggtcttcatgagtttgacagcgatcgcaagaggatgtctgtcataattggctgccctgataagtctgtcaagctgtttgtaaaaggcgctgacagttcgatgtttggagtcatcgacaaaactgcgaattcagatgttgtccaagcaacagagaagcatctccattcatattcatcattaggtctgcgaacacttgtcattggtatgcgggaacttagccaagaagagtttcaggagtggcaaatggcttatgaaaaggctagcacggcactactaggaagaggaaaccaactccgcaacgtggctgccaacatcgagagaaacttgcgtctattgggtgccactggaattgatgacaagctgcaggatggtgtacccgaagcaattgagaaactgagggaagcagggattaaggtttgggtgctaacaggtgacaagcaagaaactgctatctccatcggctattcctgcaagcttttgacaagagacatgacacagattgtaattaacagtcgctcaagagaatcatgcaggaagagtctagaagatgcaatcgccatggttaacaaataccaatcgttctcgacagacccccaacttagggtgccccttgctttgattattgatggtaacagccttgtctacattttcgatacggattgggaggagaagctttttgaaatcgctatagcctgcgatgtcgtcctatgctgtcgggtagctccccttcagaaggctggtattgttgatctcattaagaagcgaacaagtgacatgactttagctattggagatggtgcaaatgatgtatccatgattcaaatggctgacgttggcatcggcatcagtgggcaagagggaaggcaagctgttatggcctcagattttgccatgggtcaattcagatttttggttcctctgttgttggttcatggccattggaattaccagaggatggcctacatgatcctatataacttctacagaaatgctacttttgtctttgtgctattctggtatgtactttacactggtttcaccctaacaacagcgataactgagtggagcagcgtgctatactctgtgatatatactgctgtccctactattgtcgtcgccattctcgacaaggatctcagccggcggacattgctgaagtatccccaactctatggcccagggcagcgtgatgagaactacaacctgaggctattcatattcatcatgatagactccgtctggcagagccttgcatgtttcttcatcccctaccttgcatacaggaagagtataattgatggttccagccttggagacctatggacactatccgttgttattcttgtcaatattcacctggcaatggatgtcatcagatggaactggattacgcatgcggcaatatggggtagcattgctgcgacatggatttgtgtcatgatcatagattccataccaatcatgcctggtttttgggcaatctacaaagtgatgggaactgggctgttctgggcactgctgcttgcggtaactgttgttgggatgattcctcattttgccgcaaaggccttcagtgagtatttcatccccagtgacattcagattgcaagagaaatggagaagtcgcaagatttccatgatgtaactcatccagaagttcaaatgagtacagtgagtagagcttagggtagggggttacacagtgatcttttgttcattcgagtaggatatagctctacactttctttggttctttttgttgtgtgtacaggcaattctttcagcagtgtgcaagctttcttgatgcttgctcccttgccaactatccaaaggataggccccttgtaccattctgtgtatccaccagccaaattttgttgatttacatgaaaggagatcataca

SEQ ID NO: 92582 - DNA, 2299 bp, Zea Mays
ggacaaaatcaagcgatgctcccttcttgtcccgcacctcgctgattccaatctcttctgcgccgcgctggttagttggcggcagcgagtacgaaatcgagagcgcagcagcatgcgaccggaacggccattgccgccgctgccgccgtcacaagagacggaggaaggggtgggagcaccaggaatggacgtgcccaccaggttgccagacccagtggcgtcgcctatactgaggcactcgtctgccaactcgatgaggaggacgcggtcgctgcggtccctcatggccgactcgccgtccgtcaccttcgcggccaacctcaggtcgggctccaaggccgagtccaccgcgtcctcgctcgagagcttccggttccagcgcgacgggtccgcgtcagggacccccgcggtgttctcgcgggtatccaccaggcggtccgcgtccgagcgcgccggctcgcagcgcgacctccgggacgaggacgcgcggttcgtgtacatcaacgacgcggaccgcacgaacgcgccgccggccgggctccccgacaactccatccacaccaccaagtactcagttgtcaccttcctcccgcgcaacctctacgagcagttccaccgggtggcctacctgtacttcctcgtcctggtggcgctgaacatggtgccgcagctcggcgtgttcacgccggccgcgtccgtcctcccgctggcattcgtgctcggcgtgacggcggtgaaggacgcgtacgaggactggaggcgccaccggtccgacaggaacgagaacaaccgcaccgcgtcggtgctggtgggcggcgtgttcgtgcccaagcgctggaaggaggtgcaggtgggcgaggtgctgcgcgtggtggccaacgagacgctgccgtgcgacatggtgctgctgtccacgagcgaccccaccggcgtcgcctacgtgcagaccatcaacctcgacggcgagtccaacctcaagacgcggtacgccaagcaggagacgatgcccacgccgccggaggcgctcgcgggggtcatcaagtgcgagaagcccaaccgcaacatctacggcttcctcgccacggtcgacctcgacggccgccgcgccgtctcgctcggcccctcgaacatcgtgctccgggggtgcgagctcaagaacacgacctgggccatcggcgtggccgtctacaccggccgggacaccaaggtgatgctcaacagctccggggcgccgtccaagcgcagccgcctggagacgcggatgaaccgcgagaccatcatcctcgccgtcgtcctgttcgtcctctgcgccatcgtgtcggtgctcgcgggcgtctggctcggcgaccacagcgacgagctcggggtgatccccttcttccgcaagagagacttctcggtgaaggacgacccggatgccacgtacaagtggtacgggatgggcgccgaggtggcgttcaccttcatgaagtcggtgatcatattccaggtgatgatccccatcgcgctgtacatctccatggagatcgtcagggtcgggcaggctttcttcatggtgcaggacaggcacatgttcgacgacaagcggcaggccaaattccagtgccgcgcgctcaacatcaacgaggacctgggacagatcaagtacgtgttctccgacaagaccggcacgctcaccgagaaccggatggagttccggtgcgccagcgtgcacggagcagacttcagcgacactgccggcgccggcgccgacgacgggcattctgtgatcggggaggacggcgtcgcgctgcggccgaagacggccgtgaagaccgaccccgagctggtggcgctgctcaaggaaggcggcggcggcgcgagtgccgaccgcgcccgcgacttcctcctgacgctggcgacgtgcaacaccatcgtgccgatcgtggtcgacgacgacgacaacgactccgcggcggcggcggccaggctcctggagtaccagggcgagtcccccgacgagcaggcgctggtgtacgccgccgcggcgtacgggtacaccctcgtggagcgcacctccggccacgtcaccgtcgacgtgctcggctccaggcaaagggcagacataacagaagagacctactgcatgcgcatggatgcatacaacacacccggccctagcacaccggcggaattatggccagctcgctggtctgccgtgcacgaaggaccggacactgcgttttttcaggcaagggaactagagatggcaacgggtacaaacccgttgggttttgccatcccaaacttgtacccgtga

SEQ ID NO: 92583 - DNA, 1973 bp, Zea Mays
actctgctctccttttcccctttctccgttcacctttctctcttcctttttctttcccctccctctccctttctttcctcctggcgacgactgggcgagtgccgccgaacttcgccaggtcttcaccggcgacgagcacctacaaggtgacactattccttttcttcacttggtgtataatctctctttgctccgatcaagcttttcaaacataataagcaaatagtctctgcacgtgattgccaaaattagtcaagacgggtgctctttgctgcgtggccgctaggccacatgggacaaagtctgaccctgctagcagagatcgttctatggatcctactgagcctcgttggcgcataaattcgagcttttctcctccaacgtcaaggaggtgggattgccgctattcatcagatggattgccccacagagttcatgatgctcctcatgatcacccgccatatgtttcatcactatcatcccatagcaaaggaagcagaagtgcatttggcagtgatcagtacctcaatcatcatcattctgcatctgatggagcactttcttactttgggagtccagctgacagccttcaggccccacgctggacaccctctcttcaaagatttgatctcggtgaattctctacccctgcaggaggatcaagaccagaaacttctgattatcctcagtcaagtgagaggccactgactgccacaagcagtttcagttctgcatccccattttcggaatcaagccaactagcttcgtctagtaaacaagcggccccatatctacctcgcaaccatatgggcaggcggtctttcatgtctaaaccagtgtacccacttgtcttccggaaccctgtgtccgaatcagaagcgtgcaggatgcttgaggttagtaatgccgggcgagcgacaccaagtgatgacagccaggcttctcctctgtggcgtcgcagcttggcgagcccagagctcaagttccataacgcactgaacgaacttgggaagatggaggtttcacctgaacggaacacgagctcaagaagggaagggttcagatggagcaatgccagcagttatgattttggatacgatggagatgccattgacatgtcagatcatatcagtatcgagtcccagagatcacccacaagctcagtgaggttcctgaaatgtgggctctgcgagagattcctgtgccagaaatcaccctggacctcgaaccggattgttcgaaacgccgatatgccagtagcagcggttcttcattgccgacatgtcttccatgcggattgcttggaggagggcactcccaagacagaagtccatgaaccaccctgtccgctgtgcacggcacccactgacgacgaagcacatgtgtcattctcggaacctctgcatgttgccctccgatctgctcgcaggaacctttcgctgggcagtggcgctggagggagtaacagcagtggcgcgaggcctccttgcagtgaccgtggcctgaagaggaaccattctgctatcgtgccgagacgcggcggcggcggctcgttgttccgcaaccgcttcaagaggcagttccccttcaaggctaggatcgggaaggagctctttggcggcagggttttcagcaaggtcgggtcgtcttcaggtcaacaggatgaccatcgacagcaagcgccgaagcgtgatcggctcatgaagtagctagagaacttagtggcacggagtatatgttgtgtgccctcctgatattctatccgtgccatcagttatcatgtctagtgtaacctataacagcatgcgaaacttggcatccatgcgcagtagtcgtccaagacgggggctctgtatatggaggctgcctgcattgcatgtagcacccaccgttggctaactatgaggtgtattttggatccttgcagtaagaatctcagaatctatgccctatgattactatgttctgcttga

SEQ ID NO: 92584 - DNA, 1333 bp, Zea Mays
taatgaaactaataaataatttgcagtttgtatcacaattctgattttatgctcatctcctgcagaggccactgactgccacaagcagtttcagttctgcatccccattttcggaatcaagccaactagcttcgtctagtaaacaagcggccccatatctacctcgcaaccatatgggcaggcggtctttcatgtctaaaccagtgtacccacttgtcttccggaaccctgtgtccgaatcagaagcgtgcaggatgcttgaggttagtaatgccgggcgagcgacaccaagtgatgacagccaggcttctcctctgtggcgtcgcagcttggcgagcccagagctcaagttccataacgcactgaacgaacttgggaagatggaggtttcacctgaacggaacacgagctcaagaagggaagggttcagatggagcaatgccagcagttatgattttggatacgatggagatgccattgacatgtcagatcatatcagtatcgagtcccagagatcacccacaagctcagtgaggttcctgaaatgtgggctctgcgagagattcctgtgccagaaatcaccctggacctcgaaccggattgttcgaaacgccgatatgccagtagcagcggttcttcattgccgacatgtcttccatgcggattgcttggaggagggcactcccaagacagaagtccatgaaccaccctgtccgctgtgcacggcacccactgacgacgaagcacatgtgtcattctcggaacctctgcatgttgccctccgatctgctcgcaggaacctttcgctgggcagtggcgctggagggagtaacagcagtggcgcgaggcctccttgcagtgaccgtggcctgaagaggaaccattctgctatcgtgccgagacgcggcggcggcggctcgttgttccgcaaccgcttcaagaggcagttccccttcaaggctaggatcgggaaggagctctttggcggcagggttttcagcaaggtcgggtcgtcttcaggtcaacaggatgaccatcgacagcaagcgccgaagcgtgatcggctcatgaagtagctagagaacttagtggcacggagtatatgttgtgtgccctcctgatattctatccgtgccatcagttatcatgtctagtgtaacctataacagcatgcgaaacttggcatccatgcgcagtagtcgtccaagacgggggctctgtatatggaggctgcctgcattgcatgtagcacccaccgttggctaactatgaggtgtattttggatccttgcagtaagaatctcagaatctatgccctatgattactatgttc

SEQ ID NO: 92585 - DNA, 1539 bp, Zea Mays
aaaaaagacgcggcgatttttcgctcctctaatccggtttgcctttatccgtgggacttctttttaaaaggagctactttccttcgccgcttccgcaatcttccattcctcctctctccttccctgtgtctctctcctcgcgagctcttcatcccttcttccagcgcggtttggcgatggcggcagcgcaggcgatctcgaaggggagcgtggtgtctccatgcggcaatcgagcggcgccgggcttccttgccaggcggaggggtgccgtggcggcgcggatggcaccgtcagcggcgcggatcgggggcttctggaggaagaacgcgtttcctggcgggaggctaaccctgaggacgaggagatccagggccgcgtcaccgacgcagatgaacatgaaccttgcgcttgggaaatcgatgaggtggtgggagaaggggttgcagcccaacatgcgtgagatcgagtccgcccaagaccttgtcgatgctttgaccaacgccggcgacaggctcgtcgtcgtcgacttcttctctcctggctgcggcggctgccgtgcttttcaccccaagatttgtcaatttgcggagcagaatccagatgtgctgttcttgcaagtgaactacgaggagcacaagtctatgtgccacagccttcatgtccatgtcctacccttgttcagattctacaggggagcacagggacgactctgtagcttcagttgtaccaacgcaactattaagaagttcagggatgcacttgcgaagcacaagccagatagatgtagccttggcccaaccagggggctagaggaatctgagttattagccttggcggcaaacaaggacctgcagttcacctacgcgaagcaggaaccagaactgatccccaggggagatgctcctggggaggtcgttgctcccgagcctgcaaagcttcctgcggctccaaagcctttggtcaggctggggtccgaggagaggtcaggctggtctcgtcaggaagatgaaatgcatatgaggttatcatgaggatgattagatgcttccgttctgtatagttccgcggttcttggtgtgtacaggttgtagcttcccatggtagcagagtgcaggctaagattttttacatgtgaagcctgcccgcctgtcgtccagtagtttagctcggttggattagcagtaccaatgagcggtgttgtggagctctgccttgaggaaatcgtgtggtagatgtatggatgattcgtctacatgctatttcgtcgaattctgtagatcaagtggatgtgtagctcttgtttcatttcccctgtagcgttgggatctgtccgtcgcagaacagaataatcgatcatgccttatgttgtgccagatattgtggtgcttagagatcattgtttgttgtgataatattcgagtccgtgactagtttccttatgttgtatcagacactgtggtgatcattgttgtgataacatttgagttttgtggctagttcctgccttgccttcggggcagggaacggccgattgagaaa

SEQ ID NO: 92586 - DNA, 1380 bp, Zea Mays
acgcggcgatttttcgctcctctaatccggtttgcctttatccgtgggacttctttttaaaaggagctactttccttcgccgcttccgcaatcttccattcctcctctctccttccctgtgtctctctcctcgcgagctcttcatcccttcttccagcgcggtttggcgatggcggcagcgcaggcgatctcgaaggggagcgtggtgtctccatgcggcaatcgagcggcgccgggcttccttgccaggcggaggggtgccgtggcggcgcggatggcaccgtcagcggcgcggatcgggggcttctggaggaagaacgcgtttcctggcgggaggctaaccctgaggacgaggagatccagggccgcgtcaccgacgcaggtgaatattcaggatatgaacatgaaccttgcgcttgggaaatcgatgaggtggtgggagaaggggttgcagcccaacatgcgtgagatcgagtccgcccaagaccttgtcgatgctttgaccaacgccggcgacaggctcgtcgtcgtcgacttcttctctcctggctgcggcggctgccgtgcttttcaccccaagatttgtcaatttgcggagcagaatccagatgtgctgttcttgcaagtgaactacgaggagcacaagtctatgtgccacagccttcatgtccatgtcctacccttgttcagattctacaggggagcacagggacgactctgtagcttcagttgtaccaacgcaactattaagaagttcagggatgcacttgcgaagcacaagccagatagatgtagccttggcccaaccagggggctagaggaatctgagttattagccttggcggcaaacaaggacctgcagttcacctacgcgaagcaggaaccagaactgatccccaggggagatgctcctggggaggtcgttgctcccgagcctgcaaagcttcctgcggctccaaagcctttggtcaggctggggtccgaggagaggtcaggctggtctcgtcaggaagatgaaatgcatatgaggttatcatgaggatgattagatgcttccgttctgtatagttccgcggttcttggtgtgtacaggttgtagcttcccatggtagcagagtgcaggctaagattttttacatgtgaagcctgcccgcctgtcgtccagtagtttagctcggttggattagcagtaccaatgagcggtgttgtggagctctgccttgaggaaatcgtgtggtagatgtatggatgattcgtctacatgctatttcgtcgaattctgtagatcaagtggatgtgtagctcttgtttcatttcccctgtagcgttgggatctgtccgtcgcagaacagaataatcgatcatgccttatgttgtgcc

SEQ ID NO: 92587 - DNA, 1831 bp, Zea Mays
cgcgtccgcgctgctggcacgccgcgtgtgcttggctcccgccccacgcccagtgcctccctccctctctgcccccctgccgcggcgcgtgcctggctggctggttgccctccgcttgggccttggagagcccgggcttcgatttctagctggttccgccactgccgagaagccgcgcgttgtcaggcacgggaaagaggtagtccgcgggaggttctctccggaggagaggtatggtgcccgcgagggctcgccatatcgatagatccgcctctgaccagcagcaagggcccgctccagcgggggcggcgacgctgctagtgcggcacctcccagaggctatcacgcaagagatgctatcccgcctcttctcccactacggagccacatccgtccgcccctgttccggtggaaagttgagaaattgcgcatttgtagattttagggacgaggcggcagctaatcacgcacattcgctcttgaacaggttgaggtttctgggaaaagtgttgactgtcgagcgagctaactgtccaaatgcaaatgagtctcacctgaagcatcaggaccaattagggcatggggcgtcccaggtaccaagtattagttcccaaactcagaaggaccacacatcgattgccgaaccaattgcccccaagcttagtgtggactacccatttcctccacaccttgagtatgcatatccaccaccagatggaaacatattaacaaatattgtcaatgccctgatcgccgtccctcgattctacaaccaggtcctgcatttaatgaacaagatgaaccttcctgctccatttcggatggcattgcctactccaccactaccatcgcaagttcctgttatccctcatcctcagccaccaccgggatctactacaactggggagcttcattcagcagatttgtctagtgatgagtctgagttagaatcatctgatgaagatattgataaacggaaaatcaagcgtgcaaagcatgaagcaattgttggtcctgcagttgacaaaaacgttgctcatgaagcagtgggggtgaaatctgttgcattggtttctaatgagcttcaagtgataaaaaagaaaaacccagtacttcagataaaaattacccctaagcctatacagaaggaaccacctgtcccaagtatgactgaaaatgaaccggattcaactcatgaacaacttcaagagaaacattttgtcacacctcaggaaatgtcgagagagaaattaccaccagaggagattttatcccttcctatgttcaagaattacactccaggaaatccagccagtgttctgtacattaagaacttggcaaaggatgtcactcatgacgacttctactatgtctttggctctgttttcgaaagcatggacagtgcaaggttgggtttaagtgtaaagttaatgcaggaaggacggatgcgtggtcaagcctttgtcacatttcccacggttgaacttgctcagcgtgccctgaatctagcgcatggctatgtgttcaaaggaaaaccaatgatcatacaattcggaagaaatcctgctgctaacaaagcttcctaaagcaggatacaattttctttccagattttgatagatttcagaagttggtaggaactggaaagtgacaaaccagaggttgtgggtatctgttggctgttgttactgcaacctgtttggcatacacactaggctgattggttcctcccatggtgtaatgtttgtcgaaaaataacattgtacattccagtttgtggattattaaaagaattactcgataaaagcggacattggaggttataagctgc

SEQ ID NO: 92588 - DNA, 1917 bp, Zea Mays
gcgccgcgtccgcgctgctggcacgccgcgtgtgcttggctcccgccccacgcccagtgcctccctccctctctgcccccctgccgcggcgcgtgcctggctggctggttgccctccgcttgggccttggagagcccgggcttcgatttctagctggttccgccactgccgagaagccgcgcgttgtcaggcacgggaaagaggtagtccgcgggaggttctctccggaggagaggtatggtgcccgcgagggctcgccatatcgatagatccgcctctgaccagcagcaagggcccgctccagcgggggcggcgacgctgctagtgcggcacctcccagaggctatcacgcaagagatgctatcccgcctcttctcccactacggagccacatccgtccgcccctgttccggtggaaagttgagaaattgcgcatttgtagattttagggacgaggcggcagctaatcacgcacattcgctcttgaacaggttgaggtttctgggaaaagtgttgactgtcgagcgagctaactgtccaaatgcaaatgagtctcacctgaagcatcaggaccaattagggcatggggcgtcccaggtaccaagtattagttcccaaactcagaaggaccacacatcgattgccgaaccaattgcccccaagcttagtgtggactacccatttcctccacaccttgagtatgcatatccaccaccagatggaaacatattaacaaatattgtcaatgccctgatcgccgtccctcgattctacaaccaggtcctgcatttaatgaacaagatgaaccttcctgctccatttcggatggcattgcctactccaccactaccatcgcaagttcctgttatccctcatcctcagccaccaccgggatctactacaactggggagcttcattcagcagatttgtctagtgatgagtctgagttagaatcatctgatgaagatattgataaacggaaaatcaagcgtgcaaagcatgaagcaattgttggtcctgcagttgacaaaaacgttgctcatgaagcagtgggggtgaaatctgttgcattggtttctaatgagcttcaagtgataaaaaagaaaaacccagtacttcagataaaaattacccctaagcctatacagaaggaaccacctgtcccaagtatgactgaaaatgaaccggattcaactcatgaacaacttcaagagaaacattttgtcacacctcaggaaatgtcgagagagaaattaccaccagaggagattttatcccttcctatgttcaagaattacactccaggaaatccagccagtgttctgtacattaagaacttggcaaaggatgtcactcatgacgacttctactatgtctttggctctgttttcgaaagcatggacagtgcaaggttgggtttaagtgtaaagttaatgcaggaaggacggatgcgtggtcaagcctttgtcacatttcccacggttgaacttgctcagcgtgccctgaatctagcgcatggctatgtgttcaaaggaaaaccaatgatcatacaattcggaagaaatcctgctgctaacaaagcttcctaaagcaggatacaattttctttccagattttgatagatttcagaagttggtaggaactggaaagtgacaaaccagaggttgtgggtatctgttggctgttgttactgcaacctgtttggcatacacactaggctgattggttcctcccatggtgtaatgtttgtcgaaaaataacattgtacattccagtttgtggattattaaaagaattactcgataaaagcggacattggaggttataagctgcaaatcgagcaatgactgctagcagcctgccgtcactgagaatcaggtcgttcctatgtatcaaaacttatataaattagaga

SEQ ID NO: 92589 - DNA, 1770 bp, Zea Mays
cgtccgcgctgctggcacgccgcgtgtgcttggctcccgccccacgcccagtgcctccctccctctctgcccccctgccgcggcgcgtgcctggctggctggttgccctccgcttgggccttggagagcccgggcttcgatttctagctggttccgccactgccgagaagccgcgcgttgtcaggcacgggaaagaggtagtccgcgggaggttctctccggaggagaggtatggtgcccgcgagggctcgccatatcgatagatccgcctctgaccagcagcaagggcccgctccagcgggggcggcgacgctgctagtgcggcacctcccagaggctatcacgcaagagatgctatcccgcctcttctcccactacggagccacatccgtccgcccctgttccggtggaaagttgagaaattgcgcatttgtagattttagggacgaggcggcagctaatcacgcacattcgctcttgaacaggttgaggtttctgggaaaagtgttgactgtcgagcgagctaactgtccaaatgcaaatgagtctcacctgaagcatcaggaccaattagggcatggggcgtcccaggtaccaagtattagttcccaaactcagaaggaccacacatcgattgccgaaccaattgcccccaagcttagtgtggactacccatttcctccacaccttgagtatgcatatccaccaccagatggaaacatattaacaaatattgtcaatgccctgatcgccgtccctcgattctacaaccaggtcctgcatttaatgaacaagatgaaccttcctgctccatttcggatggcattgcctactccaccactaccatcgcaagttcctgttatccctcatcctcagccaccaccgggatctactacaactggggagcttcattcagcagatttgtctagtgatgagtctgagttagaatcatctgatgaagatattgataaacggaaaatcaagcgtgcaaagcatgaagcaattgttggtcctgcagttgacaaaaacgttgctcatgaagcagtgggggtgaaatctgttgcattggtttctaatgagcttcaagtgataaaaaagaaaaacccagtacttcagataaaaattacccctaagcctatacagaaggaaccacctgtcccaagtatgactgaaaatgaaccggattcaactcatgaacaacttcaagagaaacattttgtcacacctcaggaaatgtcgagagagaaattaccaccagaggagattttatcccttcctatgttcaagaattacactccaggaaatccagccagtgttctgtacattaagaacttggcaaaggatgtcactcatgacgacttctactatgtctttggaaggacggatgcgtggtcaagcctttgtcacatttcccacggttgaacttgctcagcgtgccctgaatctagcgcatggctatgtgttcaaaggaaaaccaatgatcatacaattcggaagaaatcctgctgctaacaaagcttcctaaagcaggatacaattttctttccagattttgatagatttcagaagttggtaggaactggaaagtgacaaaccagaggttgtgggtatctgttggctgttgttactgcaacctgtttggcatacacactaggctgattggttcctcccatggtgtaatgtttgtcgaaaaataacattgtacattccagtttgtggattattaaaagaattactcgataaaagcggacattggaggttataagctgc

SEQ ID NO: 92590 - DNA, 1888 bp, Zea Mays
cccgggccgggccgggccgggcggcccgtttggccatctctagatacgaccctgttctatataatgccgccccagcccctccctccgctcctccagtccaagcccccttgccttctttctcagctcacctctctctttcacgcacgcctctctctctctctctctctctctctctctctctctctctctctctctctctctctctctctctctctctctctccttatctgtcctgaggcagccatttcctcttccgatcgtggagaggcttggagtggaaggaggctgctggttttcggcacggcggagatgtctgaggtgtcggtgataaaccaggcggaggtggaggacgcgggcgccgggcagctgatggacctgccgccgggcttccgcttccaccccaccgacgaggagatcatctcgcactacctcacccacaaggccctcgaccaccgcttcgtctccggcgtcatcggcgaggtcgacctcaacaggatcgagccatgggacctgccaggcagggccaagatgggggagaaggagtggtacttcttctgccacaaggatcgcaagtacccgacgggcacgcggaccaaccgcgccacggagaccggctactggaaggccaccggcaaggacaaggagatcttcaggggccgcggcgtcctcgtgggcatgaagaagacgctcgtcttctaccgcggccgcgcgccgcgcggggagaagaccggatgggtcatgcacgagttccgcctcgagggcaggcttccccagccgctcccgcgctccgccaaggacgagtgggccgtgtgcaaggtgttcaacaaggagctgcaggcggcgaggagcgagccattattggcggcggccggcgcggcggagctcgagcgcgtgggctcgctgggcttcctcaacgagctcctcgactccgcggagctgccggccctcgtcggagccgacgtggacgaggtgatcgacttcaagggccccgcccccgcgtccgttccggacgcgagctacctcccggtcaagatggaggagcacgcgctgctgcagatgcagcagtgccagtaccagccgccgcccccgatgttctacccgagccagtacttctctcttccggcgatgaactccggccacctccccccggcgatccggaggtactgcaaggcggagcagcaggtggtctcggcgcagacggcgtcggtgatcagcccgtcccgcgagaccgggctcagcaccgaccccaacgcggcgggcggctacgcggagatctcgtcggcggcgaccccgtcgtcgtcgcaccagttcctgcccgagctcgacgacccggccctcaacctcgccgacctctggaagtactgaagcctgggcgacgatcgaccggtggctgggccgcccacccgccccggtcacgtggtctggttggttaatttgcttgatttgattgattatcttggtctcttgtgggatctggggttggtgaccggttcgctgatgcgtcctcgttcgtcacctccgccaggtccggcctctactgacctcgggtctgactagattattatccgtccagaccgccaggggattagggcttccttgttaattaattaatcctaggttcctttgtattggtctctgtacatagtactggtaccctactctgattgtgtcattagcagtagcatgattactgataggattaatgaaatgggggtagattaagggggcctgcatctgcgtcagcaatgcagtgcgtggggggttttacgggttgattagttaatttgggcgcttggtgagccagctagcgctagcttcatatgtacatgtactgccattaattgctgcttgagctcgacataccattatgtgaatttgatgcttcagt

SEQ ID NO: 92591 - DNA, 1121 bp, Zea Mays
cgctagcggctagtccgaccaggcgatccccccccaaaccctcccccaaaaccccagagcggagaagagcgcaagatgttcggcttcgggcaccacggccagaacccgccggctcacggcggcgtgcaccagcccaccttcaagatcttctgcaagtccgacgaggggtactgcctcaccgtccgcgacggcaacgtggtgctggcccccgccaacgcgccccgcttcggcggcggcggcgagcccaccgtccgcatctactgcaaggccgacgaggggttcagcgccacggtccgcaacggcgccgtgtgcctcgcgcccaccaacccgcgcgacgagtaccagcactggatcaaggacatgcgccacagcaacagcgtcaaggacgaggaagggtacccggccttcgcgctcgtcaacagggtcaccggcgaggccatcaagcactcccagggcgagggccacccggtcaagctggtgccctacaaccccggctaccaggacgagtcggtgctgtggacggagagccgcgacgtcggccacggcttccgctgcgtccgcatggtcaacaacatctacctcaacttcgacgccttccacggcgacaaggaccacggcggcgtgcgcgacggcaccaacatcgtgctctggaagtggtgcgagggcgacaaccagcgctggaagatcgtcccctggtaaatgtgctgttctgtggctgcactggtcatcaccatgatctggagctttgaaggcatagccacctgtggtcagcagctgctgccgtgttgctagaataaagttggtggcgatcgatcgatcgatctgtggtgattggtgtccctctctgtgtgtttgtgtttagttcccagtcgtttgtgaggaagtcagttatgtttgagtgagggggggggggggggggggtacttcgctcttcggtgaactctgtacttgtcatgaggagagttttcacacccggagtgtagaactctgtactgtactcggatccttcctttttcatccaagtgggttttattttatcaaccgtatatatactcgtggttttgctattacgttgcttgcttccagtcgttccagccaaagattaccacgcactctggtca

SEQ ID NO: 92592 - DNA, 1548 bp, Zea Mays
cccaaatcccctgtcccgctagcggctagtccgaccaggcgatccccccccaaaccctcccccaaaaccccagagcggagaagagcgcaagatgttcggcttcgggcaccacggccagaacccgccggctcacggcggcgtgcaccagcccaccttcaagatcttctgcaagtccgacgaggggtactgcctcaccgtccgcgacggcaacgtggtgctggcccccgccaacccgcgcgacgagcaccagcactggtacaaggacatgcgcttcagcacccaggtcaaggacgaggagggcaaccctgcgttcgccctggtcaacaaggccactgggctcgccatcaagcactccctcggccagtcccacccggtgaagctggtgccgttcaacccggagtaccaggacgagtcggtgctgtggacggagagcggcgacgtgggcaagggcttccgctgcatccgcatggtgaacaacatccgcctcaacttcgacgccttccacggcgacaagggccacggcggcgtgcacgacggcaccaccgtggtgctgtgggagtgggccaagggcgacaaccagagctggaagatcctgccctggggcgacgaagcctacgccgcgggaggcagcagcgccgccaacgcgccccgcttcggcggcggcggcgagcccaccgtccgcatctactgcaaggccgacgaggggttcagcgccacggtccgcaacggcgccgtgtgcctcgcgcccaccaacccgcgcgacgagtaccagcactggatcaaggacatgcgccacagcaacagcgtcaaggacgaggaagggtacccggccttcgcgctcgtcaacagggtcaccggcgaggccatcaagcactcccagggcgagggccacccggtcaagctggtgccctacaaccccggctaccaggacgagtcggtgctgtggacggagagccgcgacgtcggccacggcttccgctgcgtccgcatggtcaacaacatctacctcaacttcgacgccttccacggcgacaaggaccacggcggcgtgcgcgacggcaccaacatcgtgctctggaagtggtgcgagggcgacaaccagcgctggaagatcgtcccctggtaaatgtgctgttctgtggctgcactggtcatcaccatgatctggagctttgaaggcatagccacctgtggtcagcagctgctgccgtgttgctagaataaagttggtggcgatcgatcgatcgatctgtggtgattggtgtccctctctgtgtgtttgtgtttagttcccagtcgtttgtgaggaagtcagttatgtttgagtgagggggggggggggggggggtacttcgctcttcggtgaactctgtacttgtcatgaggagagttttcacacccggagtgtagaactctgtactgtactcggatccttcctttttcatccaagtgggttttattttatcaaccgtatatatactcgtggttttgctattacgttgcttgcttccagtcgttccagccaaagattaccacgcactctggtca

SEQ ID NO: 92593 - DNA, 1520 bp, Zea Mays
ccctccgtttctcctggctaaactacctctcgctccctccggctccgatccagggtgcgagctgagcttgggctagtttagtctccccaagctcgtggcgcagcagcagactcgttggtggaggtggattagtagccaaggctttgcagctaggtagggttttgtagctagttcctcgcaggctcagctctctcatactagctagcgtcggtcagtcgggcgagcaggccaatggtcatggcgaacccggacatgctgccgccggggttccgtttccacccgacggacgaggagctgatcctccactacctccgcaaccgcgccgccaacgcgccgtgcccggtcgccatcatcgccgacgtcgacatctacaagttcgatccatgggacctgccatccagggctgcgtacggggacaaggagtggtacttcttcagcccccgcgaccgcaagtacccgaacgggatccggccgaaccgcgcggcggggtccggctactggaaggccaccgggaccgacaagcccatccacagcagcaccaccgccggcgagagcgtcggcgtcaagaaggcgctcgtcttctacgagggccggccgcccaagggcaccaagaccaactggatcatgcacgagtaccgcctcgccgccgacgcgcaggcagcgcacgcctaccgccccatgaagttccgcaacgcctccatgaggctggacgactgggtgctgtgccggatctacaagaaggccagctgccaggtgccggcgatggcggcggtgccgcagctctccgaccacgaccaggacgagcactgcggcttcgacgataacccgtacgccgccatgctcctgcagggcgcgtcgtactcgtacccggcgccgccgcatgccgcggccggcgcgcagaggatgcccaggatcccgtccctcacggagctgttcaacgacccctcgctggcgcacttcttcgaggagggcggcggcatgcaggacatggcgcggctcagcaacccgcagcagcagcagcagcacgctcctctcctcggccgcgccgtcacgagccaacagctgctgctcaacaacggccacagcatgcccggcggggggcaggcgcagatggatcctcatccgcctgctgctgccgcctcgacgtcgtcggccgccgctggcaacaacaagcgcaagagatcgagcactactactgatgccggtgcgctgtcgtcgagccaggcgtctgaggccaagaaaccgaacgggtcctgtttcggcgcaacgttccaaataggcaacggactgcaggggtcctccctgggccaccaccacatgccgcttcactctaacatgggcacgatgaactgacagattattgctgttgttctccgctgaaagctatacttgagagcattcaattgtgatttgaaacatcgggatctattgcaccaaacacacacacacacatatatataggactgaagtatgctccatataaagcaagggttaatatatataatactagtacagtagat

SEQ ID NO: 92594 - DNA, 356 bp, Zea Mays
gaagaccctgagcagcagcagcttggtgaaggttgcctttggtgcaatctatgcacaggtaaagaagaaggcgtcgaggtggttctccaggagttccaggacttcgacgagttcgaggattaggctagcgacctcccccagtcagctgcctgtggtgggtttatttacattggctacgtttcgattctgtgtactttgattcatattatgtaaatgactctagtctttaatatcattatttattctttattgttattcaaagcattgtgctatgatgagtcatttatgtaatcgctgtgtacgtgaatttctgatcctggcacgtacatggttcgcattcggtttaccttccaaaa

SEQ ID NO: 92595 - DNA, 546 bp, Zea Mays
ggtaaaagcatctcgaccattgcccctagaccatactctataatcccaaagaggataacaaaaagtagaacagttcatgaggcattgttaaacagaagatggatatccgacattaaaggtggtcttactgttggagttttggcagattacttaaagctctgggactgtctctccgaaattgagttgcaccctctcattgaagacagacatatctttagtgtagccccagatggaaagattttctggtataatctgctcagaaagtttgggttggataactttgctccccaaccgggcctgacatcctttttggactggtgggagacatcttctgaaacagttcaaggaatggtcaagaaaggattgagttctctgatctccttggggggctggatgatctggaatcaccgcaatagatgtgtgtttgatggtcaaactcccagtctcccctctatccttcggcaggctgacgacgagagaagactttgggaattagcgggggccaagggtctctccttcttggcagctcctttgtctaatgactaa

SEQ ID NO: 92596 - DNA, 335 bp, Zea Mays
gaccagcagttgcaattataccagacaacagttgcaatcattgttttgtttaacaaattttttagacatagttatataaagttgcaatcacaccagaccagcagttgcaattaccagacagcagttgcaatcattgtttgttttaacagatttttggacatagttacatagaggttgcaatcacaccagaccagcagttgcaattacaccagacatcagttgcaatcattatttgtttaacagatttttggacatagttatatagaagttgcaatcacaccagatcagcagttgcaattacaccagacagcagttgcaatcattgtttgtttaac

SEQ ID NO: 92597 - DNA, 2159 bp, Zea Mays
gaaacaaagcgtcgtgccagcaggaaaaccaaggaccaagccaagccgccggccccatggccaagcacaaagcctcgcctccggccgcggtccgccgtcgcatcggcggcgccggggcgtccgccatccggtgggcgctgcgcgtcgcgaccagcatcgtagcctggacgctgctcctccacctcttcaccttcctcggcatcccccgcccgccgctgcccatcgcgcggccgtcctgcctgggcggccgcagcaactctaccgccgccgactccgtggtcgcggccggcgatgccgggcacctggcgctcccggctctgcctcccagacggctttacaagagtaatggctaccttctagtttcatgcaatggtggtctgaaccaaatgcgagcagcgatatgcgacatggtgactgtagcacgctacttgaacctcaccatggtgatacctgaacttgataagcaatccttctgggctgatcctagtgattttggggatatttttgatgtaaatcatttcatcgattcattgagaaatgaagtgaagattgtcaaagaactcccacagaagttcaaagaaaaggttcctctgtcaatgcaaccaatcagctggtctagtgagaaatactatttgaggcagatcttgcctctagtacgaaaacacaaggttgtacgttttagcaagacagattctcgccttgcaaacaatggcctgcctctgaagctccaaaaacttcgctgtcatgttaactacaacgcattgagatttgccccatctattgaggctctaggaaacaagatgatctcaactctcaggagaactggatcttttgttgtgcttcatctgagatatgagatggatatgcttgctttctctggttgtactcatggatgttctgatgaagaaacagaagagttgacaacaatgagatatgcatatccctggtggaaagaaaaggaaatagactctgagaagaaaaggcttgagggattgtgcccccttactcctgaagaaacaactttagtactcagagctcttggtttccccaaagacactcgaatatatattgcatccggtgaaatatatggtggtgaaaaaagattagccatattgaaaacagaatttcctaacattgtgcgaaaggagatactcttgtctgatgatgagttgcgaccctttcagaagcactcaactcaaatggcagcactggactatcttgtttctgtggcaagtgatatttttattcccagtaatgatggcaacatggctaaagttgtagaaggacaccgcaggtttacaggcttccacagaaccatacagttggataggaagaagctagttgaacttatagatcttttcgaagatcaggagctgtcctgggaagaattctctgttgctgtcaaggagctccacgggggccgaatgagccagcccaccgtaaggagaatcgtcccgggacaaccaaaggaagaggactacttttatgctaatcctcatgaatgccttgggcctgcaaaaaaacgaagggatagattaaaacatatggaaatttgaaagccgcgtgcttaatgcctagtaggctactacagatagaaggccaaagtgaaattggtaatgagatagcatttacatgcccttttgaataaccagattagttggctgcagcaatggtgaaacaaccttcagcatctgcatcctcatttgactgatctctgctcatggttttttccgagccacaccctcctagccctactctgcctggtgaagctgatctctgcctcgaattgaagatgattcttcgtgttgatgatcagcaaggagcatcaagagaagctttgccattcagaaacttgattgacagtattggttcctggattcggattttgctgattgtattttctttttatctctgctacctaggtatattgatggcatagtctgactgagctgtgagatgacatgccacattaatctgtagatgcaatgttctgttgtcgtcagttgcgtacttgcatataagagagatatggtgtatactttgtattgggtagttaaacctgatgtcgatgtcgaagacctcgttaaactttggaaaggaaagcagtgtaaatgcactgaaaagagtggcagccaagccttgctgccttgatattgcaa

SEQ ID NO: 92598 - DNA, 2278 bp, Zea Mays
cgcgtagccacttctccgaatcgagccaaattggctcatgcgccaccagctcctccctctccaccccgatcgcaatgccactacgtgatcaaccccaaaggtcgccgtgaccgtgccggagagatctcgcgctccgggcccgttaccgcgcagctgtgctgtcgcaggcccacccgttcacccactccgccacgctctcgataaggccgccgcacgcggccgcacgcaccgacaagctggagccgccgcagcaggaggcggtgaaaccatcgccgaccaacggtcgcatccgctaccgtacgccctcggcagccgatctgctccccgctgacgatgtcgcggcggatgccgcggcagccacagtggtggccgcgaggatgcgccgctactcgggcgccggagcacggcagcagcagcaaacggaggcggtggccgaccgcgtgcaccggtaccgtcgggtgctgatggtgttgctctcgccggtactcctcatctcgttcgtgctccttctcatgccgcgcgcgccggcctccgcctcagggggtgtgctcctcgccgttggtggtcggaggtggggaccccgggccgtcgaggacggactgaacaagtatgcggtcatatttgacgccggcagctctgggagccgcgtgcacgtgtattgcttcgacgaaaacctggatctagtgcccatagggaaggagattgagctgttcaaacagaaaaaaccaggcctgagtgctgcaaagggtccacaggaggctgctgaatcacttatttctcttttagaggaagctgagaaagtagttccagcagagttgcgtgaacaaacacctgtgagggttggggccactgcaggtctcagagcattagggactcaaaggtctgaagaaattttgcaagcggttagggaacttctccatgacagttctttcaaatctcagccaaattgggtcactgttctagatggatctcaggaaggcgcattccagtgggttaccatcaattatcttttgggaaaattgggaaagccatactcaaacacagttggagttgttgatttaggaggtggctcagtccaaatggcttatgctatctcagagaaggatgcagcaaaggcacctttagtagcagatggtgaagattcatatgtcaaggagctgctacttaagggaacaacatactatctttatgttcacagttatttgcattatggtttgctggcggctagaggggagatcttaaaagctggcgaaggcagtgattacagcgactgtatgttggaggggcatcttgggaaatacaattacggtggtaatacatttgaagcatcaggctcaccttctggtgctagttattccaagtgcagggctcttgcagttagagctcttaaagttgatgagccagcatgcacacacatgaaatgcacatttggtggtgtgtggaatggtggtggtggagatggacaaaagaatctttttgtggcatcctttttctttgatagggctgccgaggctggttttgtggacccaaaagcagcagttgctaaggttaaaccttcagactttgaagaaactgcacgccgggtttgtaaattgaacttgaaggatgcacatgcaacctaccctgatgtctcagaggagaacattccctacctttgcatagatcttgtctaccagtacacattacttgtcgatggatttggcgttgatccttatcaagacattaccttggtaaagaaagtgccttatggtgattcgtatgttgaagcagcatggccccttggtagtgccattgagatcgcatcttcatcatagaaacagcacggcagtaactttttgtttctttttttatataatatatatataaatcttccattactatagtttttggcttagtttactgatctgtagtagtgagcttagatcctgggtttgatgctaaggttttgccttgattcaccatttgttctcaattttccattctatttgtgtaggttcctacacattaacaacgtacacatggagtatagattgtagttctgtgcaagcattttcccctttccatccccagttatttagaattctttgtcattcatccttagtatgctctgtgggttcttcagtgtgatgccattctttttgtttccttcggccaacttcggattgctcaatgtaataaacgcatggttcttctttgttccctggacggttcatttgtagccttgtagatttaaagttgtttcctcttatcacaaatatttaggttctgtgtggcgcat

SEQ ID NO: 92599 - DNA, 889 bp, Zea Mays
aaagtcgcgtagccacttctccgaatcgagccaaattggctcatgcgccaccagctcctccctctccaccccgatcgcaatgccactacgtgatcaaccccaaaggtcgccgtgaccgtgccggagagatctcgcgctccgggcccgttaccgcgcagctgtgctgtcgcaggcccacccgttcacccactccgccacgctctcgataaggccgccgcacgcggccgcacgcaccgacaagctggagccgccgcagcaggaggcggtgaaaccatcgccgaccaacggtcgcatccgctaccgtacgccctcggcagccgatctgctccccgctgacgatgtcgcggcggatgccgcggcagccacagtggtggccgcgaggatgcgccgctactcgggcgccggagcacggcagcagcagcaaacggaggcggtggccgaccgcgtgcaccggtaccgtcgggtgctgatggtgttgctctcgccggtactcctcatctcgttcgtgctccttctcatgccgcgcgcgccggcctccgcctcagggggtgtgctcctcgccgttggtggtcggaggtggggaccccgggccgtcgaggacggactgaacaagtatgcggtcatatttgacgccggcagctctgggagccgcgtgcacgtgtattgcttcgacgaaaacctggatctagtgcccatagggaaggagattgagctgttcaaacaggtgaatggtttaggctttcctcttgtccatttagtttgagttgtacctgctgtggtgtggtgcgtttgttggctggatatgttcattttgtggtcggatgcagaggtatcctggagtggccatagcccataatgagattattgatgcatcctgtttggtcttcta

SEQ ID NO: 92600 - DNA, 2392 bp, Zea Mays
cagcaaccaagtacagcagacatccgtcctatcccactcctagtcccaccgccaccttccctcccaccgccaccattcgggccgccctctctcccagtcggccagtcccagcaaatcccacttcaccaggcctcagctccagctcgcctatcccggtatcccccctcaccagcgccgccggaagatcgcgctgcgcccgtcgtctcacgaggaggcatcgaccggcgcggtggcatttaggaggaggaaggggaggctgtaccttgttgacagggtcttagttaggcggggaggggcgagatgagcatgtacgggagggacccctggggcgggccgctggagatatgccacgactcggccacggacgacgaccgcagccggaacctggacatcgaccggggcgcgctgtcgcggacgctcgacgagacgcagcagagctggctgctggcggggcccggggacccgggccgcaagaagaagaagtacgtcgacatcggttgcctcgtcgtcagccgcaagctcttcgtctggacgctcggggtgctcctcgccgccgccgtattcgcgggggtcgtggccgggatcgccaaggccatccccaggcgccaccgcccgccgccgccgcccgacgactacaccgtcgcgctgcacaaggcgctcatgttcttcaatggccagagatccgggaagcttccgaagcacaacaatataccatggcgtggtaactcttgcatgaaggacggactttctgatcctgcagttcggcgaagcctggtcggcgggtactatgatgctggcgacgctgtcaaattcaatttcccagctgccttctccatgaccctcctcagctggagcgtcattgagtacagtgctaagtacgatgctgctggggaacttggccatgtccgtgacattatcaagtggggttcagattacttcttgaagacctttaattccacagccgatagcattgatcgtgtcgttgcacaggtgggaagtactgcaacatcgcccggttcaacgcagcccaatgatcgttattgttggatgaggccagaggacattgactacccacgtccagtggttgagtgccacgcttgttcagatcttgctgcagaaatggctgcagcattagctgcagcgtcgattgtattcaaggacaataaggcttactcacagaagcttgtacatggtgcaaccactcttttccagtttgcaagggaacgacgtgggaggtatagtgcaggtggctcagatgctgcaaaattctacaattcaaccagttactgggatgagtttgtgtggggtagttcatggatgtaccttgcaactggcaattcgtcatacttgactctagccacacaccctaaacttgcaaagcatgctggcgctttctggggtggaccagattatggtgtgttcagctgggataataagctcactggggcacaggttcttctaagccggttgaggcttttcttgagtcctggatatccatatgaagagaccttgagtacattccacaaccaaactagcattatcatgtgttcctaccttccaatatttaaatctttcaacagaacaagaggtggtttgattcagttaaatcatgggaagccacagccccttcagtatgtggtcaacgctgcattccttgcttctgtgttcagtgactatcttgaggctgcggatactcctgggtggtattgtggcccacatttctactctatcgaggttctccgcagttttgcaaggactcagatcgagtacatcttagggaaaaatccattgaagatgagctatgtggttgggttcggaaaccattaccccaagcatgttcaccaccggggcgcctcgatccctaagaacggtgttcactatggatgcaaaggagggtggaagtggagggacaccaagaagccaaaccccaatatcatagtaggggccatggttgctggccccgatcgccatgacgggttcaaagatgtccgcaagaattataactacactgaagcaacgctggcgggcaatgctggtctagtcgcagcgttggtagctttgtcgggtgaaggccatggggtggacaagaacaccatgttctctgcagtgccacccatgttcccttcgcctccgccgccaccagccccatggaaaccgtaatgcctgtgggtgtctgattcttctgtatactgcgtatttagattagtgctcctctcgctataactagttaactactaccatcactatcttgcatatttaacaagatgtagcatcgatttttcttgtttctttcattgttgtgtatttgccgtgcaatgtaaggattgattatgtttgtgtatgcatctctgttctttttagataatggagaaaaggttccggctttcctctc

SEQ ID NO: 92601 - DNA, 3711 bp, Zea Mays
gcacgccaaatgatgggcgatagtgtttgtttaatcccccacctaattgcctctcctctttagaacaaccgtcatcatcactaatctctgaatcggcaccgtcaccacgaacaaacactagcgcaggcgcagtacggtacgggcatgctcaggacttgccgtagaacgagggttatgccgcgtgcggatgactgctagctctttcttgctcaggcagcggtaggagtgggctgggcgtgcttggactagctagctagctagtgctccattccatcggagcctggcttcgctttcaagtcaagtcgacgccaccatttcccccggcccgtcctgtctattggctccgttgggtgcactgactgcacacctcatcatgaggcgcatcatggagttcggttgtggtgcaggtggttgctgttctgctgcgccccccacgagctttttgctgagtggcagtgtccgctgggctgggcgacctaaaaccgcacctcggggccgcgacctcggcatgcagggttccgcgcgcacggagcagccagcagctgggtgcagccggaggacgacgatggggttccttctcgccgtggccgtcctgctctccgcgtgcgcgcaacagtgctcgggcacgacagacagccaggacacttccgtgctccgggcgttgatggatcagtggcagaacgcgccgccgtcctggggccagtccgacgatccctgcggagagtcgccgtgggagggcgtgacgtgcggcggcgacaaagtgatctccataaaactttccaccatgggcatccaaggaagtctagctgctgacataggccagctcagtgacctgcaatccatggacctgtcattcaacaacgaactcggcggcgtgctcactccgaccatcgggaacctgaagcagctcaccaccttgattctgtccggttgcagtttccatggcaccatccccgatgagctaggaagcctgccaaagctgtcctacatggcactgaattcgaaccagttctctgggaaaataccagcttcgctgggaaacctctcgagcctctactggtttgacatcgccgacaatcagttgagcggtcccctgccggtctcgacagacggcggaatgggtctagacaagctcatcaaaaccagacactttcacttcaacaagaaccagttgtctggtccgatccccgacgctctcttcagcccggagatggccttgatccacttgctcttcgatggaaacagattcaccgggaatatcccggactctcttgggtttgttagtacactcgaagttgtacggctggacaggaattccctttctggccaagtacctttaaatctgaataacctcaccaaagtcattgaactcaacttggccaacaaccagctcaccggaacattgccagatctaactaggatggatcttctcaattacgtcgacctgagcaacaacacatttgatccttcaccatgcccggcgtggttttggaggctgccacagctctcagctttgatcatacagtctgggaggctctacggcaccgtgccgacaaggcttttcagcagcccgcagttgaatcaagtgatcctcgacggcaacgccttcaacggcaccctggacatgggcaggagcatcagcagcgagctgagcctggtgagcttcaaggacaacgagttcgcctccctcacggtgacctccagctacaacggcacacttgcgctggccgggaacccggtgtgcgagcgcctgcccaacacgccctactgcagcgcgacgcagcggccgctgtcggcgccctactcgacgagcctggtgaagtgctactcggggtcctgcccggcggggcagagcctgagcccgcagagctgcctgtgcgcgtacccgtaccagggcgtcatgtacttccgcgcgcccttcttccacgacgtggccaacgacacggcgttccaggagctggagagcatgctgtggaccaagctggccctcaccccgggctccgtctacctgcaggaccccttcttcaacagcgacgcctacatgcaggtgcaggtcaagctcttccccgccggcagcggcgcctacttcaaccgctccgaggtcatgcgcatcggcttcgacctcagcaaccagacgttcaagccgcccaaggagttcggcccctactacttcatcgcatcgccgtacccgttcccaggaagcgagcaatcgtcgaagagcaagggcgtcatcgtcggcatagcggtgggatgcggcgtcctgttcgttgcgctcgccggagcagccgcctacgctttcattcagaggcggcgggcggagaaggcgaaggaggagcttggcggtccttttgcgtcgtgggctcggagcgaagagcgtggcggcgcgccgcggctgaaaggggcgaggtggttctcctacgaggagctgaagaggagcaccaacaacttcgccgaggcgaacgagctcggctacggagggtacggcaaggtttacaggggcatgctgccgacggggcagttcatcgccatcaagagggcgcagcaggggtccatgcagggcgggcacgagttcaagacggagatcgagctgctctcgcgcgtgcaccacaagaacctcgtcggcctcctcggcttctgcttcgagcagggggagcagatgctcgtctacgagttcatgtcaggcggcacgctgcgcgacagcctcgccggcaagagcgggctacatctcgactggaagaagcggctccgggtggcgcttggcgcggcgcgcgggctggcctacctccacgagctcgccgacccgccaatcatccaccgggacgtcaagtccagcaacatcctcatggacgagcacctcacggccaaggtcgccgacttcggcctctccaagctagtgtccgacagcgagaggggccacgtcagcacgcaagtgaaaggaacactgggctatctggaccctgagtactacatgtcccagcagctgaccgagaagagcgacgtctacagcttcggcgtggtcatgctggagctgatcgtcgcgaagcagccgatcgagaagggcaagtacatcgtccgcgaggcgaagagggtgttcgacgccgacgacgccgagttctgcgggctcaaggacatggtagacgcaaggatcatgagcaccaataaccacctcgcggcgttcggcaagttcgtccagctggccctcaggtgcgtcgacgaggtggccacagcccggccgtccatgagcgaggtcgtcaaggagatcgagatgatgctgcagagcgaggggctcagcagcgcctccacgtctgcctcgacgtccgcgaccgagttcgacgttacgaagggggctcctcgccacccgtacaacgatcctcccctccctaaaaaggacaaggacgtgagcaccgactccttcgagtacagcggaggatattctttccaatcaaaggtcgaaccgaagtagctgatttctggattgaggctatcttcttcgttcggccttttcctttcccaacaattggcttgacgaaatgaagagagatatgggtaacctttttattgcattgagcttaatacttgtgggagactagtgaatttgtatggttaataggagacgcatcaagatcaaactcgtctgcctctaaagtgctgctaactgttgtttacggactagaggaataccaaccgtatcatagaacaaaggtggcaaca

SEQ ID NO: 92602 - DNA, 3440 bp, Zea Mays
gcacgccaaatgatgggcgatagtgtttgtttaatcccccacctaattgcctctcctctttagaacaaccgtcatcatcactaatctctgaatcggcaccgtcaccacgaacaaacactagcgcaggcgcagtacggtggttgctgttctgctgcgccccccacgagctttttgctgagtggcagtgtccgctgggctgggcgacctaaaaccgcacctcggggccgcgacctcggcatgcagggttccgcgcgcacggagcagccagcagctgggtgcagccggaggacgacgatggggttccttctcgccgtggccgtcctgctctccgcgtgcgcgcaacagtgctcgggcacgacagacagccaggacacttccgtgctccgggcgttgatggatcagtggcagaacgcgccgccgtcctggggccagtccgacgatccctgcggagagtcgccgtgggagggcgtgacgtgcggcggcgacaaagtgatctccataaaactttccaccatgggcatccaaggaagtctagctgctgacataggccagctcagtgacctgcaatccatggacctgtcattcaacaacgaactcggcggcgtgctcactccgaccatcgggaacctgaagcagctcaccaccttgattctgtccggttgcagtttccatggcaccatccccgatgagctaggaagcctgccaaagctgtcctacatggcactgaattcgaaccagttctctgggaaaataccagcttcgctgggaaacctctcgagcctctactggtttgacatcgccgacaatcagttgagcggtcccctgccggtctcgacagacggcggaatgggtctagacaagctcatcaaaaccagacactttcacttcaacaagaaccagttgtctggtccgatccccgacgctctcttcagcccggagatggccttgatccacttgctcttcgatggaaacagattcaccgggaatatcccggactctcttgggtttgttagtacactcgaagttgtacggctggacaggaattccctttctggccaagtacctttaaatctgaataacctcaccaaagtcattgaactcaacttggccaacaaccagctcaccggaacattgccagatctaactaggatggatcttctcaattacgtcgacctgagcaacaacacatttgatccttcaccatgcccggcgtggttttggaggctgccacagctctcagctttgatcatacagtctgggaggctctacggcaccgtgccgacaaggcttttcagcagcccgcagttgaatcaagtgatcctcgacggcaacgccttcaacggcaccctggacatgggcaggagcatcagcagcgagctgagcctggtgagcttcaaggacaacgagttcgcctccctcacggtgacctccagctacaacggcacacttgcgctggccgggaacccggtgtgcgagcgcctgcccaacacgccctactgcagcgcgacgcagcggccgctgtcggcgccctactcgacgagcctggtgaagtgctactcggggtcctgcccggcggggcagagcctgagcccgcagagctgcctgtgcgcgtacccgtaccagggcgtcatgtacttccgcgcgcccttcttccacgacgtggccaacgacacggcgttccaggagctggagagcatgctgtggaccaagctggccctcaccccgggctccgtctacctgcaggaccccttcttcaacagcgacgcctacatgcaggtgcaggtcaagctcttccccgccggcagcggcgcctacttcaaccgctccgaggtcatgcgcatcggcttcgacctcagcaaccagacgttcaagccgcccaaggagttcggcccctactacttcatcgcatcgccgtacccgttcccaggaagcgagcaatcgtcgaagagcaagggcgtcatcgtcggcatagcggtgggatgcggcgtcctgttcgttgcgctcgccggagcagccgcctacgctttcattcagaggcggcgggcggagaaggcgaaggaggagcttggcggtccttttgcgtcgtgggctcggagcgaagagcgtggcggcgcgccgcggctgaaaggggcgaggtggttctcctacgaggagctgaagaggagcaccaacaacttcgccgaggcgaacgagctcggctacggagggtacggcaaggtttacaggggcatgctgccgacggggcagttcatcgccatcaagagggcgcagcaggggtccatgcagggcgggcacgagttcaagacggagatcgagctgctctcgcgcgtgcaccacaagaacctcgtcggcctcctcggcttctgcttcgagcagggggagcagatgctcgtctacgagttcatgtcaggcggcacgctgcgcgacagcctcgccggcaagagcgggctacatctcgactggaagaagcggctccgggtggcgcttggcgcggcgcgcgggctggcctacctccacgagctcgccgacccgccaatcatccaccgggacgtcaagtccagcaacatcctcatggacgagcacctcacggccaaggtcgccgacttcggcctctccaagctagtgtccgacagcgagaggggccacgtcagcacgcaagtgaaaggaacactgggctatctggaccctgagtactacatgtcccagcagctgaccgagaagagcgacgtctacagcttcggcgtggtcatgctggagctgatcgtcgcgaagcagccgatcgagaagggcaagtacatcgtccgcgaggcgaagagggtgttcgacgccgacgacgccgagttctgcgggctcaaggacatggtagacgcaaggatcatgagcaccaataaccacctcgcggcgttcggcaagttcgtccagctggccctcaggtgcgtcgacgaggtggccacagcccggccgtccatgagcgaggtcgtcaaggagatcgagatgatgctgcagagcgaggggctcagcagcgcctccacgtctgcctcgacgtccgcgaccgagttcgacgttacgaagggggctcctcgccacccgtacaacgatcctcccctccctaaaaaggacaaggacgtgagcaccgactccttcgagtacagcggaggatattctttccaatcaaaggtcgaaccgaagtagctgatttctggattgaggctatcttcttcgttcggccttttcctttcccaacaattggcttgacgaaatgaagagagatatgggtaacctttttattgcattgagcttaatacttgtgggagactagtgaatttgtatggttaataggagacgcatcaagatcaaactcgtctgcctctaaagtgctgctaactgttgtttacggactagaggaataccaaccgtatcatagaacaaaggtggcaaca

SEQ ID NO: 92603 - DNA, 581 bp, Zea Mays
tgttgtttgtgcgagatctgtgaatccgagatactcagcttggacttcaggacgagtccgccgccttgcactttgggattgaggtgagaggaatcaaggactcagtttcacggagggagacaaccccttcgccgcatggagaagcttacgaaggcaaggcaacaactcagcggatgtcgctgcacagcaagcggacgcctgtgatggagcagtatatagcagaggccggagcaggcgtccccagcgtccccaagcgcgtttctcgccccaccccgacagaggccgctcacccgtggtgcagatctcgcccttcaccttctctgccttcggcatcaccgtctccatcggcgtctccgtcctctccatctaccagtattatcataacatggttgtctacttgtgtattacaaccacaataattaaccatatgggttgataatgagctatgcttttttgaaacgatataatgagatattcttatcagggactcttggagccaggcatttgccatactgagagtttcgaatttgccaaaaaggtttaatttggtacagataacccaattgctcccgttgagttaa

SEQ ID NO: 92604 - DNA, 1438 bp, Zea Mays
acgcatgccaggcagtgcattcttcttccccgcgcgcagaggctccctgcagccatctccctctctccttccacctcccagccgactccagccccttggtcatgcactccctctcccaggtacgacctcaagcggttgacgcccaggctggagaccgagctcgcctctgccctggctgcattggtggccgaagttctcgtcgttggtggagatatcggccagtcctgcaagggctcctcccatggccgcctcccaggcgcacctcgccagcagcagggagtctccaagtgcaggcgagcagcagctcctcctctcctccatgggcgcgcaaccccttacccttggcttcacctccctcggcggcgcccttcttccccaagcaaggagcagcgcctcccatggccaggagctcgacgctggccttcttcctgtgtcccatgccgtaggagcagcagctcgtcctcagcagcgcgccgcgactctctctgctcatgcgcgggatttgccgagcaggaggtccccatggccggcgcgcgcccctgccgcatttccccctgcgagctcggtcttccccctcggcagccccacctggccgccattttccccaagtgctggcgcatgggaactctgtcccctttgtccagaaaacgcagagctcgagcacaactctctgctcccttccatgtccgtccgtggctcctctccttgagcaccttctcttctgctccagccactgctcctcaatgccggcacccattcaagctccgggcgctgtctgccgggaccgcgcgcgagcgcaagctcagggcgcccccgcgattccccagctcgccagcgcgccttcctcttctccatggcgtgccctgcgcaccgttgccgacatgctctacctcgctgtccgccccatctgaatccgagcagcagctcgtgcatcagttcccccatacgtagccatggtggtgctctacttaccatgctaaccacaacagcaagccccaagccactctcctcttcgctcggtctgctcgacgaaatgcccctcagtgcacgctgctgcccccatgtcgtgtcacctgcgcgagtgttcgtcgagagcagccgtgtcatcgatccatgcagccacgacgtctgcgcgtctcgcttcgccggatttgcgcagcgcttgcgtatcgtcaaaatccttgctagatgatgccgcggcgcctcgcgcgacgcatggttcggtgaagcgcctaaaccgtgaacggcatgcgtgactcgaatccaagtttgacaggttgacggatttacaatttactattaatatgattcagttgatggcatgcatatgatatggtgtatattggtgttgaacatgtgtgactgcgatggttcatttacgtgtcgcgagggtagtttgcggaactattaattgtttgttaaaataattcgtcgtaaa

SEQ ID NO: 92605 - DNA, 2809 bp, Zea Mays
gccttcccctccgtctccaatctcccctccaccgttcgacgctctccccttgcttctcgcgcacactaaccaattcgagcacccgacgccgcggccccgatcgaatccaccggagccgcccgcctggggcccgcccgcgccattgctcgaatcgggaggcattcgtccgcccgcgctgctgccccgcgccgtggcggtggcgttggcggtatgtacgaccgctagaaggagaggaggaggcggcattagtggtggggattaggcggcggcactgctggtgccgggaggaggaggaggcgtagcccatgaaggcgacggcgccgccggcgaagcggcggaggggcccgcggctggcggtgctggcgctcgtgttctgttcgctgctcgtgccgatcgccttcctcttcaaccgcttccccgccgtatatgtgacagatgagcgccctcagcaggagattgacttgccttcgttcgatcgtgtggtatttgaaaatggtggctctgtaaatgaagatgtgtccaagaagacttccaggagcactagtgtgtcgcaccgtggtattgatagtgacccttccatagttagcactaaaccaaaagctatagttctacggcctccaaaaattgaacaggtcctcccccctccaaaagttgaacccaatccagaagtgaagccagtacttgtaccagttccagttcatcaaaacaaaaaaattaaccttgacaagattaggcctcccagagttcaaagtgctgatgaggtggaaaaggctaaggcttgtcaacttgagtttgggagttactgtctctggtctatagagcacaaagaagttatgatagataccattgtgaaaaggctgaaagatcagctatttgtagcccgatcttactaccctagcattgcaaaacttaaaggaaaggagacattgactcgcgagctgaagcaaaatattcaagaacacgagagggtacttagtgaatccattgttgatgctgatctaccatcctttataaaaacgaagctagagaggatggaccaatcaatagcaagagccaaatcatgcactgtggattgtaacaatgttgacagaaagcttcgtcaaattcttcatatgacagaggatgaagctcattttcatatgaagcagagtgcatacctatacaaccttggtgttcacaccatgcctaaaagtcatcattgtcttaatatgaggttgacagtagagtactttaaatccatgccattggatccaaatgactcttctgcccataagtttaaccttccagacaataggcactatgttatattatctaaaaatgtccttgctgcttctgttgtcatcaactcaactgttagtagctctgaggatactgaaaatgtagtatttcatgtactgactgactctcaaaatttttatgccatgaagcactggtttgcaagaaactcctacagggaatcagctgtcaatgtcataaattatgaacaaattatttttgagaatttccctgagtttggaacccagcagttatatttgcctgaggaatttcgtgttctcatcagtagccttgagaggcctactgagaagagtagaatggaatatttgtcagtgttcagtcactcacatttctttcttgccgaaatattcaaagatttaaagaaggtaattgtgttggatgatgatgtggttgttcaacgtgatatttctttcttgtggaatcttgatatgggagagaaggtcaatggtgctatcagtttttgtggtttgaaacttggtcaactgaggaaccttttgggtaggacaatgtatgatcaacagtcatgtgcatggatgtctggggttaatgtgattgatttggacaaatggagagaacataatgttacagagaattacctgcaactcctgagaaagtttgggaacaatgatgacgaggcctcactacgagcttcagctttgcctataagtttgttgtcgttccagcatcttctatatccacttgatgagagattgattttatctggacttggatatgactatggaattaaagaagaacttgttcagaattctgcatcgttgcattataatggaaatatgaaaccttggcttgagttgggtataccagattataggaagtactggaagaggtttcttacacgagacgagagattcatggacgagtgcaatgtaagtccatagtgtgcttgagcttgggagccgaatcatttttgacagtagatttcagtctactgctgtactatatactaagaggaccaacacttgagaaaaacctgggaactgggaagcagtcactagccatcaattttgacagagtagatccagcaccatctgttcattgaacttgtgagctcgatggatgggtttttctgcagttagcggggtttagttaagttcgaaggataatgcagtagacaacgttggtcacgtgtggtggtgaggttccaagtaagagagagcatcacactcacgtaacaggaatgatcattgatggattgaggcgccttaattgaaattggtgccttccacctcatggatgcaggttaattcttttcttcgttgattttttgacccctcttgctttgtccttctgtcaataaggacatacacaggttaaaattcaaattctttgctcttagttgttgcacattgattgtcctatcactattatgttaatgcaaagtatattatgatgtcagagactcatctgttacaaaaacgagattaacaactattctatttggatgccttctgagcactcaaattatctcatgaaacagcaagtttgtatcgtg

SEQ ID NO: 92606 - DNA, 2761 bp, Zea Mays
gccttcccctccgtctccaatctcccctccaccgttcgacgctctccccttgcttctcgcgcacactaaccaattcgagcacccgacgccgcggccccgatcgaatccaccggagccgcccgcctggggcccgcccgcgccattgctcgaatcgggaggcattcgtccgcccgcgctgctgccccgcgccgtggcggtggcgttggcggtatgtacgaccgctagaaggagaggaggaggcggcattagtggtggggattaggcggcggcactgctggtgccgggaggaggaggaggcgtagcccatgaaggcgacggcgccgccggcgaagcggcggaggggcccgcggctggcggtgctggcgctcgtgttctgttcgctgctcgtgccgatcgccttcctcttcaaccgcttccccgccgtatatgtgacagatgagcgccctcagcaggagattgacttgccttcgttcgatcgtgtggtatttgaaaatggtggctctgtaaatgaagatgtgtccaagaagacttccaggagcactagtgtgtcgcaccgtgttctacggcctccaaaaattgaacaggtcctcccccctccaaaagttgaacccaatccagaagtgaagccagtacttgtaccagttccagttcatcaaaacaaaaaaattaaccttgacaagattaggcctcccagagttcaaagtgctgatgaggtggaaaaggctaaggcttgtcaacttgagtttgggagttactgtctctggtctatagagcacaaagaagttatgatagataccattgtgaaaaggctgaaagatcagctatttgtagcccgatcttactaccctagcattgcaaaacttaaaggaaaggagacattgactcgcgagctgaagcaaaatattcaagaacacgagagggtacttagtgaatccattgttgatgctgatctaccatcctttataaaaacgaagctagagaggatggaccaatcaatagcaagagccaaatcatgcactgtggattgtaacaatgttgacagaaagcttcgtcaaattcttcatatgacagaggatgaagctcattttcatatgaagcagagtgcatacctatacaaccttggtgttcacaccatgcctaaaagtcatcattgtcttaatatgaggttgacagtagagtactttaaatccatgccattggatccaaatgactcttctgcccataagtttaaccttccagacaataggcactatgttatattatctaaaaatgtccttgctgcttctgttgtcatcaactcaactgttagtagctctgaggatactgaaaatgtagtatttcatgtactgactgactctcaaaatttttatgccatgaagcactggtttgcaagaaactcctacagggaatcagctgtcaatgtcataaattatgaacaaattatttttgagaatttccctgagtttggaacccagcagttatatttgcctgaggaatttcgtgttctcatcagtagccttgagaggcctactgagaagagtagaatggaatatttgtcagtgttcagtcactcacatttctttcttgccgaaatattcaaagatttaaagaaggtaattgtgttggatgatgatgtggttgttcaacgtgatatttctttcttgtggaatcttgatatgggagagaaggtcaatggtgctatcagtttttgtggtttgaaacttggtcaactgaggaaccttttgggtaggacaatgtatgatcaacagtcatgtgcatggatgtctggggttaatgtgattgatttggacaaatggagagaacataatgttacagagaattacctgcaactcctgagaaagtttgggaacaatgatgacgaggcctcactacgagcttcagctttgcctataagtttgttgtcgttccagcatcttctatatccacttgatgagagattgattttatctggacttggatatgactatggaattaaagaagaacttgttcagaattctgcatcgttgcattataatggaaatatgaaaccttggcttgagttgggtataccagattataggaagtactggaagaggtttcttacacgagacgagagattcatggacgagtgcaatgtaagtccatagtgtgcttgagcttgggagccgaatcatttttgacagtagatttcagtctactgctgtactatatactaagaggaccaacacttgagaaaaacctgggaactgggaagcagtcactagccatcaattttgacagagtagatccagcaccatctgttcattgaacttgtgagctcgatggatgggtttttctgcagttagcggggtttagttaagttcgaaggataatgcagtagacaacgttggtcacgtgtggtggtgaggttccaagtaagagagagcatcacactcacgtaacaggaatgatcattgatggattgaggcgccttaattgaaattggtgccttccacctcatggatgcaggttaattcttttcttcgttgattttttgacccctcttgctttgtccttctgtcaataaggacatacacaggttaaaattcaaattctttgctcttagttgttgcacattgattgtcctatcactattatgttaatgcaaagtatattatgatgtcagagactcatctgttacaaaaacgagattaacaactattctatttggatgccttctgagcactcaaattatctcatgaaacagcaagtttgtatcgtg

SEQ ID NO: 92607 - DNA, 75 bp, Zea Mays
cccgtgaacaatgtgcattcacttgacatacagaatttggaagcttgttggaagaatagaaaacaatgtttttgt

SEQ ID NO: 92608 - DNA, 98 bp, Zea Mays
agcactatacaagtatacaaccatggtaacttaaaggtgcatgtatgtatatcaccatgttctcattcttgctttttcccaaaaaggttctaggcagg

SEQ ID NO: 92609 - DNA, 993 bp, Zea Mays
aatcatccgccctcgtatcctcacgcccacaaaacacccgaagaaaagaagagactgaacgccgcgagttcacgccacgatggaaaacgccgcccccgccattgctaagccgtcgctgtccaagaagccctcgccgtcgttccgcctccggaacggcagcctcaacgcactgcgcctgcgccgcgtgttcgacctcttcgaccgcaacggcgacggcgagatcaccctcgacgagatggcctcggcgctcgacgcgctcggcctcggcgccgaccgctccggcctggaggccgcggttggcgggtacatcccggccggcgccgcggggctccgcttcgacgacttcgagtccctccaccgcgcgctcggggacgcgctgttcggccccatgccggtggctgtgaccgaggatgacgacgacgagggggacatgaaggaggcgttccgggtgttcgatgaggacggcgacggcttcatctcggccgccgagctgcaggccgtgctcaagaagctcggcctgcccgaggctcggaacctggccactgtgcaggagatgatctgcaacgtcgaccgcaactgcgacggccgcgtcgacttcggcgagttcaagaacatgatgcaggggatcaccgtgtggggcgcttagctgccgcgcacctgcgttgtcacaccccctctactgcgtggtgtcatgttctggagcatataaagactagaggaggggcgatcacaaatcagtaactggtaccaggtttaaaaagtagggatgattcgtgacttcagtgttctaactttggtggttctgcccccctagtgtagatattgttctactgtacgtagtgtctcccttgctctattaagctttctgatcatgagacatccagtttatctataaacaaaattgttatgaacatgctcgatttctactatgatgtaatttgccatctttcttggcacgagcttcatataatatccagtgttcctagtggtttc

SEQ ID NO: 92610 - DNA, 1852 bp, Zea Mays
cctaattttcatgagcttatggttgatagaaattacaaagattcttgttgcgattatttactctagaaatatactgattttaaattctaatttaacttatattaaaaatatctgaaaagagaaaaaaatgttatttttaatctttcgtattggtcatttcctttttatttttatatttttttaatatagtataaattataacttaaaattcaatatattagagagtaaataataaaatatacctatcgttttaaagatttttaatagtttgattgtactacgattgtagtttttgccgatttatactacgtgtagaagtgtacggttttttatgaagtaaagttgtgctaccaaaacggaaaaaaatttggtgcagcactgctgcaaaccagagtgtttgcagcccctcacaaaaaggagaataaaccctacccgcagcaacaataatacaactaaaacgttatctgctagacctgcaggtggggtctatcctcctttttatgaggggctgcaccaaatttttttccaccaaaacggcaagaggcgtgggccctgcccccaaacaaataagagacagtcagacagagaccccgccgcgttttctctagctctataaaatctcaccgatagccagccacactcaacgaactccagaaatcatccgccctcgtatcctcacgcccacaaaacacccgaagaaaagaagagactgaacgccgcgagttcacgccacgatggaaaacgccgcccccgccattgctaagccgtcgctgtccaagaagccctcgccgtcgttccgcctccggaacggcagcctcaacgcactgcgcctgcgccgcgtgttcgacctcttcgaccgcaacggcgacggcgagatcaccctcgacgagatggcctcggcgctcgacgcgctcggcctcggcgccgaccgctccggcctggaggccgcggttggcgggtacatcccggccggcgccgcggggctccgcttcgacgacttcgagtccctccaccgcgcgctcggggacgcgctgttcggccccatgccggtggctgtgaccgaggatgacgacgacgagggggacatgaaggaggcgttccgggtgttcgatgaggacggcgacggcttcatctcggccgccgagctgcaggccgtgctcaagaagctcggcctgcccgaggctcggaacctggccactgtgcaggagatgatctgcaacgtcgaccgcaactgcgacggccgcgtcgacttcggcgagttcaagaacatgatgcaggggatcaccgtgtggggcgcttagctgccgcgcacctgcgttgtcacaccccctctactgcgtggtgtcatgtatgtatccaggcaccgtaggatgcgcttttctacccggcgcttcttcctcctcttgatggcgcagtggattcttcctgttcttggctttgctatctgactctgcttgtagtcttgagaatctggcggcacacagacatagttttctttagtttcttgtgtttgatttactccgtgtttaattgcacagtttatttacatgtaagaacgttgaccttgaccagcttccctacaagtttatctttccttctttcttggtgtcttgggtcacgtatgcggtatgcgtctcccaaatcccaatcaagtcagtttacgtattcagtatttcagttgcgccagttggaaaaggttctttttagaaaacaaggagttctgccatttgaaatgtgcttcctttttttacataccttgccccttctcgttattctattcatcagtgttcatgtaaatcaattagcaaaaaaagcaaagtttggttactaaatactgagcaagtctatgatt

SEQ ID NO: 92611 - DNA, 2092 bp, Zea Mays
gccaagcttctttactcgggagccttttatgtcaaagttggcaaccttccccgagtggccgagttcctcactcagctggggacaccacccggccaccctcacctctcaatatacataccaccaccaccttcatcaacccctgggcctggcactcatagctcgttcgtagcaagagagagagagagaagagtgggaagtctcacgccatcagggagaggggagcgaggatcacatctctcgtagcgcgcgcgaagctatataataatggaggtggccatggccgtgaaggtgctgctgagcctgtgctgcgtgggggcgtgcggcctcgccgtgtacctctaccacatcctctggctcgtgccgcagaaggtcctcgccaagttcgaggaccagaagatcggcgggccgcggccgtcgttcccgtacggcaacctcgccgacatgagggaggcggccgccgctgcgaaggctgcgcgcgcgtcggcacgcagtagcggcagcggcggcggcggtggcggcggcatcgtgcacgactaccgcccggcggtgctgccctactacgagaaatggaggaaagagtacggtcccatattcacttactccatggggaacgtcgtattccttcacgtgagccggcccgacgtggtccgggacatcaacctctgcgtgtcgctggacctcggcaagagctcctacctcaaggcaacgcacgagcccctcttcggcgggggcatcctcaagtccaacggcgaggcctggctgcaccagaggaaaatcatcgccccggagttcttcctggacaaggtcaagggcatggtggatctgatggtcgattctgcacagccactgcttatgtcatgggaagagagagttgatagaaatggtgggatcacagacattaagatcgacgatgacatcagggcttactctgcagatgtgatctctagaacgtgctttggaagcagctacatcaaaggaaaggaaatctttatgaagatcagagaactccagcaggctgtgtccaagccaaatgtgctagctgaaatgactggcctaaggttctttccttcaatgaggaacaagcaggcctgggagcttcacaaacaagtccgcaaactaattcttgaaatcgtaaaggaaagtggagaagacaggaacttactgagtgcaattcttcacagcgcaagcaccagtagggtgggcattgccgaggcagagaactttatagtggataactgcaagagcatatattttgcaggacatgagagcacagctgttacagctgcgtggtgtctaatgctccttggactgcacccagaatggcagaatcgagtacgagaagaggtgcatgaagtctgcagaggccagccagtagactcacggtcacttcagaagatgaaaaatttgacaatggtgatccaggaaaccttgaggttgtacccagcaggtgcctttgtttcaaggcaggccctccaggaactgaagctcggtggcgtacatataccaaaaggtgtcaacatctacatccctgtctccacaatgcatcttgacccagagctatgggggcctgatgtgaaagagttcaacccagagcgcttctctgatgttcgaccccagctacattcatacttgccatttggtgctggggcccgaacctgcctagggcagggatttgctatggctgagctcaagatcctcatctctctcatcgtctccaagtttgttttgaagctctcaccacactaccagcattctccaacactgaaactcattgtggagccagaacttggtgtagacctcaccttaacgaaagtgcaaagtgtctgtactaagaggggcactgcaatttagtcatacaatgtcatggaatgaaacctgtgctatggtgaatgcagcttcccctgcggagaggggacaatttgtacagagacagctcatactatctacgcatgatcttttcaatgtgcatgattatagtaagaaatggtgccaaatgatccaatcatttataccaacattgtatgggaaaactatacagctattaaatttagtaatgaaacgaaatatattggaacattattaaggtgttcaa

SEQ ID NO: 92612 - DNA, 1522 bp, Zea Mays
tgatttttgggtgtctactatgtcaagaaggcaaagtagttatttcttttgtgtgtgtctgtttgcttcctgcaatgcatagagctgtcatgacaaaaatcatgatgcaatacaagcagaatatgcttcctgaaagataaagtaatcacaaagttgaggcagataaaatggttgagcaaaccaatcaatctgaagttagctttgtgaaggctgagcatctaaatggaggtaaaattcggcagacacgcattgaggattactcctatgacaaggatgttgtagagatcaaactgccagacacagatctttcttctgattacggtgtccattttgtcaaggatgtctgcattgatgaaggagttcttcctgatcaaaagatttcatcagaaaagcaagtagaccaaaaagtgtctataaactttgattccagggaagagataagtgctgactctacaaaaactgcacatgagttgaaatcggaaatagttgtcctacctgtcaagtgtgatactcatgacaatattgtggaacagaactcctcatgcaaaaagcgtgatcttgaagataacaatactacagatgtatctaccgagtctaatgatgagggattaaatcccaaacaattaccatttcatgaagttgcacaagattaccagaaggttgatagtgtcatttcggagagcaatgaaaatcaggactggcttttcactggagatgcaacccatcagggacttgagaaatatgttatgacaaagttgtttaatcgagtattcgcatcagtcctagaagatgtgaagagtgatgaagaacttttttagaattaacttgtacgagaatgaaacatcctgtctggtatgagaattaacttccctcgtttttggcattttttgcttgatgtattgcatctctggcaagctgcacacatgaataggtttctggcagaaactgaaccaggattgaattgtacttgtgtcttgcgttgggttggtcttttggatctttctatgtattatgtctatactttgtagactactggccagccactccattcacgtattactcttccattgtgagtttttgctcttcactttcttatcactcacagtcactcagcttctcacatttccacacaagtagtagttaaggacacatttagtttcgaaggacagtgaactttgtatgattcattgtgaatctgctgatcttcaaattggacaacaaatgtatactccttcctattagaggtggtattgtgacaggagatgtcctcagcgtcccattccacagcgtctacggacttctggaggaggctcgccatagtagcagttctcttcctcccaatggattggttaatttggagctggtcacaaccaacaggctacaataatacgatgggcggatccaacaatgtaatggtgtaatgggcttggtcatatgcttggaggttaagaaattgacttgctggaccaatgtaaccgtatggctgatataattaatttcgtaaaccttctggatgaataaa

SEQ ID NO: 92613 - DNA, 1979 bp, Zea Mays
atgggcgtccacaatcgcgtggtgcacgttctgccgctctgctcacgcccgcggccgaacctcccccgcatcccgcagccgccgacgctcaccttccatcctccgcgcagccactcatcccgcagccgcgatccccgcggcgctcaccttccatcccgcagcgcgcaccttcatcctccgccttccatcctccgcacagccactcatcccgcagccgcgatccccgcggcgctcaccttccatcccgcggcgcgcaccttcatcctccgcgaccgctcgcggatctctcatcgacgtcgatgctccgcgattaaggggatccgaggccaacaaacagcatggcgctccccgcggcgggcgggcgaggaggcatgcgcggatactcggcaggatgctccggcggaagcggagccacctccccgtcggccgcccgtgttctacagctccgtgttcgcgcagatcgaagagatcgggtggaagcaactggtgagcgccacaggagagggagtgtcctgtactcctgtctcaccttccgtgtcgtattctggctatgcgccatcctaggaaactcgtattagcaggctgtttaactgcactaagagtcatgacagctgtatcgacttctctaggttgggttgcaccaaatctgagctgtcatgacaaaaatcatgatgcaatacaagcagaatatgcttcctgaaagataaagtaatcacaaagttgaggcagataaaatggttgagcaaaccaatcaatctgaagttagctttgtgaaggctgagcatctaaatggaggatgtctgcattgatgaaggagttcttcctgatcaaaagatttcatcagaaaagcaagtagaccaaaaagtgtctataaactttgattccagggaagagataagtgctgactctacaaaaactgcacatgagttgaaatcggaaatagttgtcctacctgtcaagtgtgatactcatgacaatattgtggaacagaactcctcatgcaaaaagcgtgatcttgaagataacaatactacagatgtatctaccgagtctaatgatgagggattaaatcccaaacaattaccatttcatgaagttgcacaagattaccagaaggttgatagtgtcatttcggagagcaatgaaaatcaggactggcttttcactggagatgcaacccatcagggacttgagaaatatgttatgacaaagttgtttaatcgagtattcgcatcagtcctagaagatgtgaagagtgatgaagaacttttttagaattaacttgtacgagaatgaaacatcctgtctggtatgagaattaacttccctcgtttttggcattttttgcttgatgtattgcatctctggcaagctgcacacatgaataggtttctggcagaaactgaaccaggattgaattgtacttgtgtcttgcgttgggttggtcttttggatctttctatgtattatgtctatactttgtagactactggccagccactccattcacgtattactcttccattgtgagtttttgctcttcactttcttatcactcacagtcactcagcttctcacatttccacacaagtagtagttaaggacacatttagtttcgaaggacagtgaactttgtatgattcattgtgaatctgctgatcttcaaattggacaacaaatgtatactccttcctattagaggtggtattgtgacaggagatgtcctcagcgtcccattccacagcgtctacggacttctggaggaggctcgccatagtagcagttctcttcctcccaatggattggttaatttggagctggtcacaaccaacaggctacaataatacgatgggcggatccaacaatgtaatggtgtaatgggcttggtcatatgcttggaggttaagaaattgacttgctggaccaatgtaaccgtatggctgatataattaatttcgtaaaccttctggatgaataaa

SEQ ID NO: 92614 - DNA, 2192 bp, Zea Mays
atgggcgtccacaatcgcgtggtgcacgttctgccgctctgctcacgcccgcggccgaacctcccccgcatcccgcagccgccgacgctcaccttccatcctccgcgcagccactcatcccgcagccgcgatccccgcggcgctcaccttccatcccgcagcgcgcaccttcatcctccgccttccatcctccgcacagccactcatcccgcagccgcgatccccgcggcgctcaccttccatcccgcggcgcgcaccttcatcctccgcgaccgctcgcggatctctcatcgacgtcgatgctccgcgattaaggggatccgaggccaacaaacagcatggcgctccccgcggcgggcgggcgaggaggcatgcgcggatactcggcaggatgctccggcggaagcggagccacctccccgtcggccgcccgtgttctacagctccgtgttcgcgcaggtacgccagccgctcgacgaaatgctgtggttgcgctgacatatgctgcaaggaaatcttttttttgcccatatgtggggttggtggcatggcgtttttctatttggacttttgcgcgtgcagatcgaagagatcgggtggaagcaactggtgagcgccacaggagagggagtgtcctgtactcctgtctcaccttccgtgtcgtgtaaggattcatgttgctgccagtcggcactaacctctttctatatgtttatattgtacgaatgtttggagaaaaaaactactgccgttcaggtggttgagcaacgctggcgcattacatactaaattttgtcagtttgatagttgtttgaaaaggttatttcagaaacctgtctttgtccgaatgcaagagagagaacagacagagcgaatcttccattgatcatcagcacacgacatgaatttttttcttatcaatttccaccaatctttgtagggtaaaaacatctctggagatgctctaacatcccattctgtctctctgctattgtctttaagcgccaaaacttattgttcatttgatctcttttcatgtacacaaactcagcacggagctcaagctttgtttttttactactactactactatcctgtactacagtagtatgaagtatcgtatcatactcatgctctgtatttatatttgctagattctggctatgcgccatcctaggaaactcgtattagcaggctgtttaactgcactaagattattaattttaggtcatgacagctgtatcgacttctctaggttgggttgcaccaaatctgagctgtcatgacaaaaatcatgatgcaatacaagcagaatatgcttcctgaaagataaagtaatcacaaagttgaggcagataaaatggttgagcaaaccaatcaatctgaagttagctttgtgaaggctgagcatctaaatggaggtaaaattcggcagacacgcattgaggattactcctatgacaaggatgttgtagagatcaaactgccagacacagatctttcttctgattacggtgtccattttgtcaaggatgtctgcattgatgaaggagttcttcctgatcaaaagatttcatcagaaaagcaagtagaccaaaaagtgtctataaactttgattccagggaagagataagtgctgactctacaaaaactgcacatgagttgaaatcggaaatagttgtcctacctgtcaagtgtgatactcatgacaatattgtggaacagaactcctcatgcaaaaagcgtgatcttgaagataacaatactacagatgtatctaccgagtctaatgatgagggattaaatcccaaacaattaccatttcatgaagttgcacaagattaccagaaggttgatagtgtcatttcggagagcaatgaaaatcaggactggcttttcactggagatgcaacccatcagggacttgagaaatatgttatgacaaagttgtttaatcgagtattcgcatcagtcctagaagatgtgaagagtgatgaagaacttttttagaattaacttgtacgagaatgaaacatcctgtctggtatgagaattaacttccctcgtttttggcattttttgcttgatgtattgcatctctggcaagctgcacacatgaataggtttctggcagaaactgaaccaggattgaattgtacttgtgtcttgcgttgggttggtcttttggatc

SEQ ID NO: 92615 - DNA, 1285 bp, Zea Mays
atgggcgtccacaatcgcgtggtgcacgttctgccgctctgctcacgcccgcggccgaacctcccccgcatcccgcagccgccgacgctcaccttccatcctccgcgcagccactcatcccgcagccgcgatccccgcggcgctcaccttccatcccgcagcgcgcaccttcatcctccgccttccatcctccgcacagccactcatcccgcagccgcgatccccgcggcgctcaccttccatcccgcggcgcgcaccttcatcctccgcgaccgctcgcggatctctcatcgacgtcgatgctccgcgattaaggggatccgaggccaacaaacagcatggcgctccccgcggcgggcgggcgaggaggcatgcgcggatactcggcaggatgctccggcggaagcggagccacctccccgtcggccgcccgtgttctacagctccgtgttcgcgcagatcgaagagatcgggtggaagcaactggtgagcgccacaggagagggagtgtcctgtactcctgtctcaccttccgtgtcgtattctggctatgcgccatcctaggaaactcgtattagcaggctgtttaactgcactaagattattaattttaggtcatgacagctgtatcgacttctctaggttgggttgcaccaaatctgttagctttgtgaaggctgagcatctaaatggaggtaaaattcggcagacacgcattgaggattactcctatgacaaggatgttgtagagatcaaactgccagacacagatctttcttctgattacggtgtccattttgtcaaggatgtctgcattgatgaaggagttcttcctgatcaaaagatttcatcagaaaagcaagtagaccaaaaagtgtctataaactttgattccagggaagagataagtgctgactctacaaaaactgcacatgagttgaaatcggaaatagttgtcctacctgtcaagtgtgatactcatgacaatattgtggaacagaactcctcatgcaaaaagcgtgatcttgaagataacaatactacagatgtatctaccgagtctaatgatgagggattaaatcccaaacaattaccatttcatgaagttgcacaagattaccagaaggttgatagtgtcatttcggagagcaatgaaaatcaggactggcttttcactggagatgcaacccatcagggacttgagaaatatgttatgacaaagttgtttaatcgagtattcgcatcagtcctagaagatgtgaagagtgatgaagaacttttttag

SEQ ID NO: 92616 - DNA, 1297 bp, Zea Mays
taaaccttccgtacccatatccacctgctgctccgaccttccagtcttctccgtaggggcttcgctccatagatttcgccgcaaggggcaacggcacacccaccaactgacctgacccacgagggatccgcagatgaagatcattccggtcccttgcctggatgacaactatgcctacttaatcgtggacgagagcaccaagaaggcagcggccgttgaccctgtggaaccggagaaggttctcaaggcggccggcgaggtcggcgcctacgtcgactgcgttctcaccacccatcaccactgggatcatgctggtggcaatgagaagatgaggctgcaggtgccagggataaaggtatttggaggatccctggacaatgtgaaaggctgcactgatcaggtggagaatggaatgaagttgtcacttgggaaggacattgagatactatgcctacacacgccttggtccctatcatttttctttcaacagccacactaaaggtcatatcagctactatgttactagtaaggagggtgaagatccagcggtcttcaccggagataccttgttcattgctgggtgtgggaagttttttgagggttctgcagagcaaatgtatcagtcccttattgttacactgggttcgctgccaaagtcaacccgagtttactgtgggcatgagtacactgtgaagaacctaaaattcatgctgacactggagccagagaatgagaagacgaaacagaaactggaatgggctgaaaagcagcgcgaagcgaatcagccaacagtgccctcgactataggagatgagtttgagataaatactttcatgcgtgttgatctaccagaaatacaggcgaaattcagtgtcaactctccagttgaagcaatgagagaggtcaggaagaccaaggataattggagaggttgaggacacccatggccgccactagtctgttgaaccagcattccaaagtgaactaatgcagaaaccttgccctgtaggtgggaatgaggtttactgccgtgcaatgctttgagaaatgtgttgttgtgaaggagaagactcctacaataagctccgcgttaatgagtagtaacaatacgctccttgtaacttgtggtctgtttgccaataataatgtacgaactgtagtgcctatcttgaaaatatgaagagctataatgggtataacctgcctgcattttatatttattcagggatcatcagtatatggattatgatcgatggatacagatgataaagatggatgagctgctatgctttcactg

SEQ ID NO: 92617 - DNA, 1319 bp, Zea Mays
agtctggtaccgccggcaaagcagtcgttttcgtcctcttccttgattaaaccttccgtacccatatccacctgctgctccgaccttccagtcttctccgtaggggcttcgctccatagatttcgccgcaaggggcaacggcacacccaccaactgacctgacccacgagggatccgcagatgaagatcattccggtcccttgcctggatgacaactatgcctacttaatcgtggacgagagcaccaagaaggcagcggccgttgaccctgtggaaccggagaaggttctcaaggcggccggcgaggtcggcgcctacgtcgactgcgttctcaccacccatcaccactgggatcatgctggtggcaatgagaagatgaggctgcaggtgccagggataaaggtatttggaggatccctggacaatgtgaaaggctgcactgatcaggtggagaatggaatgaagttgtcacttgggaaggacattgagatactatgcctacacacgccttgccacactaaaggtcatatcagctactatgttactagtaaggagggtgaagatccagcggtcttcaccggagataccttgttcattgctgggtgtgggaagttttttgagggttctgcagagcaaatgtatcagtcccttattgttacactgggttcgctgccaaagtcaacccgagtttactgtgggcatgagtacactgtgaagaacctaaaattcatgctgacactggagccagagaatgagaagacgaaacagaaactggaatgggctgaaaagcagcgcgaagcgaatcagccaacagtgccctcgactataggagatgagtttgagataaatactttcatgcgtgttgatctaccagaaatacaggcgaaattcagtgtcaactctccagttgaagcaatgagagaggtcaggaagaccaaggataattggagaggttgaggacacccatggccgccactagtctgttgaaccagcattccaaagtgaactaatgcagaaaccttgccctgtaggtgggaatgaggtttactgccgtgcaatgctttgagaaatgtgttgttgtgaaggagaagactcctacaataagctccgcgttaatgagtagtaacaatacgctccttgtaacttgtggtctgtttgccaataataatgtacgaactgtagtgcctatcttgaaaatatgaagagctataatgggtataacctgcctgcattttatatttattcagggatcatcagtatatggattatgatcgatggatacagatgataaagatggatgagctgctatgctttcactg

SEQ ID NO: 92618 - DNA, 1994 bp, Zea Mays
gctccgaccttccagtcttctccgtaggggcttcgctccatagatttcgccgcaaggggcaacggcacacccaccaactgacctgacccacgagggatccgcagatgaagatcattccggtcccttgcctggatgacaactatgcctacttgtacgaatcagcccgcatcgcttgttttcactactctttcagttgttcgtttcaaatcgttggattcttgattgctatttgtttcttccgttcgaagaatcgtggacgagagcaccaagaaggcagcggccgttgaccctgtggaaccggagaaggttctcaaggcggccggcgaggtcggcgcctacgtcgactgcgttctcaccacccatcaccactgggatcatgctggtggcaatgagaagatgaggctgcaggtgccagggataaaggtatttggaggatccctggacaatgtgaaaggctgcactgatcaggtggagaatggaatgaagttgtcacttgggaaggacattgagatactatgcctacacacgccttgccacactaaaggtcatatcagctactatgttactagtaaggagggtgaagatccagcggtcttcaccggagataccttgttcattgctgggtgtgggaagttttttgagggttctgcagagcaaatgtatcagtcccttattgttacactgggttcgctgccaaagtcaacccgagtttactgtgggcatgaggtacaatctcttttttcagtttcattaaggaggaacctgaatgctagtggaccattgaacctgtatggtggatgtatataaagtaactgtgtctccctttgtcttgtaggatgtaaatattgtattgcatcttctaagaaaatttatattatcaatgactaaaggacatatgtacaaatctactttcttctgtttcatgttctcaggaataggcagtttccatattgattgactgtttattgaatttcttttgtagcagattctaaattctgtgatttgttgcatgtcttattttaatacatttatgctggttggaatgttatccaacagcaaggagttaatatagagatatgatgctcacatgtgcctccttttgttgctagctaatagagtttatggaattgtatatatgtggcatgcatgtttgttagttactaggctcgtcgtctttccattcatgctatagttttggtaacaggtgcttgagctgttcatgatcttttagtttgcttggttgaattttagctctcgagttgtaaaagatgatgtcaattttgattttgccaacaagaaagaaccagtaacatttggttgttttgtttatctttccttaatatggtatactaatcgtgctggcagaggcatactgtgctctttatggccttacctcaccttttgcttgttgagttgcagtacactgtgaagaacctaaaattcatgctgacactggagccagagaatgagaagacgaaacagaaactggaatgggctgaaaagcagcgcgaagcgaatcagccaacagtgccctcgactataggagatgagtttgagataaatactttcatgcgtgttgatctaccagaaatacaggcgaaattcagtgtcaactctccagttgaagcaatgagagaggtcaggaagaccaaggataattggagaggttgaggacacccatggccgccactagtctgttgaaccagcattccaaagtgaactaatgcagaaaccttgccctgtaggtgggaatgaggtttactgccgtgcaatgctttgagaaatgtgttgttgtgaaggagaagactcctacaataagctccgcgttaatgagtagtaacaatacgctccttgtaacttgtggtctgtttgccaataataatgtacgaactgtagtgcctatcttgaaaatatgaagagctataatgggtataacctgcctgcattttatatttattcagggatcatcagtatatggattatgatcgatggat

SEQ ID NO: 92619 - DNA, 1301 bp, Zea Mays
gctccgaccttccagtcttctccgtaggggcttcgctccatagatttcgccgcaaggggcaacggcacacccaccaactgacctgacccacgagggatccgcagatgaagatcattccggtcccttgcctggatgacaactatgcctacttgtacgaatcagcccgcatcgcttgttttcactactctttcagttgttcgtttcaaatcgttggattcttgattgctatttgtttcttccgttcgaagaatcgtggacgagagcaccaagaaggcagcggccgttgaccctgtggaaccggagaaggttctcaaggcggccggcgaggtcggcgcctacgtcgactgcgttctcaccacccatcaccactgggatcatgctggtggcaatgagaagatgaggctgcaggtgccagggataaaggtatttggaggatccctggacaatgtgaaaggctgcactgatcaggtggagaatggaatgaagttgtcacttgggaaggacattgagatactatgcctacacacgccttgccacactaaaggtcatatcagctactatgttactagtaaggagggtgaagatccagcggtcttcaccggagataccttgttcattgctgggtgtgggaagttttttgagggttctgcagagcaaatgtatcagtcccttattgttacactgggttcgctgccaaagtcaacccgagtttactgtgggcatgagtacactgtgaagaacctaaaattcatgctgacactggagccagagaatgagaagacgaaacagaaactggaatgggctgaaaagcagcgcgaagcgaatcagccaacagtgccctcgactataggagatgagtttgagataaatactttcatgcgtgttgatctaccagaaatacaggcgaaattcagtgtcaactctccagttgaagcaatgagagaggtcaggaagaccaaggataattggagaggttgaggacacccatggccgccactagtctgttgaaccagcattccaaagtgaactaatgcagaaaccttgccctgtaggtgggaatgaggtttactgccgtgcaatgctttgagaaatgtgttgttgtgaaggagaagactcctacaataagctccgcgttaatgagtagtaacaatacgctccttgtaacttgtggtctgtttgccaataataatgtacgaactgtagtgcctatcttgaaaatatgaagagctataatgggtataacctgcctgcattttatatttattcagggatcatcagtatatggattatgatcgatggat

SEQ ID NO: 92620 - DNA, 996 bp, Zea Mays
tccttgattaaaccttccgtacccatatccacctgctgctccgaccttccagtcttctccgtaggggcttcgctccatagatttcgccgcaaggggcaacggcacacccaccaactgacctgacccacgagggatccgcagatgaagatcattccggtcccttgcctggatgacaactatgcctacttaatcgtggacgagagcaccaagaaggcagcggccgttgaccctgtggaaccggagaaggttctcaaggcggccggcgaggtcggcgcctacgtcgactgcgttctcaccacccatcaccactgggatcatgctggtggcaatgagaagatgaggctgcaggtgccagggataaaggtatttggaggatccctggacaatgtgaaaggctgcactgatcaggtggagaatggaatgaagttgtcacttgggaaggacattgagatactatgcctacacacgccttgccacactaaaggtcatatcagctactatgttactagtaaggagggtgaagatccagcggtcttcaccggagataccttgttcattgctgggtgtgggaagttttttgagggttctgcagagcaaatgtatcagtcccttattgttacactgggttcgctgccaaagtcaacccgagtttactgtgggcatgagtacactgtgaagaacctaaaattcatgctgacactggagccagagaatgagaagacgaaacagaaactggaatgggctgaaaagcagcgcgaagcgaatcagccaacagtgccctcgactataggagatgagtttgagataaatactttcatgcgtgttgatctaccagaaatacaggcgaaattcagtgtcaactctccagttgaagcaatgagagaggtcaggaagaccaaggataattggagaggttgaggacacccatggccgccactagtgggaatgaggtttactgccgtgcaatgctttgagaaatgtgttgttgtgaaggag

SEQ ID NO: 92621 - DNA, 1614 bp, Zea Mays
cgacaaaatagcctaccagtgtcgtcccagccgccgtcccgtcccgtccgccgtcaaacgtcatccgaatccgcgccgcgaccagcgaagaaggtaggaagcatccggaacggagacgcgcctcctgcctcgccttcctcccatggcgccgcccctcgccgccgtctcatcgtcgtcgcccctattctctccttcatcgtcccgccccatccgccgctgccacgcacctcctccttctatctccttccagacgcggggacgctcgcccacggcggcggcggcagctgagtcttctgtcagcacgcttctcgaggtgcgcggactcaccgcatccgtgaaggagactgggcagcagatcctcgccggcgtcgacctcaccatccgcgagggcgaggttcgtgtgggcagctcgtggagtcgtcggctgcaattttattggcggcttgttattcatgcgattatggggaagaacggctccggcaagagcaccctcacaaaagttctcgttggccatcctcattatgaggtaactggtggtaccattctcttcaagggtgaggacctggttgacatggagccagaggacagatctctagcaggccttttcatgagtttccaagcacctattgagattcctggagtcagcaatttcgattttctgctcatggctgtgaatgctcgcagagaaaggagtggtctaccagcattggggccccttgagttttactcagttgtatcgcccaaagttgatgccttgaagatggacccaaagttccttgatcgcaatgtgaatgaaggttttagcggtggtgaaaggaagcgtaatgagatattgcagctttcagtcattggagcagatttagcccttcttgacgagatagattcagggttagatgttgatgcacttgaagatgttgctaatgcagtgaatgggctgttgacaccccaaaactctgttctgatgattacacattaccaacgtcttttggatctcattaagcccagttacgttcacatcatggaaaatggcaagataatcaagacgggtgacagttctattgccacacaaattaatgaaggcggcttcaaatctatcgcccttgtatagcgtgaaagcagcaggtcaaataacagaaatggctcgctgggcttgttcaccagccactaagcctacttgccaggacagaatgcctactgcttggggtttgcactgttgcctactgcattcagaggtgtaccacatacgaatttagtaaaaaaaaatgagttagtgctctgttcgactaggcatgttgtcttgcctcgtcgagggtggggagctggatacaccacctcctctatgtaagaatgtttggatgaaggtattgatacatgtagtcatacatagggatagcatgtcgtgcgtgcatacaaggtccaaattttgtatgtttgaattatgacttattctcccaggcttctggctatcaaggctggtgctgcgtgcaacttttgtaacatttttagcacttcacaccgatgttcagacctagaaagcaattcagttgttctctaaactgttatataccattcgaaatttgaaacgtgccattaccgtggcttgctcttccaaca

SEQ ID NO: 92622 - DNA, 1560 bp, Zea Mays
cgacaaaatagcctaccagtgtcgtcccagccgccgtcccgtcccgtccgccgtcaaacgtcatccgaatccgcgccgcgaccagcgaagaaggtaggaagcatccggaacggagacgcgcctcctgcctcgccttcctcccatggcgccgcccctcgccgccgtctcatcgtcgtcgcccctattctctccttcatcgtcccgccccatccgccgctgccacgcacctcctccttctatctccttccagacgcggggacgctcgcccacggcggcggcggcagctgagtcttctgtcagcacgcttctcgaggtgcgcggactcaccgcatccgtgaaggagactgggcagcagatcctcgccggcgtcgacctcaccatccgcgagggcgagattcatgcgattatggggaagaacggctccggcaagagcaccctcacaaaagttctcgttggccatcctcattatgaggtaactggtggtaccattctcttcaagggtgaggacctggttgacatggagccagaggacagatctctagcaggccttttcatgagtttccaagcacctattgagattcctggagtcagcaatttcgattttctgctcatggctgtgaatgctcgcagagaaaggagtggtctaccagcattggggccccttgagttttactcagttgtatcgcccaaagttgatgccttgaagatggacccaaagttccttgatcgcaatgtgaatgaaggttttagcggtggtgaaaggaagcgtaatgagatattgcagctttcagtcattggagcagatttagcccttcttgacgagatagattcagggttagatgttgatgcacttgaagatgttgctaatgcagtgaatgggctgttgacaccccaaaactctgttctgatgattacacattaccaacgtcttttggatctcattaagcccagttacgttcacatcatggaaaatggcaagataatcaagacgggtgacagttctattgccacacaaattaatgaaggcggcttcaaatctatcgcccttgtatagcgtgaaagcagcaggtcaaataacagaaatggctcgctgggcttgttcaccagccactaagcctacttgccaggacagaatgcctactgcttggggtttgcactgttgcctactgcattcagaggtgtaccacatacgaatttagtaaaaaaaaatgagttagtgctctgttcgactaggcatgttgtcttgcctcgtcgagggtggggagctggatacaccacctcctctatgtaagaatgtttggatgaaggtattgatacatgtagtcatacatagggatagcatgtcgtgcgtgcatacaaggtccaaattttgtatgtttgaattatgacttattctcccaggcttctggctatcaaggctggtgctgcgtgcaacttttgtaacatttttagcacttcacaccgatgttcagacctagaaagcaattcagttgttctctaaactgttatataccattcgaaatttgaaacgtgccattaccgtggcttgctcttccaaca

SEQ ID NO: 92623 - DNA, 1558 bp, Zea Mays
ttcgacaaaatagcctaccagtgtcgtcccagccgccgtcccgtcccgtccgccgtcaaacgtcatccgaatccgcgccgcgaccagcgaagaaggtaggaagcatccggaacggagacgcgcctcctgcctcgccttcctcccatggcgccgcccctcgccgccgtctcatcgtcgtcgcccctattctctccttcatcgtcccgccccatccgccgctgccacgcacctcctccttctatctccttccagacgcggggacgctcgcccacggcggcggcggcagctgagtcttctgtcagcacgcttctcgaggtgcgcggactcaccgcatccgtgaaggagactgggcagcagatcctcgccggcgtcgacctcaccatccgcgagggcgagattcatgcgattatggggaagaacggctccggcaagagcaccctcacaaaagttctcgttggccatcctcattatgaggtaactggtggtaccattctcttcaagggtgaggacctggttgacatggagccagaggacagatctctagcaggccttttcatgagtttccaagcacctattgagattcctggagtcagcaatttcgattttctgctcatggctgtgaatgctcgcagagaaaggagtggtctaccagcattggggccccttgagttttactcagttgtatcgcccaaagttgatgccttgaagatggacccaaagttccttgatcgcaatgtgaatgaaggttttagcggtggtgaaaggaagcgtaatgagatattgcagctttcagtcattggagcagatttagcccttcttgacgagatagattcagggttagatgttgatgcacttgaagatgttgctaatgcagtgaatgggctgttgacaccccaaaactctgttctgatgattacacattaccaacgtcttttggatctcattaagcccagttacgttcacatcatggaaaatggcaagataatcaagacgggtgacagttctattgccacacaaattaatgaaggcggcttcaaatctatcgcccttgtatagcgtgaaagcagtcaaataacagaaatggctcgctgggcttgttcaccagccactaagcctacttgccaggacagaatgcctactgcttggggtttgcactgttgcctactgcattcagaggtgtaccacatacgaatttagtaaaaaaaaatgagttagtgctctgttcgactaggcatgttgtcttgcctcgtcgagggtggggagctggatacaccacctcctctatgtaagaatgtttggatgaaggtattgatacatgtagtcatacatagggatagcatgtcgtgcgtgcatacaaggtccaaattttgtatgtttgaattatgacttattctcccaggcttctggctatcaaggctggtgctgcgtgcaacttttgtaacatttttagcacttcacaccgatgttcagacctagaaagcaattcagttgttctctaaactgttatataccattcgaaatttgaaacgtgccattaccgtggcttgctcttccaaca

SEQ ID NO: 92624 - DNA, 582 bp, Zea Mays
ggaactgaaacgtctattcttttttttgtatgcaaggacaaaatcaataggtgaaagacgaaaatagctattcgcctattccgaccttgtttcttaagcattccattgaaccaaagttacagcagtacgaagtatctgacgaggcagacaacgtgtgcaccgtgaaccacatgcaggataccatcgatcatcgatgtcatggatacacgaattctgaatcagaaccacaattcaggctgacagaggactggattccttgggactgccaacggagagagcgcgactcccggaagcagagtgccggagctcctccaccatcctaaccacctgcgccatcgtcggacgccggtcgggagaccacgccgtgcacgccatggcgatacggagcatctggaccagctcgtcttctatgttgggatacttcatcagctggacgtcaaacacctcagcggtccactcctcgcggaccaccgaatgcacccacctcggtaggtcgacggcgtcgtcctgaccctgtgactgaagcggggccttgcccgtcagcgtctccatgaggaggacgccgaaaccgtacacgtcgga

SEQ ID NO: 92625 - DNA, 587 bp, Zea Mays
gtctaggaactgaaacgtctattcttttttttgtatgcaaggacaaaatcaataggtgaaagacgaaaatagctattcgcctattccgaccttgtttcttaagcattccattgaaccaaagttacagcagtacgaagtatctgacgaggcagacaacgtgtgcaccgtgaaccacatgcaggataccatcgatcatcgatgtcatggatacacgaattctgaatcagaaccacaattcaggctgacagaggactggattccttgggactgccaacggagagagcgcgactcccggaagcagagtgccggagctcctccaccatcctaaccacctgcgccatcgtcggacgccggtcgggagaccacgccgtgcacgccatggcgatacggagcatctggaccagctcgtcttctatgttgggatacttcatcagctggacgtcaaacacctcagcggtccactcctcgcggaccaccgaatgcacccacctcggtaggtcgacggcgtcgtcctgaccctgtgactgaagcggggccttgcccgtcagcgtctccatgaggaggacgccgaaaccgtacacgtcgga

SEQ ID NO: 92626 - DNA, 1809 bp, Zea Mays
aaggttttgttgaaggtctgagctgtgcaaagagagatggattccaaaaagaagaggaacaagaagaagaagggaaaccaagggaagaatgccgctgatgtcacatccattgctggggaagctgcttctcagaatcacaatcatgagttagccccaatagatcatcataaaggttctgatgcagatgatgtcatgtccagtgttggagaggaacttcctcagtacaagaatcatcagccaaatatacaggcagattataatggcacaagtgcttacgacactacatcctccattggagagtgtattgcatgctatcaaaacaacgaacctatgatgacacaggagaatcacaaggctagcaatgcagtccctgcagatcagaggagtgttggactgtcagagtctagtgtggagcttgacatgcatagacttcatgaagccaaactcgataaattacatgagacaataaagcagttggagaatgaaaagagtttgtggcttcaaaaagtgatcaccatggagggtgaacttgaaaagttgcataacgaagtgggttgtcatgctcaaaatgaggtccttttggaggaaaaactgaatagtctacagagtggttatgatgtgctgattaagaaggaggaagttgtggataacaaagtcaggtgcatagacaacatcaatgataccttaactcatcaagagtctttgcttaaagaaagattaagtgggctggaggaaacaaacaaatccctgctggtacaggtgaaggtgttggaggaagcttcaaacaatacttctgaggaaaatcagatgttggtaaaaaaaatatatgaacttgattcaagactacaagcacttgaagcaaaggctgctcctagtgaagccttaatgattgaaaagttccctgataataaggtgatggatcaagtgcattttgccaactcgccacttcagcaacagacaattgatttttcagagggtaacaaactgtttgctgagagaggtctgagcagtccagtgaaacttaatcctgacaacagctatcgtcaaatctacgacattcccagcaatgactatgctagtaattatacagaggaaacatcaatacaacttccagaaataggcaccagcaatactattgttcaaggtcatgttgatgtcaatgaacaccgatttgatggaccaagaacaatcgaagaaatcgttcctgttccattggatgagatacagatccatgaggatgtcccagggcaaccgggagcagccgatgagatagatgaggttccattttctgacgctccgatcattggtgctccattcagactgatctcatttgttgctaggtatgtcagcggcgctgatttggtcaaccaaaaataactgtctgcataccaggaattcaggacttttatgtcaggagttcctttttgatcccactgataattacgtcagtatcttgagataaagatggatagattggattcagaatagatatggagctgtattcattcgtgtcagtgctcacgtcactgccaattattctccttcccctgtacttttttcaggcgccggagaaattcttgttcctttatactacctgttcttgaatatttgtcatccgctacttcatttttaaattaaaacacgataaataaaaaaagaacggagaagtacaatataagaagctatgtaccatgggcctctttacgggtctaaccatgcgaaaaagttgttctggaaattctattattaatgactgaattttggtgtgctgacactataacctgtgacagacacctatatgcttgattt

SEQ ID NO: 92627 - DNA, 1833 bp, Zea Mays
aaggttttgttgaaggtctgagctgtgcaaagagagatggattccaaaaagaagaggaacaagaagaagaagggaaaccaagggaagaatgccgctgatgtcacatccattgctggggaagctgcttctcagaatcacaatcatgagttagccccaatagatcatcataaaggttctgatgcagatgatgtcatgtccagtgttggagaggaacttcctcagtacaagaatcatcagccaaatatacaggcagattataatggcacaagtgcttacgacactacatcctccattggagagtgtattgcatgctatcaaaacaacgaacctatgatgacacaggagaatcacaaggctagcaatgcagtccctgcagatcagaggagtgttggactgtcagagtctagtgtggagcttgacatgcatagacttcatgaagccaaactcgataaattacatgagacaataaagcagttggagaatgaaaagagtttgtggcttcaaaaagtgatcaccatggagggtgaacttgaaaagttgcataacgaagtgggttgtcatgctcaaaatgaggtccttttggaggaaaaactgaatagtctacagagtggttatgatgtgctgattaagaaggaggaagttgtggataacaaagtcaggtgcatagacaacatcaatgataccttaactcatcaagagtctttgcttaaagaaagattaagtgggctggaggaaacaaacaaatccctgctggtacaggtgaaggtgttggaggaagcttcaaacaatacttctgaggaaaatcagatgttggtaaaaaaaatatatgaacttgattcaagactacaagcacttgaagcaaaggctgctcctagtgaagccttaatgattgaaaagagtgtaacaaaaactgtaatgcagttccctgataataaggtgatggatcaagtgcattttgccaactcgccacttcagcaacagacaattgatttttcagagggtaacaaactgtttgctgagagaggtctgagcagtccagtgaaacttaatcctgacaacagctatcgtcaaatctacgacattcccagcaatgactatgctagtaattatacagaggaaacatcaatacaacttccagaaataggcaccagcaatactattgttcaaggtcatgttgatgtcaatgaacaccgatttgatggaccaagaacaatcgaagaaatcgttcctgttccattggatgagatacagatccatgaggatgtcccagggcaaccgggagcagccgatgagatagatgaggttccattttctgacgctccgatcattggtgctccattcagactgatctcatttgttgctaggtatgtcagcggcgctgatttggtcaaccaaaaataactgtctgcataccaggaattcaggacttttatgtcaggagttcctttttgatcccactgataattacgtcagtatcttgagataaagatggatagattggattcagaatagatatggagctgtattcattcgtgtcagtgctcacgtcactgccaattattctccttcccctgtacttttttcaggcgccggagaaattcttgttcctttatactacctgttcttgaatatttgtcatccgctacttcatttttaaattaaaacacgataaataaaaaaagaacggagaagtacaatataagaagctatgtaccatgggcctctttacgggtctaaccatgcgaaaaagttgttctggaaattctattattaatgactgaattttggtgtgctgacactataacctgtgacagacacctatatgcttgattt

SEQ ID NO: 92628 - DNA, 411 bp, Zea Mays
tgtaggtgtcgtcagtggccacggagggcgggaacatgcggagcacggaggtcggcgacgtcgccgcggcgtgggactactcactggaatcataggacgtggcggaggaggacatcttcttggacgccggggccggtggctgctggaggcgctcggcgacctcgtcgaggacggggaccgacgcgtcgtctgcaagctcgaagttgttggtggcatggggcccgcgtagctgtatggtggccgagtgcggcctcctcggtggcatcgaaggtgacgagtcagatgcgcacacgacgccaagggtcgcggatctccgctgtgtacttgccccacgactgacgctgcactctgcagaactaggattcggcgctggcgtcgttcgacttcctcttccgctcagggagggccagc

SEQ ID NO: 92629 - DNA, 833 bp, Zea Mays
tttgaacatctaccatgtccaagcacatatatttgatatataaggaaaaggttcggccactcattaagcaaagaaagctgacctacacaaaatttggaataaatatgcccaagcaaagaaagcagacttgtactggatctaaaaagataatctgactccactggtggtgtgcagacatgagagaaatgcttccagggtgcggtggactagacgtggtggatcgacctcctcctcgatgtcgttctactgctcgtgctcgttgcttggcatagcaatgacgctagtcattgcgtcgccttcgtgttgcagcaatggcgccacatgggacttctgtttgtaggcgagagcatctggctgatctggagctcagtgagggtggcattcagcacgagctgctgccccgcatagagaagccgcaaatcctgaccatacccggaattggggtcgcacaagtgaggagctatggggctagggttatggtggagtgcaggcttagggtggggcggcggtggcggatgggcctgagaacgaaccttggtatgtgtgacactggtggtgacagtggcagaggcggagaggggcacaaggccatggtcgggatgggctccagcggccggcgacagactcaggaatggtggagggcggagcaaggggaagaagggcgatcgggaagagggcgaggggcatcgggcaccaccccttccctcccaacctccctttttctccctctcgatgctggatctagcctcgggccatgtcgtcgtaatctttgcgcggaatgggagggagggagggagacgtgggatgggggcgcaatcatcgcgcggggatga

SEQ ID NO: 92630 - DNA, 109 bp, Zea Mays
gtttactttagcttaatcaatcttgtggtttttttaatgttatttatgttgttcacgcaagaagatctacatcgtgtttcgcaagatggacacgtctatcacatttcac

SEQ ID NO: 92631 - DNA, 1011 bp, Zea Mays
atgtctatcaagtttttactagttttagttttattaagttaccacttatcttgtagggaggagcttgcacgcatctacactgctgaaattgtatctgcagtcgcccacctccatgccaacggtattatgcatagagatttgaagcctgagaacatcttactggatgctgatggtcatgctatgctgactgactttggtgtggcaaaagaatttgatgaaaacactagatcaaactcaatgtgtggtactgttgaatacatggccccagaaattgttcagggccgaggtcatgataaggctgcagactggtggagtgtgggagtccttctttttgaaatgcttacaggaaagccaccgtttgttggtggaaacagagacaagattcagcagaagatagtaaaggagaagataaagctgccaacatatttatctagtgaagttcactcaatgttgaaaggattattgcacaaagaagctggcagacggctgggaagcggaccaggcggcagtgacgaaatcaagaaccacaagtggttcaagtctgtaaactggaagaggctggaggcccggcagatcgagccaagcttccggccgaatgttgctggcaagacctgcattgcgaactttgacgagtgctggacgaacatgcccgtgcttgattctccggtggccagccctgttgcggccaacagcaactttgtggggttcagttatgtgaggcccgcaccgttcctccagaagccgagtccacttggctaaagaactacttccgtgatctgatatctaacccggagttcaaataactatctttgagtctgaatcctatgtatttcttcaagacattagtgatgggaatctaaccttattgttgtgttgtgggtaggccagccaagcgcctattgcttgagaacaacagcttggcaagtgacaatgtgcaatattgccagaagttcttattgaagcgccataataattctcctacgtcaatttgaacttgctcggtctattcaa

SEQ ID NO: 92632 - DNA, 675 bp, Zea Mays
atggacattctggccagccagcataccaccaccattttcaccgctccttgctccgttgctgccatgctcggcgctcgcgacatcagcgtcgaaggaactctccgtgacggcaccaatggagccctggtctctgttctgacgaggcaccccactgctcacggcggtagcgaccgaataactgtcggagtcctggcgaccttgtttcgcggtcgcggccacttgttggccaccgctggcacgggttttagctcgaagggtggtgccgcatccaccgcacttgtagactgtgacgttaggtggttctgggagaatgttcagacactttgggcatctcacgaggcggaaaccttctgtgcttgccatcaggaaagaaagtgccagaccatcggaaacgacagttccaggcttaagaagagtatcttccaaccaagttcagcacttcagatcgtgatagcagaagacacccgcagctgcaagtctttcgtacggggtcccctggacgcttcctcgccgtcgtctcctccgagccgaggccgcgtcgtcgtctccttcctctcgttgcttgctacctccgggctccggccccccgcgcaccccccggttcttggaagttacggcgcactcgcttcgcaagaggcagcaaagacgaccgggccgggccacttagcagaataa

SEQ ID NO: 92633 - DNA, 732 bp, Zea Mays
accggctctgcacccaaagtccgaacccaaatcgtgtgttcaccgttcccgacgaacctgccgcatcacctcaccgatcccccggcgcccgctggccctgtcccgactcccgagacatgcaacccgtttgccgctcgtgcttggcccccgcgcggccacagccggaggtaccccgcgcgcgcgcggccacggcgtgccaggcccgggccaccacgacgagccgcgtctgcgtctggcgcgcggctcccgcgcggcgcttgcgcgcaaacacgccgcgcggaggcgggacgacggagcccgtcgagccgcgcaaggacgggccggcgtcggcggtcgatcaggcggaggaggccgggctggcgcccgaagagctggaggtgctggaggaggcggccatcatgggggaggacgaggggcgccggcccaccgactacgaccgccgcgcgcacatcttcgaggagagctcgcgggtcttccgtgatctcaagcagcgaagcgacggcgacggtggcggcggaagcgagagccagagcggccgtggtggtgccgtgactactggtgccgcggcggaaacagctaacaagaacgcggtgtaaagataacgagccgcagctgtagcagctttgttggataaaatgtcgtactgtgtaatatgagaggtggtgtcatataggttttaaaaatcttaaaatgtatttttatccataaacttagttttggttcaaaaaaata

SEQ ID NO: 92634 - DNA, 758 bp, Zea Mays
attccaaacaaacacctcctaaaccttagctcaaaataagttagattatataatctgggcagattataaattataatcccaaacaaacaggcccataaatggtccaaactgtaatttgacttatgctatccctgggcctcttgttgagtgatcacaaaacttcaccccggatctttactgatttagctcctttcttgaactttgcatcttatcttttaatcaatcctgttcttatgacacctatttgtttattgcacatttgcattcttaattttacaacccatttgtcttctacacactaaaactatcataatttgtcttctaggtttctttttaatgagctgtgcgatctttgcactttttgtatgcgtctattatggcagcgcttcttttgtgtaaccgcctcaacagatctgatcatctgaagtgccatttccctctgatttttttgtttaatattttgttctcgttgcagtgaagtacctttttcctctggattcacgacttagctgacatcttctaaagattgcgtaagattccagatgtacaggtggtgacttgtgttgaacgatttgaccaagagatgtttacttcagttgtggctacccaatacaaaaaggtcggcaaaataaactatcactgagagcataagagggtttgtctttgtaatccttgtgatggtgacgtagctcgtaggtgattgaaatgtatcattcccagagctgagatgtactcactccgttccaaattaaaattcg

SEQ ID NO: 92635 - DNA, 1674 bp, Zea Mays
ctgctgccagcaagacgagccttcgaaccttccagttccatccatcgccgccctcctcctgaggagcatccgaaacaagagcagcggcagccgccaacgcccgcgcccgccatcccgacgatgcgccgacccacactctcgctcgcgctcgggctcgggctcgggctctccctcgtcgccctcttcgcggcccggggcgcccacgcctcaatccacgagtacggcggcggcgacttcgcgccgcgggccaactccttcttcttccacggtgggagcgaggggctctacgcgtctgaccactcgtccaactcctccgcatccttcatcagatttgacaccgttgtatttcgtcgcaccctggagtcagcatctaggcatgaggagatgcaacaaaagacaggattggtggaggctataattgttgagatacaggatagaggcaaaattggaggttcatatctgcactctgatgcaatatgttgcacacctgagcttgataaggagaaatcttgtagagtaggtgaggtgatcatacgtccaaatcctgagaaccccgactggcctaagaggatccagacattctttgatggtaaaaatgaagaaaccactatggtaactcaaattgtgtcgataaacaaaactgggatgtattacctctattttatgttctgtgatcctcaacttaagggattgaagattacaggaagaactgtttggagaaatccacagggttaccttcctggtaaaatggctccaatgatgacattttatggtttcatgtcacttgcatatcttgtacttggacttctatggttcattcagtttgtgcgatgctggaaggacattttgcagctgcattaccatataacagctgttattgctcttggcatgtgtgaaatggctttttggtattttgagtatgctaactttaattcaactggaacaagacctatgggcattaccttgtgggcagttacatttacagctgtgaagaagactgtttctcggcttcttctattagtagtttcaatgggctatggtgttgttctacccacattgggtggcataacatcaagagttgctgctcttggtttcatctattttgttgcttcagaagctcttgaacttgttgaaaatctgggaaatatcaatgacttctctggaaagacaaggctattcctagtgttgcctgtcgctgtacttgatgctacctttatcatctggatattttcatccctctctagaactttggagaagctgcagctgcggagaagcatggcaaaacttgaattatatagaaagtttacaaattctctggctgtgtcagtgcttatctcaatcgcttggattggctacgagctatatttcaatgcaactgacccgttgagtgaactttggcaacgggcttggatcatcccctccttttggaatgtcctttcctatgccctcctcggcatcatatgcatcctttggtctccatctcgcaatccaacagggtttgcatattcagaggatgcaggtgagggagctgatgaggaagggctctctctagtaggcagtgcggtgaaaggaaccggagatatggtaaacatgcatatctttccggaggataagcgtgcatgataagttttggcctgaatgcagctgtactcctggcagaatgctatggtatgt

SEQ ID NO: 92636 - DNA, 2381 bp, Zea Mays
atggaacatgcaattgaaaagcatctagatctgctatacaaaataaatgaaatccgtgctgttaagatagaagatacagagggctcattattaaatggtgatgaagaatctcaaagtagacatgctgatggaggagacactggtactagtgatgatgacgatcaaaatgataatgatgttgacttgggaactgatgcagaaaagatgaaacggcaagagaaagatgagatggagtatgatgatgatactgaaaccgaggagggaatgggtagcgaatctgaggagagcgatgaggatccagctgagtcaggtgatgattcacaagaggctgacaaagaacacacgatctcgaagtctgagacgacttcagtggatgacctgccatattctgtaaaaaaggggaaaaaatcaaaagatgatcgtggaacagctaaactagaagagaaaaatcaaaatgagggaagattagatgaccagaaacagggtcaaataaagaagcgcaggaaaaagttaaaacatactatccatgttgaatccagtgatttggattttgagattcactatgcctttcatgatgaacctcatattttactagctcagattgccaaaaagatagctaggactattcttgtgaaggcctgcaataacattgatcattgtaagatcgtcaagccaatgcacaaccatacgcgtctagagaccgccggagtgaactttgaagtggtatggaatctcagtgaatacatcagcgtcaatgacatcacatcaaatgatatccatgccatgctgaagacatacggggtggaggccgcacggggcaccatcatcaaggaagtgagcggcgtgtttgaaccctatggcatcaatgttgacatgaggcacctgagcctgatcgcagactttatgaccttggatggcggataccggcctatgaacaggctggggattggccagttcagcacctcgccatttggcaagatgacgttcgagacagcaacaaagttcattgtggatgcagccacacatggggaggcagattttctggagtgcccctcagcgagtgtctgccttgggaagcccccgaaggttgggactgggatctttgggctactgcagaatcttgaattggagcagcccaagaatatctaaaatctgcatttggtgcacgtctggccaagctgccttctgaaggttcacaagttttggtcctgtcagcctttgcacggcagaatgtgctttagtttgttacggtgtggcacgctgcatctgtggtggcttagtggcagcatgccatttcatacgggcatgctgctggaaaaactagcagaacatgtcaaataccagttagtgttctggaattctggattaatttacagcatgatagctagttgtacacatgctttagaatgccgttgttgtccagtgcttgttaagaaagaactgggtcatctttgttgccagggtctcaaaaaacaaccctgcatgacgccaaggacccaggcaccagtgttcgaattatcgacgggcagacatcatatatggatgcgatattctattgacacaatctcaggttgactgctcacctatgtactaaatctgcctaccctgtgatgtggaaattgaaatactagaagcatttgtaggacttttaattagaggactcaacagtcacttatcctagtggcttgggaggtttgaaagcactggaatgcttgcgtgtttgaaagagtcggtctttgtggttctttaaaatattggtaacgaaggcttgatgtgcggctggagcaaggaccttgtgtacctgttagtcttgttcagttatttctatgtctcgtggaagagattaaaaaattgtgaaggattttgatttgctatggattgaaatccatgtaaatctccttcaatctatatagattttgatgaaaccgaataaacccttatagagggcatgaggtaggctaggaaatcttgttaatctgatagtagaggtgtacatttaggctgtgtcttgtgggctgactcgaagcacgaaaaaagcacggcccaagacagtaataatttatgcactaaggcaactaaggaagcatggaagaactacccaacgcctgaattggagttagttgttgtagtgcatgctctaaaatttttgaggcactatccatatgtttggttccctataagtcgagacaagcatgtatgagcttagctagtattggtagaaaaagagtgagttcatgcagattcttttgtttggttgcttgtataggctcgtgcagaatagacatagactttgttatgttggttgcactgaaacgtgtattatagaagggtgtataaatagatcttcaaatattatatattataatatattataagtggtt

SEQ ID NO: 92637 - DNA, 2565 bp, Zea Mays
gcaacgactgctatgcaagcagtccttctgtgcaagcgtgcaagcaaaccatctgatccatcagattacgatccaaccacagatacaaccatgaaagtaacaccctggaataccaaaaggctccaagaagctataaggaatggtgccgatatacatccaggtgcaacacattacagggacaacaatagcatgtataagttacaggcagtccctgccaaacgccgttccattgctaagatgctacctgcatctagaggatcaatttgtcagccagggagagatcctaattgtgagtttgaaagcaaggttgtatatcggcatcttcaagatggtgacattgtacttgtcaataggcagcctactcttcacaagcccagcatgatggctcattttgttcgggtgttacctggagaaaagacgttacgaatgcactacgccaattgcagcacctacaatgctgattttgacggagatgagatgaatgttcatgttccgcaagatgaaatatctcgtgctgaggccatgaatattgttgacgcaaacaagcaatacattggtcctaggagtggggatgctgtcagaggtctcatacaggaccacattgttggtgctgtactattgacaaaaccagacacattgctaagccgtgaagaatatagtcagcttgtctttgggtcttgtgtgccgtcctcaaattgtggctctcatcaccctgctaaggtgtctgctattgaggattacgatacacttgaacttgtccatcctgctatttggaagccaaggcccttatggacaggaaaacaggttataacaaccatcttgaatcatttaacaaaaggttgtcctccatttactgtggagcagaagggaaaaataccaaaagaatatctgaaagaagatccttccgctcaaaaggaaaaagaagatccttccgctcgaaaagaagctcattctgctaaaaaaggaaaacgagaagatccttccgctcaaaaagaaaaagattcttcagttaataaagaaaaacaagagaagatacaaaaacaaaaacaaaaagatcgttctgaactggtcttatatattcacaataatgagctcataaagggcataatagacaaggcccagtttgggaagtatgggatagttcatacagttcatgaactctatggtgcatatacagctgggatactgctctcgacattcagccgcttatttacactgttcttgcagttgcatgggtttacttgtggggtagatgacctgctactattgccagagaaggataaactgagaagtaaaattcttagtggaagcgaagtgcgtagtaatgaagtccactggaaatttactggagctgacgaagatcataaaggtgatctggtaaaattgcatatggaggttgagaaggctgtaagaagtaacggtgaatcggacacggctaccttggacaatgatatgaaaaatgctctaaatgggataacaaccgacgtcaataaaatattatttcctgatggtctacaaaagccctttcctggaaattgtctctctcttatgactacaactggagctaaaggtggtccggttaacatgaatcaaatatcatcattactaggccagcaagagctagaaggaaagcgtgttccacggatggtttctgggaagactttaccgtgctttccgccatgggatatttcttcaagagctggtggctttatcagtgatcgatttttaactggtctgcgtcctcaagagtattactttcactgtatggcaggcagagaggggttggttgacacagcagtcaaaacatcccgtagtggataccttcagcgttgtcttatcaaatgtctggaatcgttgaaagtctcctatgatcacacggttcgggatgctgatggatcaattgtacagttctgctatggagaagatggagttgatgtgctgaaaactagctttctgaacgagttcaaagaacttgctgataacagaaaagctgtccttgccaagctcggtggctgcagtaaggatcccacattatcaaaatgtaatggatacattactgaactgcctcctaaattgattgataaagcggaagagtttcttaagcattcaaaggaatgctgtcgttacaacattgaggcaaaggaattaaaggagttacttaaagtcaagttcctatccagtcttgtagatcctggtgaggctgttggtgtggttgctgctcagtcaataggagaaccttctacgcagatgacgctcaacacttttcatcttgctggaaggggtgacatgaatgtaactcttggtataccccggctgaaagaaatactgatgactgcatcagataatattaggacgcctgttatgaagtgtcctttgctcgaacatatttctgaggatgatgctaaaatggtggttgcaaagcttaggagggttcgtgtggctgatgtagtggagaaaattgaagtctgcacagttcctttttacaactctaatgggcgtgtttcaaccctgtacaagttacagatgaaactctatccacaagaccagcttgagtcaggtcttact

SEQ ID NO: 92638 - DNA, 2268 bp, Zea Mays
gccacacgcacggctccatccttctgtccacgctcgcgccgccagggcgctcgagctcgccgtcgtcatctcgtcgggccgccgcctcgcagcttcgcccgcggctctggtccgcgccccgccaaggcccagccccaagctgccagcggcctccggcgttgctcgccgctcactgcgcgccgtctcgcgctctcgcgccctcgcccagtcctgctctcccttcgtcgctccgcggctccgccggcgtctgggcatccggccttcgggctttggtggcgccccccaccggccaccggcccaccccagcgggcagcggccactgcaactctgcggctctgccaggaacaaggaggaacagtggcgattctgccagggacagggaggagcagtggcagacaacgtccttccttttgtttggcccggggcttcggaattatctggagccgctactgcccccagcgttcggactcccgggtcgcaggcagccacgtctcgtcctggctctgggctcgccgcgctatcgtctcggccattcgctccgacgtccgtattcaatagatttgccctactcgtgaccacgagaatccggcgaggagggagaccgctcgtgcggagtctataatggctgacgggcagcatattcaggcagcatcagaggaagtggattcaatccacttcagcttctatagtgatgatgaaattaagaggatcagcattaaaaagatcaccaagtcggagcgccttgatgccaaaaaccttcctgtgccaggtggattactggaccctgcaatgggacctatcaatgatattgatatctgcaagagttgtggtcagcattctgttcgttgccctggtcacttcggtcatattgagttggcaaaaccattgttcaatcctttgctgtttatgagtctgaaaaaccttctccatgtcacgtgtttccattgtcacaagttccgcctgaacaaggaacaggttgacagatatgtgaatgaacttgaacttttagtaaagggtgatattgtctgtgctaaaaatttggaagactcagtagaagaagcatatctttccaaggaagatgaaaacatgaacaagaccacttcaggtgataactcatcttctgtgaaagacaagaaaacctggacatctatccaattgaaagaggttttgtctattttttccaagataatgaaaaagagacagaagaagtgtgcaaaatgtgacatgaagagcccaacaatctcaagtcctatatttggttggctggtcaaggacacaaaggcttctgctgtaagaacaaatgcaattgctgattttaaactcaagggagatggtgatattcacaactcaggggaaacaggggtttctggtcttgaggaagagtcatcttcacctggaatggtgtctaaagactcaatcaatgaagttagaggtctttctgatgatacaattaaagaattggtagcatcatcaggaaaaaaacatctattgcctacagaggttgaatctattctcaaggacttgtggaaaaatgaagctaggttctgcatgttactttgtgatttccagaagaatatgtcaagtgaaccagaaaagagaaggggctatgaaatgttcttcttgagtagtctccttgtggcaccaaatagattccgcccatcaactagctctagtcttggaattatggaacatcctcaaagtgttctgctaagtaaagtgcaagaatccaatcttgcgctacaacataacaatgcatcttctaaccatatggatgttcttcaaagatggatggatctacaacggagtgtaaatgtgctatatgatagtagcaaaggccttgcaagaagcgagaagaatgctcatggtatacgccagctattggaaaagaaagaaggaattcttcgacaaaagatgatggggaagagggttaattatgcatgccgatctgttatatctccagatccgtacttggctgttaatgaaattggcattcctcctgtttttgcgacacgattgacatatcctgaggtagtgctttatgcattgttcaacatcctgtatgattcaatttggcacaactttgtttacgtttgtgttctgacttgctttgccctctgcgatagggatgacaatgggatgggtaaggcgggggggtggggtagtaaaaatctgccctacacccaccctcaatgtgactcgcgggtgcaatgtcgcacccatgggtgtgttaacaagaagctaatctatatctatacttctatactataa

SEQ ID NO: 92639 - DNA, 117 bp, Zea Mays
ggattttctaattccttttccatttattttctatagggttttcaaatccaaattcaaactaggtttcaaattcaaataaattcaaacatgtgcaacacttaaagaaattttataccc

SEQ ID NO: 92640 - DNA, 476 bp, Zea Mays
gattcggagatccgtgcctcatggctcagtacatgcctctggaaaaaagaaggagcaaaccagcatcaggtcgtgcacgccaatgatatctgaagcggcacgccttctctggagcagcatggaggcatttcacttgtgctgctgcatcattgggcatggggttttgcaaataggtcaaactaggctcaaagatacacgggttggtgcgaggagatcaagatcatcaactgtaccatgtgttaagagagatacgttgtgcacttcttgttacgcacggcacttggatagcatagggggatgaagatgataccaccattagtagaccttcgtttccttcagcttctcttagaacttacgggttcttgctgcctcttcgcatacatgtgaatactgtaaataccgttgcctgaataaaagcttcagcctgcaaggctacaagcaatataccaatgttctgactctgaagcactggtttt

SEQ ID NO: 92641 - DNA, 139 bp, Zea Mays
ctttgcacgatgcatcattttaaataacacggtgctgcgtcttgaaatgaagtttgttttcactctcatgttcatgttcatgcacaaatatggaagccacattttgtgtttatcatgctttcctatatctttgtgtaca

SEQ ID NO: 92642 - DNA, 273 bp, Zea Mays
atgggctccaggaacaaccttgtggtagcagatgtgggtgagtacctgccgagccaggatgcacccgtctacgtcgctgccgccggtgccgactcgccggaaaacttcattgaagaatgcaggcagggagaggggaggaggggcgagagtgggagccgggagggaccgagggaggcagggagcaacggagagtgggctgaggctggaccgctgcgagggagaaagagcgaggagtggaagggagaaacaaaaaataaagatgttccagggtag

SEQ ID NO: 92643 - DNA, 1381 bp, Zea Mays
gccgcgagtcactttcaccagctctcactcttatccgcctgcgcgcccaccgcgccgcccacccgcgcccaccccagcgccccaaataccgctccaaccctagcctcccgccacgcctttcgatctcgggcggccatgggcaactgctgccgctcgccgaccaccatcgcgtgggaggacgtcagctcctcgcacttccccgcatccaacgcaaagaagaagccgcaccaagcgcggaacggcggcggcggcgacgggcagaagcggctctcggttctggccgggcgacgaggggtgcgaggtcatcgggatcgatgacaagtacgtcctggacagggagctcgaccgcggggagttcggggtgacatacctgtgtatggatcgggacaccaaggagctgctcgcctgcaagtccatctccaagcgcaagctgcggacggccatcgacgtggaggacgtgcgccgggaggtggccatcatgcgccacctgcccaagagcccgagcgtcatgtccctgcgggaggcgtgcggggacgagggcaccgtccacctcgtcatggagctctgcgagggcggcgagctcttggaccgcatcgtcgcgcaggggcactacaccgagtgcgccgccgccaatgtcacccgcaccatcgtcgtggtcgtccagctctgccatcggcatgacatcatccaccgcgacctcaagccggagaacatcctcttcaccaataagaaggagaactcgccactcatggtctctccatcttcttcaagcctagtgagtcacaccaaccgagatcctttcccaatttcggacgattttctgcgcacttccgtgatttctggttttagtgggaggaaatttgacggtagagctcagagtagcaaaatgtacttcttttttcctgcaatccataaaacatgtggttattactagctctgcatcccggaaacaacttggtggttctttcataggcaattggctattactagctgcaagatagtatttggtagtgatctggtagatactgttaatctccttttttttcaggataatatctagtggtactgacgataattttcaggacatcggttcaaccgagctctttcttccctattacagagcattttggtttgatgaagaatgaaaatatattgtgttgggctttgcctggttggtacatcaaagtcttaggatgtttgtggtgtggtacacacttttgggattatgatgaacaattagtggtgcataaggtgtgaaatctgtttagtatcacattcattgttatcgatacattatttctttgatgctggaaggtgaatatgtgacaatgagcacaggttccgctactgtgtagaagttatataacactgaattgttagt

SEQ ID NO: 92644 - DNA, 1601 bp, Zea Mays
agaaagaaatgtacagtctacacagctgaccagagagctagtgcaagcgatctagcaagttttaatcttggaagaagccagctaggcgcgtgaatatggatcgcctcactgtgatggcgccgccgctgctcgtcctcctcctgctgctcctctcgcggtgctcggcggcggcgtcacggcgcggcgggggctggtgggaggagggcgagggggagtggaggccgagcgaggaggaagagaagggcaaaggcaaagggagggggctgttcctgctgcaccgggtggagaaggtggtggagtcggagggcgggcaggtgcgcgtggtgcgcggccagccgtggccgccggcgtccttcgcctgccgcgaggggctcatgcacatcggcttcatcaccatggagcccaagacgctgttcgtgccgcagtacctcgactccagcatcactctcttcgtgcagcggggggaagcgaaggttgggtatattcacaaggacgagctcgtggagaggaagctcaagatgggcgacgtcctccacatcgacgccggctccaccttctacatggtcaaccccggcaaaggccagaggctgcagatcatatgcagcgtggacgcctccgatagccttggctttggacctccttatcaggccttcttcctcggcggcgcaggggacccggcgtcggtcattgccggttttgggccgaagacgcttacccgtgccttcaacgccacctacgacgagttggcgcgtatcctgttgccacgaaccggcggccccatcgtgtactacaccgcggacgcggagccagagagcggtgccgccgaagaggagcgcgggcaggtcgacgggcacgacggtgtgctggacaggggagcgcgacgcgagggcgccggcgcgtgggtgccgggtggcaggggagacggaggcgacgagtgcggcggcagcgatgacgcgcgtgaggcgacgtggtggtggacgaagctggttaacagggtcgtcggaggggcggctggcggcggcggcgctgcggaggcgaacaggaagggcaagaagaagaagggcggcgcgccggagccgtacaatctctacgacagcgagccccggggttccggaacgcgtacggaggaggggttgctgctggggtcgatgctggcgccgcacgtgaaccctcgggcgacggagtacggcgtggagctgggcggggaaggcacggtccaggtggtgttcccgaacgggtccctggcgatgagcgaggtggtgcgccccggcgacgtgttctggatcccgcgctacttccccttctgccaggtggcggcgcgggccgggcccttcgagttcttcggcttcaccacctcggcgcgccgcaaccggccgcagttcctggtcggcgcctcctcggtgctccgtaccatgctagggccggagatcgccgccgcgttcggcgctcgcgagaaggagttcagtaagctggtgcgtgcgcaacgggaggccctgattatgccgtcctctcctgggaaggaggaggaggagcatgggaagaaagggagggagaaagaggagtcactgccgatggttgtcgagcaggcggcggcggagtga

SEQ ID NO: 92645 - DNA, 1278 bp, Zea Mays
gtattctacgagtaataacaacaagaatgtttggaaacatttccgatctccccattacatataactttgatcacgcgagtgctgctcccaattcccaaggcctgcaccatctagcaggccgtcaagccagccagttccacacttccacttccacaggcgcgcagccggccgctcacgtaacgccaactcccctgtctccgcgcggctgcagccgacgccggcctctctgtccccgtgtgtcctgctgcctatcttcgctccacgtccacggtgacaccatgccggcgcccaagtggttccagaagctccgggggaggaggagcaagggcaagcagcaaggcccgtgcgccagaggcctcgccgccgaggacgcgccggcgcagggccagcgcccgtcgtcgctgccagcgccctgcgccgtgtcccccaaccgggcgtcctactacttcgccagcgcggaccgcgcgcgccaggacagggacctcccctgcgccgccgacgcggcggcggccctgctggacgtccgcgtcgacgtggtgcaccgccgcgcgggcgaccggcggctcggcggcctcgacgcgccgcccgggacgcccgagctccagctgcggcccatcgtcacgaggccccccgtcgacgacgcctcggccagcggtggcgtcagcagcgccagcgccaccacgtcggcagccaccacgccgtccaccagggcgcgcaggttccacgtgagctcgcctatggccaggcgccggcgccggcgccggtgcgaccacgacagcgtcgcgatcaagaaggggaaagcggcggccgcggaggaggaggaggaggagggggaggtgtcgccggtgccgtccctgcgcgcgcccacgcggcggcgaaggcggcggtggctgtacgagagcctggtggtggtgaagacgtcgtcggacccggagcgggagctggcggagagcatgtccgagatggtggtggccaacggcatccgctcgtccgaggacctggaggagctcctcgcgtgctacctcgcgctcaacgccgccgagcaccaccgcgccgtcgtcgccgcgttccgccgcatctggctcctcctcgacaagcacaggctgctgctcatctaggcacatcgtgcagcagccgcgcacctcgccagctgacggcgcagctaccgtagcgtaaacagtgctatcgtgtgagctgtgacgacgaacatgctgcacgccatgccatgccatgcctgcatgcatcttgccgtgtttataatcgacacctattttagtt

SEQ ID NO: 92646 - DNA, 95 bp, Zea Mays
ctttttctcataacagtaccgtggtattatgtgtttccgttgcaacgcacgggcactcacctagtcatcatataaatcatacaagatacctcatg

SEQ ID NO: 92647 - DNA, 1283 bp, Zea Mays
ggttcctggtcctccattcaagctccactactccacacctagacttcccaatcctccattgggcaacctgtcacacagtacgccgtcgcctgtggtttggtttgtggagtgagagagaaagagagagagagacatagactcggactcggagagaaggagatgatgtcgagggagcgcaagaaggcggctgctcttcaggagaagctgaagatcctccgctccatcactcactcccacgctttcgatctctttcctctgcgaattaattacttggcatatggacacgtacaccgcagctgagcaacacgtcgataatcatggacgcgtcggcgtacatcaaggagctgaagcagaaggtggtgaggctgaaccaggagattgcgtgcgcgcaggacgcgctgagacacaaggcatcatcctatcccacggtgaccgtggaagccctaggagtgcaggggtcgtcgttcctggtgaacgtgttctccgacaagagctgcccggggctgctcgtcgccgtgctggaggccttcgacgagctggggctcagcgtgctccaggccaccgcgtcctgcgccgactccttccgcctcgaggccgtgggcggagagaacgtggcggacaacgtggacgagcacgtcgtgaagcaggccgtcctgcaggccgtcaggagctgctccgagggcggtagcgagcacgacgacgaggagtagtagctagctatagctagaggctgagcgcgcgtaagcacacacgccttctgctacttgcatcggtcgatgtcgtccctgctgctggtgcatggctgcctggacaaccgcgcatgtactcgatcgatcgtcgaccggccggcgccctctatgtgtatggtagtagcagtagctctggctggacaaccgcgcatgtactcgatcgatcgtcgaccggccggcgccctctctgtgtatggtagtagcagtagctccgtttctcagctagctccccctctcgatctttaattcgattttttttactcttctctgtttcctctatctatctatctatctatcggtggcaaagatgaaacagagccgctgctcctagctgctgatggtccggtgaattcgttcgtagcagcgccaccgtttcctgtgtaatagtattggccggagggcacgccgtgatttacatatttagtatatatgtctatgatgcatgcgtgataataagatcgatcatgcctgcacgcacgcacgcatgcatgatgtaagaatgacgacgacaacgacgacgatgatgatcatgca

SEQ ID NO: 92648 - DNA, 1279 bp, Zea Mays
ggttcctggtcctccattcaagctccactactccacacctagacttcccaatcctccattgggcaacctgtcacacagtacgccgtcgcctgtggtttggtttgtggagtgagagagaaagagagagagagacatagactcggactcggagagaaggagatgatgtcgagggagcgcaagaaggcggctgctcttcaggagaagctgaagatcctccgctccatcactcactcccacgctctgagcaacacgtcgataatcatggacgcgtcggcgtacatcaaggagctgaagcagaaggtggtgaggctgaaccaggagattgcgtgcgcgcaggacgcgctgagacacaaggcatcatcctatcccacggcagtagggccggcgtccggcgacgcaggcataggagttcacatgcgtcgacgtgaccgtggaagccctaggagtgcaggggtcgtcgttcctggtgaacgtgttctccgacaagagctgcccggggctgctcgtcgccgtgctggaggccttcgacgagctggggctcagcgtgctccaggccaccgcgtcctgcgccgactccttccgcctcgaggccgtgggcggagagaacgtggcggacaacgtggacgagcacgtcgtgaagcaggccgtcctgcaggccgtcaggagctgctccgagggcggtagcgagcacgacgacgaggagtagtagctagctatagctagaggctgagcgcgcgtaagcacacacgccttctgctacttgcatcggtcgatgtcgtccctgctgctggtgcatggctgcctggacaaccgcgcatgtactcgatcgatcgtcgaccggccggcgccctctatgtgtatggtagtagcagtagctctggctggacaaccgcgcatgtactcgatcgatcgtcgaccggccggcgccctctctgtgtatggtagtagcagtagctccgtttctcagctagctccccctctcgatctttaattcgattttttttactcttctctgtttcctctatctatctatctatctatcggtggcaaagatgaaacagagccgctgctcctagctgctgatggtccggtgaattcgttcgtagcagcgccaccgtttcctgtgtaatagtattggccggagggcacgccgtgatttacatatttagtatatatgtctatgatgcatgcgtgataataagatcgatcatgcctgcacgcacgcacgcatgcatgatgtaagaatgacgacgacaacgacgacgatgatgatcatgca

SEQ ID NO: 92649 - DNA, 1227 bp, Zea Mays
ggttcctggtcctccattcaagctccactactccacacctagacttcccaatcctccattgggcaacctgtcacacagtacgccgtcgcctgtggtttggtttgtggagtgagagagaaagagagagagagacatagactcggactcggagagaaggagatgatgtcgagggagcgcaagaaggcggctgctcttcaggagaagctgaagatcctccgctccatcactcactcccacgctctgagcaacacgtcgataatcatggacgcgtcggcgtacatcaaggagctgaagcagaaggtggtgaggctgaaccaggagattgcgtgcgcgcaggacgcgctgagacacaaggcatcatcctatcccacggtgaccgtggaagccctaggagtgcaggggtcgtcgttcctggtgaacgtgttctccgacaagagctgcccggggctgctcgtcgccgtgctggaggccttcgacgagctggggctcagcgtgctccaggccaccgcgtcctgcgccgactccttccgcctcgaggccgtgggcggagagaacgtggcggacaacgtggacgagcacgtcgtgaagcaggccgtcctgcaggccgtcaggagctgctccgagggcggtagcgagcacgacgacgaggagtagtagctagctatagctagaggctgagcgcgcgtaagcacacacgccttctgctacttgcatcggtcgatgtcgtccctgctgctggtgcatggctgcctggacaaccgcgcatgtactcgatcgatcgtcgaccggccggcgccctctatgtgtatggtagtagcagtagctctggctggacaaccgcgcatgtactcgatcgatcgtcgaccggccggcgccctctctgtgtatggtagtagcagtagctccgtttctcagctagctccccctctcgatctttaattcgattttttttactcttctctgtttcctctatctatctatctatctatcggtggcaaagatgaaacagagccgctgctcctagctgctgatggtccggtgaattcgttcgtagcagcgccaccgtttcctgtgtaatagtattggccggagggcacgccgtgatttacatatttagtatatatgtctatgatgcatgcgtgataataagatcgatcatgcctgcacgcacgcacgcatgcatgatgtaagaatgacgacgacaacgacgacgatgatgatcatgca

SEQ ID NO: 92650 - DNA, 1387 bp, Zea Mays
ggttcctggtcctccattcaagctccactactccacacctagacttcccaatcctccattgggcaacctgtcacacagtacgccgtcgcctgtggtttggtttgtggagtgagagagaaagagagagagagacatagactcggactcggagagaaggagatgatgtcgagggagcgcaagaaggcggctgctcttcaggagaagctgaagatcctccgctccatcactcactcccacgctctgagcaacacgtcgataatcatggacgcgtcggcgtacatcaaggagctgaagcagaaggtggtgaggctgaaccaggagattgcgtgcgcgcaggacgcgctgagacacaaggcatcatcctatcccacggtacggtatatataatctaatctcgctgctgctttttggcgccccagcaagcatgcagttcgttcacatgccaataaccaaccaatcgatggagttcggcgggttcaggcagtagggccggcgtccggcgacgcaggcataggagttcacatgcgtcgacgtgaccgtggaagccctaggagtgcaggggtcgtcgttcctggtgaacgtgttctccgacaagagctgcccggggctgctcgtcgccgtgctggaggccttcgacgagctggggctcagcgtgctccaggccaccgcgtcctgcgccgactccttccgcctcgaggccgtgggcggagagaacgtggcggacaacgtggacgagcacgtcgtgaagcaggccgtcctgcaggccgtcaggagctgctccgagggcggtagcgagcacgacgacgaggagtagtagctagctatagctagaggctgagcgcgcgtaagcacacacgccttctgctacttgcatcggtcgatgtcgtccctgctgctggtgcatggctgcctggacaaccgcgcatgtactcgatcgatcgtcgaccggccggcgccctctatgtgtatggtagtagcagtagctctggctggacaaccgcgcatgtactcgatcgatcgtcgaccggccggcgccctctctgtgtatggtagtagcagtagctccgtttctcagctagctccccctctcgatctttaattcgattttttttactcttctctgtttcctctatctatctatctatctatcggtggcaaagatgaaacagagccgctgctcctagctgctgatggtccggtgaattcgttcgtagcagcgccaccgtttcctgtgtaatagtattggccggagggcacgccgtgatttacatatttagtatatatgtctatgatgcatgcgtgataataagatcgatcatgcctgcacgcacgcacgcatgcatgatgtaagaatgacgacgacaacgacgacgatgatgatcatgca

SEQ ID NO: 92651 - DNA, 76 bp, Zea Mays
aggagccccgatattagggcatgtgtatttattctatattcccactatcgcccgacattcatatatttagacaaag

SEQ ID NO: 92652 - DNA, 3101 bp, Zea Mays
aaaaactgaggaaagtatcttatgacttgcatggtacaatgtaaaatctgtgaatagttagttaggagacgatatttgataacccctcaatttcaaaattgtaagtcgtttggttttttctagatttatagttttactatctatatctaggtgcatagcgaaaactatatacttaaaaaagccaagacaacttacaatttgtaatggagtgagtacatattaggaaaaggtctcaacactcaaaaggatgctgctggtgaaattgctgctgaattacaaggtactccagacttcataattggaaactacagtgatggaaatcttgtggcatcgttgctatcttacaagatgggaattacccagtgcaacattgctcatgctctggaaaagactaagtatccagattcagacatattttggaagaatttcgatgagaagtaccatttctcctgtcagttcacggctgatataattgctatgaacaatgctgattttatcatcaccagcacataccaagaaatcgctggaaggtttttattctgcttccgtcttgttggccactgtagatttcttttgtgacttagcattcaccaattaatttgcatgcacactgaatcatgtttacctcactcatgcatatactgttctgatgttaagttactgtattaattgtagttatggtaacatgcaatccatgctttttcatgcattaatcttgcatggactgtgatcacatatgtataatagctattcttaatttcctacaagacgctcatatactaattttttcctctctctcagcaaaaatactgttggacagtatgagagtcatactgcctttactctgcctggtctgtaccgagttgtccatgggatcgatgtcttcgatccaaagttcaatatagtctctcctggagctgacatgtccatatactttccacataccgagaaggccaagcgactcacctctcttcatggttcaatcgaaaatttgatttatgacccggagcaaaacgatgaacacattgggcatctggatgaccggtcaaagcccatcctcttctccatggcaagactcgacagggtgaagaacataacggggctggtcgaagcttttgctaagtgcgctaagctgagggagctggtaaaccttgtcgtcgttgccgggtacaatgatgtcaacaagtccaaggacagggaagagatcgcggagatagagaagatgcatgaactcatcaagacccacaacttgttcgggcagttccgctggatctctgcccagacaaacagggcccgtaacggcgagctctatcgctacatcgctgatacccatggtgctttcgtacagccggccttctatgaagcgttcggtctcaccgtcgttgaggccatgacctgtggacttcctactttcgcgacgctccatggagggccagctgagatcatagagcatggcgtctcgggcttccacattgacccgtaccaccccgagcaggctgctaatctgatggccgacttcttcgagcggtgcaagcaagacccagatcactgggtgaaaatatctggagcagggctgcagcgcatatacgagaagtacacatggaagatatactcagagaggttgatgacactggccggggtctacggtttctggaagtacgtgtcgaagctcgagaggctggagacgaggcgctaccttgagatgttctacatactgaagttccgcgagctggcgaagaccgtgccgcttgcaattgaccaaccgcagtagcttgcgcaactgcgactgcgtagcacttggtacaagactgaaacctgaaggaccttcagtaatttaggcgcggcagacggtagccaataaaatgtgccggagctgaactggtttttattatgtacataatggcagtataacaaaattactgaaggcaggtgggttgcagttgtgtgttcgttactgtttactgtaatatgtcaagctgtcggctgcaatttctttgctggcaagccgcaggcactggtgaagtgctgataaatacatcatattctgttgacctgtgaagaaacttgttcaaggtagattccattgtactagctctgttgctcagcatctccttgtttgggaacattaacaaccagctctcacccctcaataaaatagtcgcatcatgtagctacagttttcatctcaaatccatgtggatcggataagtcaaaatccttaaatttttttttctaatagcatccaatctatatgccataggatcggaataaccctgaaccacatgtctgagacatgggagtgtcaaccgtgccaaacgattcaagaaagaagaacgcgactacaagctcattaaccggctttaaatgtgaatatgtcatacccccttaaccgaaattaatctacaattcgcaacgcaacgcgccgcgtcgttgccagtgtgccacacgggggggaaagaatggtgctaggcactgtcacacgctgatgtcgtaccgtggaacactctgcggtgcggcggcgcggcagagcgggcacgtcgtgctcactcggaaccacgcctggatgcactccgcgtggaacccgtgaccgcagcccagcacgagccgcgtagcggcctcgccgtccccgggctccgcaaggcacaccgcgcactcgaccttgccgtccgcgccgctgcgtgccgtggccacgggcaccgacaccgagagcgagagcggcgatgccgtcgttgcgcgaggcggtccgtaggccgccgccgcgtcccgaggcgggcaagacagcggccgagcggacgaggtggctccgccggtggcgttgcttctggttccgtgcttcctgcactgccagatgaagcgccacacgaggtagagcagcacgacgaggacgctgagggccgccagcgctgacgaggcgcggctggagacccgcccgtgcggcgccggcgcaatgccaccgctatcggtgtccatcgtcgacgagtatcgggctatcggcctaggctctggccacccccgttagctgacaaaactagccggtacgcaccagctcgcatagccggtatagtacgcactactacgcagtctatgcagaggggaagttc

SEQ ID NO: 92653 - DNA, 2977 bp, Zea Mays
gaactttggaacatgatcgaccatgattagctgaaacctgaaagtatgtgtacaaccgcctgctgctcgtttggatggtagtgctgctggcggtgccaaacttgaaatgagaacctattgttgctatattttttctccagtcatcaggcttcttgaattttgaatggttcataattttcaaaaatcaatggccacgatttgttcgagatattactttttgttactcggctgataccagatgcaaaaggaacatcatgcaatcagcggcttgagagaattagtggaacacagcatacttacatattacgagttcccttcagaaatgaaaatgggatacttaagaaatggatatcaagatttgatgtgtggccatatctggaaacatttgctgaggatgctgctggtgaaattgctgctgaattacaaggtactccagacttcataattggaaactacagtgatggaaatcttgtggcatcgttgctatcttacaagatgggaattacccagtgcaacattgctcatgctctggaaaagactaagtatccagattcagacatattttggaagaatttcgatgagaagtaccatttctcctgtcagttcacggctgatataattgctatgaacaatgctgattttatcatcaccagcacataccaagaaatcgctggaagcaaaaatactgttggacagtatgagagtcatactgcctttactctgcctggtctgtaccgagttgtccatgggatcgatgtcttcgatccaaagttcaatatagtctctcctggagctgacatgtccatatactttccacataccgagaaggccaagcgactcacctctcttcatggttcaatcgaaaatttgatttatgacccggagcaaaacgatgaacacattgggcatctggatgaccggtcaaagcccatcctcttctccatggcaagactcgacagggtgaagaacataacggggctggtcgaagcttttgctaagtgcgctaagctgagggagctggtaaaccttgtcgtcgttgccgggtacaatgatgtcaacaagtccaaggacagggaagagatcgcggagatagagaagatgcatgaactcatcaagacccacaacttgttcgggcagttccgctggatctctgcccagacaaacagggcccgtaacggcgagctctatcgctacatcgctgatacccatggtgctttcgtacagccggccttctatgaagcgttcggtctcaccgtcgttgaggccatgacctgtggacttcctactttcgcgacgctccatggagggccagctgagatcatagagcatggcgtctcgggcttccacattgacccgtaccaccccgagcaggctgctaatctgatggccgacttcttcgagcggtgcaagcaagacccagatcactgggtgaaaatatctggagcagggctgcagcgcatatacgagaagtacacatggaagatatactcagagaggttgatgacactggccggggtctacggtttctggaagtacgtgtcgaagctcgagaggctggagacgaggcgctaccttgagatgttctacatactgaagttccgcgagctggcgaagaccgtgccgcttgcaattgaccaaccgcagtagcttgcgcaactgcgactgcgtagcacttggtacaagactgaaacctgaaggaccttcagtaatttaggcgcggcagacggtagccaataaaatgtgccggagctgaactggtttttattatgtacataatggcagtataacaaaattactgaaggcaggtgggttgcagttgtgtgttcgttactgtttactgtaatatgtcaagctgtcggctgcaatttctttgctggcaagccgcaggcactggtgaagtgctgataaatacatcatattctgttgacctgtgaagaaacttgttcaaggtagattccattgtactagctctgttgctcagcatctccttgtttgggaacattaacaaccagctctcacccctcaataaaatagtcgcatcatgtagctacagttttcatctcaaatccatgtggatcggataagtcaaaatccttaaatttttttttctaatagcatccaatctatatgccataggatcggaataaccctgaaccacatgtctgagacatgggagtgtcaaccgtgccaaacgattcaagaaagaagaacgcgactacaagctcattaaccggctttaaatgtgaatatgtcatacccccttaaccgaaattaatctacaattcgcaacgcaacgcgccgcgtcgttgccagtgtgccacacgggggggaaagaatggtgctaggcactgtcacacgctgatgtcgtaccgtggaacactctgcggtgcggcggcgcggcagagcgggcacgtcgtgctcactcggaaccacgcctggatgcactccgcgtggaacccgtgaccgcagcccagcacgagccgcgtagcggcctcgccgtccccgggctccgcaaggcacaccgcgcactcgaccttgccgtccgcgccgctgcgtgccgtggccacgggcaccgacaccgagagcgagagcggcgatgccgtcgttgcgcgaggcggtccgtaggccgccgccgcgtcccgaggcgggcaagacagcggccgagcggacgaggtggctccgccggtggcgttgcttctggttccgtgcttcctgcactgccagatgaagcgccacacgaggtagagcagcacgacgaggacgctgagggccgccagcgctgacgaggcgcggctggagacccgcccgtgcggcgccggcgcaatgccaccgctatcggtgtccatcgtcgacgagtatcgggctatcggcctaggctctggccacccccgttagctgacaaaactagccggtacgcaccagctcgcatagccggtatagtacgcactactacgcagtctatgcagaggggaagttc

SEQ ID NO: 92654 - DNA, 1905 bp, Zea Mays
cttcttttaatgaaaaaaaatctgaggaaagtaccttatgacttcatggtacaatgtaaaatctgtgaatagttagttaggagacgatatttgataccccctcaatttcaaattgcaattcgtttttttttctagatttgtagttttactatgtaactcagtgaaaattatatacctagaaagcaagacaacttacaatttgtaatggagagagtacatattaagaaaaggtccaacactcaaaaggatgctgctggtgaaattgctgctgaattacaaggtactccagacttcataattggaaactacagtgatggaaatcttgtggcgtcattgctatcttacaagatgggaattacccagtgcaacattgctcatgctctagaaaagactaagtatccagattcagacatattttggaagaatttcgatgagaagtaccatttctcctgccagttcactgctgatataattgctatgaacaatgctgattttatcatcaccagcacataccaagaaattgctggaagcaaaaatactgttggacagtatgagagtcatactgcctttactctgcctggtctgtaccgagttgtccatgggatcgatgtcttcgatccaaagttcaatatagtctctcctggagctgacatgtccatatactttccacataccgagaaggccaagcgactcacctctcttcatggttcaatcgaaaatttgatttatgacccggagcaaaacgatgaacacattgggcatctggatgaccggtcaaagcccatcctcttctccatggcaagactcgacagggtgaagaacataacagggctggtcgaagcttttgctaagtgcgctaagctgagggagctggtaaaccttgtcgtcgttgccgggtacaatgatgtcaacaagtccaaggacagggaagagatcgcggagatagagaagatgcatgaactcatcaagacccacaacttgttcgggcagttccgctggatctctgcccagacaaacagggcccgtaacggcgagctctatcgctacatcgctgatacccatggtgctttcgtacagccggccttctatgaagcgttcggtctcaccgtcgttgaggccatgacctgtgggcttcctactttcgcgacgctccatggaggtccagctgagatcatagagcatggcgtctcgggcttccacattgacccgtaccaccccgaacaggctgctaatctgatggccgacttcttcgaccggtgcaagcaagacccagatcactgggtgaaaatatctggagcagggctgcagcgcatatacgagaagtacacatggaagatatactcagagaggttgatgacactggccggggtctacggtttctggaagtacgtgtcgaagctcgagaggcgggagacgaggcgctaccttgagatgttctacatactgaagttccgcgagctggcgaagaccgtgccgcttgcaattgaccaaccgcagtagcttgcgcaactgcgactgcgtagcacttggtacaagactgaaacctgaaggaccttcagtaatttaggcgcggcagacggtagccaataaaatgtgccggagctgaactggttttttattatgtacataatggcagtataacaaaattactgaaggcaggtgggttgcagttgtgtgttcgttactgtttactgtattatgtcaagctgtcggctgcaatttctttgctggcaagccgcaggcactggtgaagtgctgataaatacatcatattctgttgacctgtgaagaaacttgttctaggtggattccattgtactagctctgttgcccagcatctccttgtttgggaacattaacaaccagccctcaaccctcaataaaatagtcgcatcatgtagctac

SEQ ID NO: 92655 - DNA, 2833 bp, Zea Mays
tcgcatctctcgccacttcgcaattcgccagtcgccaccggcaccaccacacccaccctcgcggccgcgaacaaacgacccactgaccactggcgggctgcacggcagccatgtctgcgccgaagctggaccgcaacccgagcatccgcgaccgcgtcgaggacaccctccacgcgcaccgcaacgagctcgtcgccctcctgtccaagtacgtgaacaaggggaagggcatcctgcagccgcaccacatcctcgacgcgctcgacgaggtccagggctccgggggccgcgcgctagccgagggacccttcctcgacgtcctccgctccgcgcaggaggcgatcgtgctgccgccgttcgtggccatcgcggtgcgcccgcgcccgggagtttgggagtacgtccgcgtcaacgttcacgagctcagcgtcgagcagctcacagtctcggagtacctccgcttcaaggaggagcttgtcgacggccagcacaatgatccctacgttctcgagcttgacttcgagccgttcaatgtctcagtcccacgcccaaatcggtcatcatctattggaaacggtgtgcagttcctcaaccgacacttgtcctcaatcatgttccgcaacagggattgcttggagcccctgttggatttcctccgtggccaccggcacaaggggcatgttatgatgcttaatgatagaatacaaagcttggggaggcttcagtctgtgctgaccaaagctgaggagcacttgtcaaagctccctgctgacacaccatactcacaatttgcttataaatttcaagagtggggcctggagaaaggttggggtgatacagcaggacatgttttggaaatgatccatctccttctagacatcattcaggcgccagacccatctaccctagagaaattcttggggaggatccccatgatttttaacgttgttgtggtatcccctcatggatactttggtcaagctaatgtattaggcttgccagacacaggaggacagatcgtctatatactggaccaagtccgtgcactagaaaatgagatggttctccgtttaaagaaacaagggcttgatgtttccccaaagattctcattgttactcggctgataccagatgcaaaaggaacatcatgcaatcagcggcttgagagaattagtggaacacaacatacttacatattacgagttcccttcagaaatgaaaatgggatacttaagaaatggatatcaagatttgatgtgtggccatatctggaaacatttgctgaggatgctgctggtgaaattgctgctgaattacaaggtactccagacttcataattggaaactacagtgatggaaatcttgtggcgtcattgctatcttacaagatgggaattacccagtgcaacattgctcatgctctagaaaagactaagtatccagattcagacatattttggaagaatttcgatgagaagtaccatttctcctgccagttcactgctgatataattgctatgaacaatgctgattttatcatcaccagcacataccaagaaattgctggaagcaaaaatactgttggacagtatgagagtcatactgcctttactctgcctggtctgtaccgagttgtccatgggatcgatgtcttcgatccaaagttcaatatagtctctcctggagctgacatgtccatatactttccacataccgagaaggccaagcgactcacctctcttcatggttcaatcgaaaatttgatttatgacccggagcaaaacgatgaacacattgggcatctggatgaccggtcaaagcccatcctcttctccatggcaagactcgacagggtgaagaacataacagggctggtcgaagcttttgctaagtgcgctaagctgagggagctggtaaaccttgtcgtcgttgccgggtacaatgatgtcaacaagtccaaggacagggaagagatcgcggagatagagaagatgcatgaactcatcaagacccacaacttgttcgggcagttccgctggatctctgcccagacaaacagggcccgtaacggcgagctctatcgctacatcgctgatacccatggtgctttcgtacagccggccttctatgaagcgttcggtctcaccgtcgttgaggccatgacctgtgggcttcctactttcgcgacgctccatggaggtccagctgagatcatagagcatggcgtctcgggcttccacattgacccgtaccaccccgaacaggctgctaatctgatggccgacttcttcgaccggtgcaagcaagacccagatcactgggtgaaaatatctggagcagggctgcagcgcatatacgagaagtacacatggaagatatactcagagaggttgatgacactggccggggtctacggtttctggaagtacgtgtcgaagctcgagaggcgggagacgaggcgctaccttgagatgttctacatactgaagttccgcgagctggcgaagaccgtgccgcttgcaattgaccaaccgcagtagcttgcgcaactgcgactgcgtagcacttggtacaagactgaaacctgaaggaccttcagtaatttaggcgcggcagacggtagccaataaaatgtgccggagctgaactggttttttattatgtacataatggcagtataacaaaattactgaaggcaggtgggttgcagttgtgtgttcgttactgtttactgtattatgtcaagctgtcggctgcaatttctttgctggcaagccgcaggcactggtgaagtgctgataaatacatcatattctgttgacctgtgaagaaa

SEQ ID NO: 92656 - DNA, 645 bp, Zea Mays
tcgcatctctcgccacttcgcaattcgccagtcgccaccggcaccaccacacccaccctcgcggccgcgaacaaacgacccactgaccactggcgggctgcacggcagccatgtctgcgccgaagctggaccgcaacccgagcatccgcgaccgcgtcgaggacaccctccacgcgcaccgcaacgagctcgtcgccctcctgtccaagtacgtgaacaaggggaagggcatcctgcagccgcaccacatcctcgacgcgctcgacgaggtccagggctccgggggccgcgcgctagccgagggacccttcctcgacgtcctccgctccgcgcaggaggcgatcgtgctgccgccgttcgtggccatcgcggtgcgcccgcgcccgggagtttgggagtacgtccgcgtcaacgttcacgagctcagcgtcgagcagctcacagtctcggagtacctccgcttcaaggaggagcttgtcgacggccagtacgtgctgctttactccgcgcccccgttctctgctttgattttgcgtgcgtccctgttctcttaggccccgtttgtttcgttggaattgaattccattttaataattataatttagacaaaactaattaatttcatatatttatatatgtaatata

SEQ ID NO: 92657 - DNA, 620 bp, Zea Mays
cacgtcgtgggccgcgccggctgcgcgccgcgctggcaacgcgagctgcacgctgcgggctgcgcaggcaggccggccacgccaccgcatcgggcgagctacgccggccaccacgctgggttggccgcgccgggcagccgagccgaacgaccgcgcaccggtggacagcgagacgagcatgaatggcgggcgcatcgaggaagcgaatgacgtcgacggtagggcacgacgaggccgacacgaaggacggcggcgatccgggcggctgcgaggcgagacgcatgtatggggaagagagagggaggaagaaggtgctgcgcgcatccaaccagggagaggagggacgccatgcatggggccactcctgctgctaggggtggaagaacacaccagggagaggcgttggctccatggggaaaggctcccgctgctggtgtccatggggagaagatggagaggggaggtggcgtgagatgagagagaagggagctggcggctccgcaggtgcgcgacgtgggcgccgaagggggcggctggcggttttgccgaaggaaacgcgacgtgcgcgatctggacgagaggaagaacgaacggcaggaggaaccgtcaagaagatgaat

SEQ ID NO: 92658 - DNA, 114 bp, Zea Mays
acaatcggtaaccatatcaatatgaaaatatgtcaatataacacgttcacaatacaacaaagtttacaaatatcacaaagaccacaagttcacaattcacaatataaaaagttg

SEQ ID NO: 92659 - DNA, 447 bp, Zea Mays
atgaagcaaagcacaaaagcaaaccggactcgagtcgacgccacgaggtccactaatacaagagcattaccagcaccaatcaatctagctcacagtggagtgtcaacgacagcgacaccacgacgcccacgcgacgctgaagctgatccccagatggatctcccttcactctcccaccagtcgcgctcttcgccgctgtccgacccgcccgggcaaacagacgccggggagaccgcactgtatgttgccatggaggccaacaacgaggaggtcgtccgcctcctcctcttgctccacgacttcgagtcagccaccatccgttcacgcctcgacctcgatgcctctcatgtcaccgccaaacagggccacactgacctgacaaccttcaacttctttgcctttcccttctccaagaagcctacaggagatagtgctgcacagggctag

SEQ ID NO: 92660 - DNA, 4219 bp, Zea Mays
atgtcggcgaccatggcctctgccagtcagccctcctcgcagcaacctccacctccaccgctcactgccgaaatcgttctccgcctcgcctcgcgcgacccctccaccgcggtgcccctcctcccggagctcccgcccgacgatctcgccgatatcgttgcctcgctcaccgccacctcccccgcgggccacctctcccttctccccgcgatcctcgctctcttaccctccccatcctctgcctcctccgcgttcgccgctctcctctccgcgcccagctggccctcctccacgctcctcgccgtcgccacactactccgcgacctcccgccggcctaccgcacccgcatccccgccttcctcgggaagatcatctctctccttccaagtgcggatgcccaggacctccctgctctctcctaccagctcctcctgctcgcgtccaagccgctctacccgcgcgtcgtcctcgcgggactcctgcgcttcttcggcggccgccgcggcgcccgcgttcgcgcgccgccgtctatcgcgcggcaggtcgagagcaccgcgctgatgaacgtctcgttcgcggtcaagcaggaccccgcgctggcgagggaggtcctggccgccatcaaggctgacgccgcgggcgctctcagtggatttgcggtggcagtgatgctgttcgtggccagggtgccgaggttcaacgagggtgccgtgagtgtgctccgggatgcggtcgtggtgtcccgccgggattaccgaatgtcaagatggcggatgtctctcaggcggtgcaagtggttgccggattgtatggaaggggaatatgcacgggccactcaatgtgtcgagaagggaatactaaaatctgtcgacgagagcattgttggcagggagcatgttgtgccaagcattgttcaggtggcttttcgcctgttagaagtctcagaaggtgatcaaggtgaggaagctggcttaggtgaaggagtaatgagcaccgaagaaataggcattaatatgctcaaatcattgtttgaggtccatgaaatggcacggactgagataattgaacagtgcaagttccggattctctcggcaaagcctcagcaaagtgtgccagttctcaggttgattggatgcttgattttgagtcatccatttccaatgctggaattcattgcacatttaaaggagttgttggattatttttcttttatgaatgacaagatatcaactgctttgatcagttgcatcttgccactcacaaagttcagccgtgatctgaaggattacgtaatactggttgtaagaaaggcgatgttcaagagggaggacatggttcgaattgctgctacaaatgctataattgagctgattattgcagaaaacaagaaaaatgaagccaatccttttgaagattcaacaagtcagccaagctctagccaacagcctgaaacacatctagagtttggtaggtgtctctttcaggaactaagtgggttgcttcggagatgtctctcacatcaggccagtgtcaaagaggtcttgtacgagggtcttatacgtactgctatctctgatccagctgtttctgacaatatccttgattttctctggcctcacttccaaaactattactcagaggatgcagaatgtcctcttaaaattggttcatgcttcaaagtagagcatgccaaactatgcattgtggaacctttagattgtctgctgtcatgtatctcaagaattctgcaaattaagcaacatagtaaatgtgaacgaccacgtgatgcatattggaagtgctttggttttgctgcttcacaagataatgaggttggacgagcatcatcaagtgatttattcgtgaaagctttatcaagcatccaaaagtatttgaggatatccctcacagagcagagaggacaaagccaagaagctggatctctttcttcaccatcagagatggctcattgtcataactttgctatgcttggaatcattgaggtttttattgatttttctgcttcaaaactggagaaagcctctggcaaatcgaaggaaatgatagaaaaagaaatcgtggagcttgttgatgcgcacagtggctttgagaaaaaaattagcagtggtagggaaaggatagcacggagaagagcaaatgctggtgatgctacagataagcacaccaacgaacccagggagaattctaatgcttcattgcagaaacatcatggaaacaggggtaaatttgctgattcgagtttgtatgaactttcggtaatgtgtgtcaagcagtgccatgctgataactacaacaatgttagtcaacattctagccaaactaaattgaaccagagctccaatttgacatcctttgtactgaaagcctttcttgaattgttgaaatcacttgcatcaaagcacagtagggacttcacaataaagctgcatggagattttaaaaagttaagccagccaataatgcagctagtatggtgttttctgttagacccaattcaagaaaatggtggaagcaagaagaacatgacccaaggaaagaaaaacactgagtgcaaaaaggatcagttatatttggctctgacatgcctaaaaaaattccttgagccaagtgtttcaggagaacactctagtgatatcattgattttctaatatctttggctccacctaatatagaggatacaatgggtactggggatcttgacaataatgataccactatggttgaagatagaagcacaagaaatgtccatgtgattttgaacatactgaagacgttatatgccagacttcttacccaatcagttttacgtgaatctgaggctgtaattgaattgattctgggtatttcaagaaaactgcaacttgaacgaaggcatcttgttggaaaatgggctacagatctatgtagaaagaaaaccatgcaaagtcctagaatggcacgagagatgttaaaactagctatacatcttacaccagctccagatgacatgattcttgtttatgaggtgtctactgagttgatgaatttaatgacctctggagatgatggagattcttctgatacatttcatatcattaactgtaaaacaaagagctcactcgctgctctctctcttcaaatggttgagtcatctcttactgaattggattggggctttggaaagcttaaagcaatgcttacattaggttatgattgtgctaacattgatgaagatcaaccagcagatgaaataatgctaaggttggctttggagaaagcactctactcgagatcaacattagtagttcaagtgctctcttcctttgcacatatgagccctatggatactcaagcagaacattttctgaaattgactgtcaagttctacaagcttttaactcgcatgtcaaagtcccagattgtacctaaaggctacagacaatccattccaagcctcaagtttcagaaactggcagaagtaacttgcaaaatgctcaccgctcccctttatgattttgtgtttcaacagaatcagcaaatacccataaagggaaacctcgccaaaattagaagagaaaccaaatgtatccctgatcttatttttcagattgaggattatgagaagtatttaatacagctaagcaaactaactaaggtaaaccttttgaggcatgccaaacgcagtgtagcaagagacttccagataaaagataaatctgggggacaacaggaagatgatcacattccagacaatgctgcagcatctgataacgaggctgataaggacgcaatgggtccaaacgcaccagttgaatcatgtgctgacgatgctcaaaaatcatatgctgacgaaaatgcatcatgtgaaagtgggcatgatgaggatgcaggaggtccaaacactccagcagaagcagatgctgatgaaatcattaggtctagcattccatatggtagtccagtccaggagtctgaatctgatagagaagaggaagaattattagcacggacgaagagagctaagacaaaacaagttgtgcaggattctgatgaggatgcagatgagtaggtttttaaacattatcaatagttcaattttcgaagcgtctattgtgggcaacatcatgccaaggtgtatatacataagtttttatgggttatcttgctgattatagacgatgaacacaagagatgtaaaatatatggttttgcaaaaa

SEQ ID NO: 92661 - DNA, 4201 bp, Zea Mays
atgtcggcgaccatggcctctgccagtcagccctcctcgcagcaacctccacctccaccgctcactgccgaaatcgttctccgcctcgcctcgcgcgacccctccaccgcggtgcccctcctcccggagctcccgcccgacgatctcgccgatatcgttgcctcgctcaccgccacctcccccgcgggccacctctcccttctccccgcgatcctcgctctcttaccctccccatcctctgcctcctccgcgttcgccgctctcctctccgcgcccagctggccctcctccacgctcctcgccgtcgccacactactccgcgacctcccgccggcctaccgcacccgcatccccgccttcctcgggaagatcatctctctccttccaagtgcggatgcccaggacctccctgctctctcctaccagctcctcctgctcgcgtccaagccgctctacccgcgcgtcgtcctcgcgggactcctgcgcttcttcggcggccgccgcggcgcccgcgttcgcgcgccgccgtctatcgcgcggcaggtcgagagcaccgcgctgatgaacgtctcgttcgcggtcaagcaggaccccgcgctggcgagggaggtcctggccgccatcaaggctgacgccgcgggcgctctcagtggatttgcggtggcagtgatgctgttcgtggccagggtgccgaggttcaacgagggtgccgtgagtgtgctccgggatgcggtcgtggtgtcccgccgggattaccgaatgtcaaggcggtgcaagtggttgccggattgtatggaaggggaatatgcacgggccactcaatgtgtcgagaagggaatactaaaatctgtcgacgagagcattgttggcagggagcatgttgtgccaagcattgttcaggtggcttttcgcctgttagaagtctcagaaggtgatcaaggtgaggaagctggcttaggtgaaggagtaatgagcaccgaagaaataggcattaatatgctcaaatcattgtttgaggtccatgaaatggcacggactgagataattgaacagtgcaagttccggattctctcggcaaagcctcagcaaagtgtgccagttctcaggttgattggatgcttgattttgagtcatccatttccaatgctggaattcattgcacatttaaaggagttgttggattatttttcttttatgaatgacaagatatcaactgctttgatcagttgcatcttgccactcacaaagttcagccgtgatctgaaggattacgtaatactggttgtaagaaaggcgatgttcaagagggaggacatggttcgaattgctgctacaaatgctataattgagctgattattgcagaaaacaagaaaaatgaagccaatccttttgaagattcaacaagtcagccaagctctagccaacagcctgaaacacatctagagtttggtaggtgtctctttcaggaactaagtgggttgcttcggagatgtctctcacatcaggccagtgtcaaagaggtcttgtacgagggtcttatacgtactgctatctctgatccagctgtttctgacaatatccttgattttctctggcctcacttccaaaactattactcagaggatgcagaatgtcctcttaaaattggttcatgcttcaaagtagagcatgccaaactatgcattgtggaacctttagattgtctgctgtcatgtatctcaagaattctgcaaattaagcaacatagtaaatgtgaacgaccacgtgatgcatattggaagtgctttggttttgctgcttcacaagataatgaggttggacgagcatcatcaagtgatttattcgtgaaagctttatcaagcatccaaaagtatttgaggatatccctcacagagcagagaggacaaagccaagaagctggatctctttcttcaccatcagagatggctcattgtcataactttgctatgcttggaatcattgaggtttttattgatttttctgcttcaaaactggagaaagcctctggcaaatcgaaggaaatgatagaaaaagaaatcgtggagcttgttgatgcgcacagtggctttgagaaaaaaattagcagtggtagggaaaggatagcacggagaagagcaaatgctggtgatgctacagataagcacaccaacgaacccagggagaattctaatgcttcattgcagaaacatcatggaaacaggggtaaatttgctgattcgagtttgtatgaactttcggtaatgtgtgtcaagcagtgccatgctgataactacaacaatgttagtcaacattctagccaaactaaattgaaccagagctccaatttgacatcctttgtactgaaagcctttcttgaattgttgaaatcacttgcatcaaagcacagtagggacttcacaataaagctgcatggagattttaaaaagttaagccagccaataatgcagctagtatggtgttttctgttagacccaattcaagaaaatggtggaagcaagaagaacatgacccaaggaaagaaaaacactgagtgcaaaaaggatcagttatatttggctctgacatgcctaaaaaaattccttgagccaagtgtttcaggagaacactctagtgatatcattgattttctaatatctttggctccacctaatatagaggatacaatgggtactggggatcttgacaataatgataccactatggttgaagatagaagcacaagaaatgtccatgtgattttgaacatactgaagacgttatatgccagacttcttacccaatcagttttacgtgaatctgaggctgtaattgaattgattctgggtatttcaagaaaactgcaacttgaacgaaggcatcttgttggaaaatgggctacagatctatgtagaaagaaaaccatgcaaagtcctagaatggcacgagagatgttaaaactagctatacatcttacaccagctccagatgacatgattcttgtttatgaggtgtctactgagttgatgaatttaatgacctctggagatgatggagattcttctgatacatttcatatcattaactgtaaaacaaagagctcactcgctgctctctctcttcaaatggttgagtcatctcttactgaattggattggggctttggaaagcttaaagcaatgcttacattaggttatgattgtgctaacattgatgaagatcaaccagcagatgaaataatgctaaggttggctttggagaaagcactctactcgagatcaacattagtagttcaagtgctctcttcctttgcacatatgagccctatggatactcaagcagaacattttctgaaattgactgtcaagttctacaagcttttaactcgcatgtcaaagtcccagattgtacctaaaggctacagacaatccattccaagcctcaagtttcagaaactggcagaagtaacttgcaaaatgctcaccgctcccctttatgattttgtgtttcaacagaatcagcaaatacccataaagggaaacctcgccaaaattagaagagaaaccaaatgtatccctgatcttatttttcagattgaggattatgagaagtatttaatacagctaagcaaactaactaaggtaaaccttttgaggcatgccaaacgcagtgtagcaagagacttccagataaaagataaatctgggggacaacaggaagatgatcacattccagacaatgctgcagcatctgataacgaggctgataaggacgcaatgggtccaaacgcaccagttgaatcatgtgctgacgatgctcaaaaatcatatgctgacgaaaatgcatcatgtgaaagtgggcatgatgaggatgcaggaggtccaaacactccagcagaagcagatgctgatgaaatcattaggtctagcattccatatggtagtccagtccaggagtctgaatctgatagagaagaggaagaattattagcacggacgaagagagctaagacaaaacaagttgtgcaggattctgatgaggatgcagatgagtaggtttttaaacattatcaatagttcaattttcgaagcgtctattgtgggcaacatcatgccaaggtgtatatacataagtttttatgggttatcttgctgattatagacgatgaacacaagagatgtaaaatatatggttttgcaaaaa

SEQ ID NO: 92662 - DNA, 594 bp, Zea Mays
actacagcctcatcacttgttagcctagccatagtccacacgacaaactgatcgatggcgcccaccaagagccatgtcctcctcgccgctctcctcaccgtcgtcgccgccgtcggccagacgcctcgcgctgcggaggggttcaatattcctggtcttggcagcatgctgaatcccattcccgtcgtcgccggtgtagtgccgtgcagcatcgggagctccatcaacccggcgctggtgccagggttccctaacgccaacgtgcagctgatgtgcggcggcaccgtggtggccaacgcgacgacaagcatcacaggatccttcatcctcaccccggtaaacgctactcttggtctcttcagctccatgttgggcggccagtgcaatgtggtggtgaccacacccctggtcgcctgcaacgcgtccctggccggcgccactgggacgctcaccgcgcctctacagctccttggctccggcaccggcatcgccggcggtggcagcagcacaatcatcgcgaccattgctggccagcccttcacaatcatcaacgaaatgatcattttcaccacggggctctcctccttagcttag

SEQ ID NO: 92663 - DNA, 1047 bp, Zea Mays
accttcttctcgaccagatccggaagttctgtgggtagaggactagagactgcagatcgagggtctggcagcgggccgtggcagttgggtgattacgacgaagagagatgggcctcctcgacaagctgtgggacgacaccgtcgcaggcccgcgcccggacaccgggctcggccgcctccgcaagcagcctgtgcgtcccgccgccgtcaagatcagtgatccggccggggacgctgcagcgttcgtgccgccctcgccggcttcgggtagcgaggagacgccggtgaaggtgacgcgcagcatcatgatcaagcgccccgcggggtacccgtcgtcgccgaggagcgcggcaagcacgccgccggcctcgccactggggactaccccgcccatctcgccgtttgccggcgccggtggtcggttcagaaggaaatcatcgtccgacgcatacgagagggcgaccccgccagggacgaccagccaccctcctcccttcgacgtgtgaactgaccgcaccctcgcacttgtttttgctccttcacaagcatcatctacggtagacagggaggaccggagaagaaagacatcaagaggggaacggggatgatctagtcgcgggttgtcttacctctactgtgatatattatattgtagatatatctgtatggtttccttcctagtatgtggcatatgatgtataataataatacgtcgaacgctcatggtactgtgctgtgtgtgccatgtgcataggggtgggtgcctcagggtcagggattcgtgtgcgctatgccgcagcttggatctcgccgtgggccgtgtcgtgtgtttcctcctgctctgctatgtatgtcatcactgacggtgtgtggaggttgggttcatatatatgcttgtaatgttagctggtttgaggtgtggactacgagagtagttttgttcagtgtctggtatctagtagctgaaggtgtttgcttgaactctgtgaactgtgatgtgggataatgctaagaagatgaatagatgatcgttgggttgtcttgtcg

SEQ ID NO: 92664 - DNA, 1652 bp, Zea Mays
atgggcctcctcgacaagctgtgggacgacaccgtcgcaggcccgcgcccggacaccgggctcggccgcctccgcaagcagcctgtgcgtcccgccgccgtcaagatcagtgatccggccggggacgctgcagcgttcgtgccgccctcgccggcttcgggtagcgaggagacgccggtgaaggtgacgcgcagcatcatgatcaagcgccccgcggggtacccgtcgtcgccgaggagcgcggcaagcacgccgccggcctcgccactggggactaccccgcccatctcgccgtttgccggcgccgctgtaagtagatgtttcattgatgatcttaagagcggaatactgagcctatctatggtcaagaggttgccaccatttcaaagcagagtcagtgaattagttagctgagtcagatgtctatagtaagctgagtcagatatctatagtagtaacctgtcatgaagccctggtatatacaaattattctacgaaaagctgctattgtgatgtgaaattatttgatcgaagcgccttctgtaaattgcccctacatcccaaattgaacgtcgatggatgtctagaatcaaccacacaaagaaggatatagctgtaatcatttttttttcttgattccagttctaaaaaaataaatatgtaatgtaaccgtgctttagtctagcaagtcgttgctattttactgtatatatactccctcaatcctgatgcatttttttagttgtcctgagtcaaaaaccattgtgaaaatagtaccaacacacctgccacatcaagaggtaaactatacaaaaaatcacatttcataatctcttgctgacctgctattttcatccacacttgttaccgtctggtttcgctctaaaagcgaagcttatgtccatctgcatgtattgatgtgggttttttttttaatatttatgagtgctaccagcatgatctgttccattctgttgattggatggatatcgcataacctttgagtgctgaatttactaggtggtcggttcagaaggaaatcatcgtccgacgcatacgagagggcgaccccgccagggacgaccagccaccctcctcccttcgacgtgtgaactgaccgcaccctcgcacttgtttttgctccttcacaagcatcatctacggtagacagggaggaccggagaagaaagacatcaagaggggaacggggatgatctagtcgcgggttgtcttacctctactgtgatatattatattgtagatatatctgtatggtttccttcctagtatgtggcatatgatgtataataataatacgtcgaacgctcatggtactgtgctgtgtgtgccatgtgcataggggtgggtgcctcagggtcagggattcgtgtgcgctatgccgcagcttggatctcgccgtgggccgtgtcgtgtgtttcctcctgctctgctatgtatgtcatcactgacggtgtgtggaggttgggttcatatatatgcttgtaatgttagctggtttgaggtgtggactacgagagtagttttgttcagtgtctggtatctagtagctgaaggtgtttgcttgaactctgtgaactgtgatgtgggataatgctaagaagatgaatagatgatcgttgggttgtcttgtc

SEQ ID NO: 92665 - DNA, 321 bp, Zea Mays
atggcttacatctgtttgcatcatttgcagtctgacgtgacgatgtctggtcatacccaacctgaaggaccacaccaacttgattcaaaacatgctgcaaattcatgccgaaagaatgtacccggtacatcgttcgtctcagatttgagggatcacatccacgagttcatcaatgcctctgcagatgaacaccggacatgcttcacaaagactctcaaaaggatgttcgatatgtcaaagactgtcactgatagatcctctgaagcagaggaagctggacccgaaagtgtcttgccacttcagaccacagtgtcgcggtag

SEQ ID NO: 92666 - DNA, 759 bp, Zea Mays
agtttgggattagtgatgagtggttttctattggtgattcattaatcatcgcagtccttggtcaggcttcatttatgccagtcttggtgttagctgcaaaactgtgccctccaggaatggaagccactttatttgcaactttgatgtccatttctaatgctcgaagtgttactggtggtctggttggtgctggtctaactcggatatttggggtcaccagggacacctttgggaacctacctctattgattgtcgtctgcaatcttagttcgctgctacccttacctcttttaggtctcctgctagaggaatcaggtgacacagacaatggagaaacaaagaatatctgacttgctgagggtttcatctctgtttgttctgattctcaagtatagcataccacaatgcgcagcttcaactcagatatgatccatccagttgaagttcaaaagatcagtgggaaaatatggaaatcatactggagataagttcagttagtcaccaccaccatcagccagtatctcctgcgactattaacctgtgatcaaagcgattcattggtgatctatgatggcgcacaggtaatcaccactttttttagtttatataagctaccttgcatacaaaggcaaggtcgttttatctttctctatattctttgagtttttgttagctaatgctgcgaccccatgaaaactagagtaggggtcaaagactagtagttgaggattcccttacaaagtcgaatgtattgtaacc

SEQ ID NO: 92667 - DNA, 624 bp, Zea Mays
ctgccgcagccaccgcccgatgtgccctcgtgcacgagacctctcgaaccctctcagaaggcggtgcgatccggtttgggtcgccgtgccgagctcgatgtgcccgacgcgcgcgcggctgagtcgaagccgaaactggcgcatggagacgacgacgataggccgccccttgaggagaagcgccgctgcagcggtgagggcggattcgtcttcctctgcgcccttgctggacacaccgaggctatcggtgggatttctctgccgtctggttcgaacaagctctactccggcagcgtcgatggatctgttcgcatctaggactgcaattccagcaaggtagcttggttctcggctcccgacgatgtatctgattatgcatgggttaccaacaatatctctgatatgcacgggctaccaacaatctctttgattatggacgagtaacgggctgcttccacggaggttccagtgaggaggttgtcattattcgtggtggttcatgtgctgattagcaatgtgtgcaccctatggaaccaaccataaccgaatggtgactcctgatttttttctgattggttgtgcctaaatcaccaaccgtcagcggatttcttatgtttagttggg

SEQ ID NO: 92668 - DNA, 1756 bp, Zea Mays
aagatcgggcgtcgcccgtccgtctcctctccccgctccgctggtcgccttctcccctccccgcgaactcgggctcaaagcaaaccaaaccccttctagggtttgcgctccgggcatgatccccttgtagccaccgcctcccatggccctagccgtgtcctgctggccatgaccacctcggcttccccactcttccccaacccgcgcaagcgccacctcgacgcctccccccttccccgccacttccacggcccgcagagccaaacccgcctaagccagcgccaccgccgccggttcttcttgccgctaccaccgaaggcgcggtccttcgcttccgacatgggaaatcacatgtccagtgccttcggttggcccagtgatgacgggcgggggctcctctgttgctggatcggcaaggcgcggggtctcacggtggccatggatgtggaggcggggacgggactgcatttggtggaccggcggagggttacggattcgaggaagactacgttgaaggaggaggcggtgaagcctccccaatggaagaaaaggaggcccttctacaaggaggcgttggaggcagcagcgacacattacgatccgaggctggaggcaatcgggatcgagataaggctccaaaaggagaagcttgcctatataccaaagtcggataaggctgccaaggaggatatgtctgaactatttaaacctctcactgctgaggaggaaaatgatgttcatgactgtctctacagtagaggctcgagtagcaaagttctagtgctgcatgaaccatctaacattgaggttagcaaagagaaattccagtgcttgagacgtggctgctggttaaatgatgaggttattaatctgtaccttgaattgttgaaggagcgagaaaaaagagaaccaaacaggtttctgaaatgtcatttctttaatacattcttttataagaagcttgcttgtggaaaaaatggttatgattacaaatctgttaaaagatggacctcccaaaggaagttgggatatgaactcattgaatgcgataaaatatttgtccctgtgcataaagatgtacattggtgtttagcaattataaacgtgaaggaaaatttctttcagtatcttgattcccttggtggcatggatcataatgtaccaaaagtactggctcgatatatttcagaggaagtgaaggacaaaagtaacagagtaatcaacaccagtttgtggcatgaagagctagttgatattcctttacagcggaatgggtgggactgcggtatgtttatgctcaagtacattgatttccacagcagaggactgcccctgtcttttagtcaggaacacatggagtattttaggaagaggacagcgaaggagatcttaagactaagagctgactgatggatagacattcatcactttttggaacagaggctgactttttttactgcattttggggattataataaataaaagctgctaagtcaagtctatggcattgttgagcatgctcagggtggggtcatctacctgagatggttggtaatgtggccctgataatgtaaatactatagatattctgtagagaaattttgtttagggatttatttgactcggagaagcagtgaggggggaaatagatgtagctacgctgatattcgttgttggtttaaagttgtttcagattaatttgttcttgtggaattattttgcagccatggttgtcatacttaagttacccttgaa

SEQ ID NO: 92669 - DNA, 3174 bp, Zea Mays
gtaatgatggtcaaagaagtaacatttgtcattggaagtttttatttccttaatgtaatggtagatatttgagcaacttcatcaggagaaatcaagcactccagcattatcctccacttgcagtagtatccagcaggggcagtgctcacatttcaaagatattcagggtcatttatcatctaaagggcacaaagtcccaaccatttactttggaagaggtcggtcttcattgttgcctagtggttcatcagcagatccactcctgcttaatttatgtaaaacgatggagggccagagccagcatagctccgaagataatatatcatctggtcggtttcagctaataaaggaggatttgataaatgcaacggttgacgcgagtgacatttttgagtcatttgatagttgcccatattatctaagtgatcataccaaatgtgccctcatgtcatcagcatatgtacatttacactgcaaagactacttgaagtttacaaaagatatatcttctcttagtcaacgagtgctgctatctggcccaacaggaactgacatctatcaagaatatctggtgaaggcacttgcaaagaattttggtgctagattgctcactgtagattcttccatgctgtttggtgggcaaacttccaaggagccggagacatacaaaaagggtgatagagtgaggtatattggttcggtacagtcgacaggcgttattcttgatggacagagccccccagattttggttcacagggtgaaatatttcttcctttcgaagaaaatagatcatcgaaggttggtgtaaggtttgataaaaaaattctgggaggaaacgatcttggaggcaattgcgaagttgaccatggtttgttttgtccagttgattctttatgcctcgacattccaggatgggaggttacatccaaacatccattagatgtgatatttgagtttatctctgaagaaattcggcatggcccttttatcctttttctgaaggacacggagaaaatttgtggcaataatgattactatcatggtctgaaaagcaagctaaaacatttcccagctggtgcttttataattggatctcaaatccagcctgccaatcgcaaagagaaggcaaagggtagttctccttttctttcgaagttcccatacagccaaactatacttgacctcgcattacaggacattgatgcgataaatggtaataataaagaaacttcaaaggcagcgaagcatttaatcaaacttttcccaaataaagtgatactcgaggcaccacaagatgaaatggagctttcacggtggaaccagatgttaaaccgagatattgaagtccttaaaggaaatgcaaacatttcaaaaatgcgttcttttctaacaagggttggtttggaatgcactgatcttgaggcgatattggtcaaggatcgcgttcttacaaatgagtgtattgataaaataattggttttgctttgagccatcaacttaagaactgtacaaatccagacccccctttgagtaatgtgcagtttgttctatccagcgaaagccttaagcatggtattgacatgttggaaagtatccagtctggctcgaagagcagcactaaaaggaaatcactgaaggatattgctacggaaaatgagtttgaaaagaggcttcttgcagatgttatccctccacatgaaatcggtgttacctttgaggacattggagctttagaaagtgtcaaagatactctgaaggagttagtgatgcttcctttgcaaagacctgaactttttaaccgaggacaacttatgaagccgtgtaaaggaattttactttttggcccacctggtactggaaagacaatgcttgctaaggctgtggcaactgaggctggtgctaatttcataaacatatcgatgtcaagcatctcttcaaagtggcttggtgaaggagaaaaattcgtgaaagctgttttttcactggcaagtaaaattgctccaagtgtaatttttgtggacgaggttgatggcatgctgggaaggcgggagaaccctggagaacatgaagccatgcgtaagatgaaaaatgagtttatggtgaactgggatggtctgagaacaaaggagaaagaacgtgtattagtacttgctgcaactaacaggccatttgatcttgatgaggctgttattaggcggcttccaaggaggttgatggtgaatttgccagatgcatcaaataggagaaagattcttagtgtaatactagccaaggaagatttggcagacgatgttgatctagaagctatagctaacttgacagaagggtactcgggtagtgatctcaagaatctttgtgttactgctgctcatcgtcctattagggagattcttgaaaaggagaagaaggagagagcttcagcagaaacagaaaataggccattgcctctgtcgcacactagcaatgatgtccgtgcattaagaataagtgatttcatacatgcgcatgaacaggtgtgtgcaagtgtttcctcagattccagtaacatgaacgagcttgtgcaatggaatgatctctatggagaaggcgggtcaaggaaaaagacaacgctaagctacttcatgtagctgatgttgcaagtatatcgggagaagtgccctggcacaaagcagaaatggttggaggcagttgggggtgtgtatcgggtgcagttggaaaagagctaggttcacctgccatccatccattgagagaattgatggctcaggtggagcggaatggagtagtatacacattggttgctgcctccactctgggccatgtatcatgcatctggacatgacggatggtctggcttgcagttgtcctaacaacagttttgagtgcaacatatcactgtctgggaaagaaaagaaaagaaaatataccatttgtgttgttcccactccacaggaagcacggcgacgacatcgcccaacaacccttttccatcgtttcttaaaaaataattcattatttaggttgtaaacatttagagcctgtgcaagtgtacagtatgagcatcaggagtattaacctagtgttgatgtctatacctaatctaatttattgattagaatcatttaacatgaaatacatgattattttgtatcttcgtgccttcgttaggttg

SEQ ID NO: 92670 - DNA, 3944 bp, Zea Mays
cccttcgcccctttctctctctctctctctcgcgtgttctcgcgtcgccgtcgccgctggtgcgagatggtcgagacgaggcggagcgccgccgcgaagcgcccggcggcgggggaagaggataagggggcgccggcatcgcctgcatcggctcccgcggagaacgcgggggcgggtccgagggcgggtgacgatgtcgcgtcgtcgcagcccccgaagcgagccaaggttgggtgcacggaggcggacaccgagaagccgttggtggcgccggcagaagtcggcaccgttgcgggcccactgcccaacacggctggtctgcaggcgctgaccggcgccatggacaagctggaggccctcttgaggcccaaggagggtcagtccaatccggccgggcataagcggggcactaacgataaagatataacggcgaagataaagagagccatggatttatcggaggatttatcagcaaagataaagaaaaccaaggataatgtggctgggatattgaataagccacaggcggcagccaccagcaggcgtcaggagccctggtgcagactaatttcacaatataccatgcaccctaccctttctatttatggtgcgcttttcactatcggtcatggagcacatcatgatttcagactgggcgaatcatccactgcctcacctgtttgtagactgaagcaggctaagcgaggtgcactccttgaagtctttgaatccaaagttgtccgtgtcaatgggaaatctttggacaaggctgccaaggttaccttaaatggaggagatgaaattatcttccgttcaccagtgaggcatgcttatatatttgagcaacttcatcaggagaaatcaagcactccagcattatcctccacttgcagtagtatccagcaggggcagtgctcacatttcaaagatattcagggtcatttatcatctaaagggcacaaagtcccaaccatttactttggaagaggtcggtcttcattgttgcctagtggttcatcagcagatccactcctgcttaatttatgtaaaacgatggagggccagagccagcatagctccgaagataatatatcatctggtcggtttcagctaataaaggaggatttgataaatgcaacggttgacgcgagtgacatttttgagtcatttgatagttgcccatattatctaagtgatcataccaaatgtgccctcatgtcatcagcatatgtacatttacactgcaaagactacttgaagtttacaaaagatatatcttctcttagtcaacgagtgctgctatctggcccaacaggaactgacatctatcaagaatatctggtgaaggcacttgcaaagaattttggtgctagattgctcactgtagattcttccatgctgtttggtgggcaaacttccaaggagccggagacatacaaaaagggtgatagagtgaggtatattggttcggtacagtcgacaggcgttattcttgatggacagagccccccagattttggttcacagggtgaaatatttcttcctttcgaagaaaatagatcatcgaaggttggtgtaaggtttgataaaaaaattctgggaggaaacgatcttggaggcaattgcgaagttgaccatggtttgttttgtccagttgattctttatgcctcgacattccaggatgggaggttacatccaaacatccattagatgtgatatttgagtttatctctgaagaaattcggcatggcccttttatcctttttctgaaggacacggagaaaatttgtggcaataatgattactatcatggtctgaaaagcaagctaaaacatttcccagctggtgcttttataattggatctcaaatccagcctgccaatcgcaaagagaaggcaaagggtagttctccttttctttcgaagttcccatacagccaaactatacttgacctcgcattacaggacattgatgcgataaatggtaataataaagaaacttcaaaggcagcgaagcatttaatcaaacttttcccaaataaagtgatactcgaggcaccacaagatgaaatggagctttcacggtggaaccagatgttaaaccgagatattgaagtccttaaaggaaatgcaaacatttcaaaaatgcgttcttttctaacaagggttggtttggaatgcactgatcttgaggcgatattggtcaaggatcgcgttcttacaaatgagtgtattgataaaataattggttttgctttgagccatcaacttaagaactgtacaaatccagacccccctttgagtaatgtgcagtttgttctatccagcgaaagccttaagcatggtattgacatgttggaaagtatccagtctggctcgaagagcagcactaaaaggaaatcactgaaggatattgctacggaaaatgagtttgaaaagaggcttcttgcagatgttatccctccacatgaaatcggtgttacctttgaggacattggagctttagaaagtgtcaaagatactctgaaggagttagtgatgcttcctttgcaaagacctgaactttttaaccgaggacaacttatgaagccgtgtaaaggaattttactttttggcccacctggtactggaaagacaatgcttgctaaggctgtggcaactgaggctggtgctaatttcataaacatatcgatgtcaagcatctcttcaaagtggcttggtgaaggagaaaaattcgtgaaagctgttttttcactggcaagtaaaattgctccaagtgtaatttttgtggacgaggttgatggcatgctgggaaggcgggagaaccctggagaacatgaagccatgcgtaagatgaaaaatgagtttatggtgaactgggatggtctgagaacaaaggagaaagaacgtgtattagtacttgctgcaactaacaggccatttgatcttgatgaggctgttattaggcggcttccaaggaggttgatggtgaatttgccagatgcatcaaataggagaaagattcttagtgtaatactagccaaggaagatttggcagacgatgttgatctagaagctatagctaacttgacagaagggtactcgggtagtgatctcaagaatctttgtgttactgctgctcatcgtcctattagggagattcttgaaaaggagaagaaggagagagcttcagcagaaacagaaaataggccattgcctctgtcgcacactagcaatgatgtccgtgcattaagaataagtgatttcatacatgcgcatgaacaggtgtgtgcaagtgtttcctcagattccagtaacatgaacgagcttgtgcaatggaatgatctctatggagaaggcgggtcaaggaaaaagacaacgctaagctacttcatgtagctgatgttgcaagtatatcgggagaagtgccctggcacaaagcagaaatggttggaggcagttgggggtgtgtatcgggtgcagttggaaaagagctaggttcacctgccatccatccattgagagaattgatggctcaggtggagcggaatggagtagtatacacattggttgctgcctccactctgggccatgtatcatgcatctggacatgacggatggtctggcttgcagttgtcctaacaacagttttgagtgcaacatatcactgtctgggaaagaaaagaaaagaaaatataccatttgtgttgttcccactccacaggaagcacggcgacgacatcgcccaacaacccttttccatcgtttcttaaaaaataattcattatttaggttgtaaacatttagagcctgtgcaagtgtacagtatgagcatcaggagtattaacctagtgttgatgtctatacctaatctaatttattgattagaatcatttaacatgaaatacatgattattttgtatcttcgtgccttcgttaggttg

SEQ ID NO: 92671 - DNA, 431 bp, Zea Mays
ctcggattcggcagacgatgcacggattgggagtaattactcgccggagttgtcgccggagttggaaccgccccgaacttcggcgagcaataccgggagctagggattggatttggagaaaacgtttcgtgttctggaacgggctcgacgagatgaagtcggacatgtatatatatatagggtttggatgagatgaaaattcggttaaaattcggattttactactttttaaaattcggaaaaagcctagaaatccatattttgtgctcaaaatattatatatgctttcaaaaattccaaaaaaaaatcctataaatgttttggcacctaatgaactcaaaaaacataattataatttctaaaaacatttttaagttccacaaataaatagattttggttttcggaaaatagaaaaatattccgaaaaata

SEQ ID NO: 92672 - DNA, 1339 bp, Zea Mays
gacatatgcagaagaaccttatttacaaactgcttgatgaacattgttcattttgatgattagataaattttgtttttcagtatacctctactcattctattgtaaacaattcattctagatatgtaacaaaatggcatgtttatatctttgattcataatgcatttctttcatacaccatgctgtaagagtagaattgatgattctttcatcgcattcaataatctcacaagattgtcttccattttcatagttggtaccagcagtgactgagctcattgttgcccagttgatgtaccttgaatggatgaacagtaaagaacctgtttatatatacatcaactcaactggaacggctcgcgatgatggtgaaccggtcgggatggagagcgaaggttttgcaatctatgatgcaatgatgcgtatgaaaactgagatccacacactttgtataggagctgcagcaggccatgcatgtcttgtgcttgcagctggaaaaaaaggcaaacgttatatgttccctcatgccaaagctatgattcagcaaccacgtattccttcttatgggatgatgcaagcatcagatgttgttattcgtgcaaaggaggttgtgcacaacaggaacacattggtcaaacttttagcaaggcatactggaaatccaccagagaaaatagacaaggtaatgagaggaccattttacatggactccttgaaggcaaaggagtttggagtcattgacaagatcctttggcgcggtcaggagaagtacatggctgacatgctctccccagatgagtgggacaaagttgccggagtcagacatcctgatctaatgtaatgttattcattgaaagttcaacatttggttaatagcttccagggggcagaaacaggtgacgctgaacaataatgcttgattatcaatgataatggttggtaagagccaaggagtacttgtttaactaggtaaacttagagctcagggctgggggctgcgccaccaagatgttgttaatggtctctggatgagagcaggcacgtgtttctcatgaattatcgttgttccccacatcagttctagtccagattttggtatttattagtatatagtccacacattttgatagacccagtggttgaactagccaagttcatattgttatcagcacgaagcgcgatgataatatgatatgttgtccttgaaatttccatggctactgcgcccttgtccttgtgttctggacgttggaaatcctatgtatggatcatatggttttcaaccatcaaatcaaaggactcaggtttgtgtcattgttcttttattattattatttcc

SEQ ID NO: 92673 - DNA, 1632 bp, Zea Mays
atcactccattcatcgccggagtcccgaccaaattatccacacacgcgcctcgcctcccactcccccgaactcacacgccgcggcggagcaccaccgcggccgcccaccatgacctccgcctccaccttcctctctctgcgcctgcccactccctcccacgccacttcgtccctttccttccccccgtctctgctccggcaggcgcgtggcggtgtggcgtcctcgacgctggtggcgcgggcggcagggccaacgggagcggcgggagctccatcgccgctattcaacccccggggagacccgttcctgtctaccctcgcagccgcctcaccggaggaccttgcggccgccgctggtggcgagcgccgtggagaggaccacctgccgttcctcgagatcttccagaacaccaaactcatggcctcgcccgcgcaggtggaacggtctagcagctcgtatagtcagcacagacctagaaggcctcctccagatttgccttcattgcttcttcacggccgaatcgtttatattggcatgccgttggtaccagcagtgactgagctcattgttgcccagttgatgtaccttgaatggatgaacagtaaagaacctgtttatatatacatcaactcaactggaacggctcgcgatgatggtgaaccggtcgggatggagagcgaaggttttgcaatctatgatgcaatgatgcgtatgaaaactgagatccacacactttgtataggagctgcagcaggccatgcatgtcttgtgcttgcagctggaaaaaaaggcaaacgttatatgttccctcatgccaaagctatgattcagcaaccacgtattccttcttatgggatgatgcaagcatcagatgttgttattcgtgcaaaggaggttgtgcacaacaggaacacattggtcaaacttttagcaaggcatactggaaatccaccagagaaaatagacaaggtaatgagaggaccattttacatggactccttgaaggcaaaggagtttggagtcattgacaagatcctttggcgcggtcaggagaagtacatggctgacatgctctccccagatgagtgggacaaagttgccggagtcagacatcctgatctaatgtaatgttattcattgaaagttcaacatttggttaggttaatagcttccagggggcagaaacaggtgacgctgaacaataatgcttgattatcaatgataatggttggtaagagccaaggagtacttgtttaactaggtaaacttagagctcagggctgggggctgcgccaccaagatgttgttaatggtctctggatgagagcaggcacgtgtttctcatgaattatcgttgttccccacatcagttctagtccagattttggtatttattagtatatagtccacacattttgatagacccagtggttgaactagccaagttcatattgttatcagcacgaagcgcgatgataatatgatatgttgtccttgaaatttccatggctactgcgcccttgtccttgtgttctggacgttggaaatcctatgtatggatcatatggttttcaaccatcaaatcaaaggactcaggtttgtgtcattgttcttttattattattatttcc

SEQ ID NO: 92674 - DNA, 1627 bp, Zea Mays
atcactccattcatcgccggagtcccgaccaaattatccacacacgcgcctcgcctcccactcccccgaactcacacgccgcggcggagcaccaccgcggccgcccaccatgacctccgcctccaccttcctctctctgcgcctgcccactccctcccacgccacttcgtccctttccttccccccgtctctgctccggcaggcgcgtggcggtgtggcgtcctcgacgctggtggcgcgggcggcagggccaacgggagcggcgggagctccatcgccgctattcaacccccggggagacccgttcctgtctaccctcgcagccgcctcaccggaggaccttgcggccgccgctggtggcgagcgccgtggagaggaccacctgccgttcctcgagatcttccagaacaccaaactcatggcctcgcccgcgcaggtggaacggtctagcagctcgtatagtcagcacagacctagaaggcctcctccagatttgccttcattgcttcttcacggccgaatcgtttatattggcatgccgttggtaccagcagtgactgagctcattgttgcccagttgatgtaccttgaatggatgaacagtaaagaacctgtttatatatacatcaactcaactggaacggctcgcgatgatggtgaaccggtcgggatggagagcgaaggttttgcaatctatgatgcaatgatgcgtatgaaaactgagatccacacactttgtataggagctgcagcaggccatgcatgtcttgtgcttgcagctggaaaaaaaggcaaacgttatatgttccctcatgccaaagctatgattcagcaaccacgtattccttcttatgggatgatgcaagcatcagatgttgttattcgtgcaaaggaggttgtgcacaacaggaacacattggtcaaacttttagcaaggcatactggaaatccaccagagaaaatagacaaggtaatgagaggaccattttacatggactccttgaaggcaaaggagtttggagtcattgacaagatcctttggcgcggtcaggagaagtacatggctgacatgctctccccagatgagtgggacaaagttgccggagtcagacatcctgatctaatgtaatgttattcattgaaagttcaacatttggttaatagcttccagggggcagaaacaggtgacgctgaacaataatgcttgattatcaatgataatggttggtaagagccaaggagtacttgtttaactaggtaaacttagagctcagggctgggggctgcgccaccaagatgttgttaatggtctctggatgagagcaggcacgtgtttctcatgaattatcgttgttccccacatcagttctagtccagattttggtatttattagtatatagtccacacattttgatagacccagtggttgaactagccaagttcatattgttatcagcacgaagcgcgatgataatatgatatgttgtccttgaaatttccatggctactgcgcccttgtccttgtgttctggacgttggaaatcctatgtatggatcatatggttttcaaccatcaaatcaaaggactcaggtttgtgtcattgttcttttattattattatttcc

SEQ ID NO: 92675 - DNA, 744 bp, Zea Mays
aaatccggtagattcttggtgttgcattgcaacattctaaaccacgctgccagctccaccgtgccggccgccaacctcgttcgtacgtctcaaagccccgcgtccaccatggcttcggcacggcacgcgctgctcctcgcggccgcgatgtcggcgctcgccgtctccagcggagccacggcgtcggagctgatggtctcgaccatccacgcgcgcgtggcggcggagtgggcgtggccgggggccggggccggggcttcttccgacgactcgtgctggggctcgccggaggagtgccccgtctattacggcgtggacgccgaaggcggcgccgcgacgaggggccggatgcggctgcaactgtactacgacgtggacaccgcggccagcctgctgcccacggcgcagtacatcagctacagcgcgctgatgccggactcggtgccgtgctccgtgccgggggcgtcctactacaactgccagccgggcgccgaagccaacccctatacgcgcggctgctcggccatcaaccagtgccgcgagtagctagctgactttgctctcttcttcttcttcctctctctctctctgatttttttttctttctcgttcccgtggcgtggcactttcggccgtggtttcttgctggcttgctgtgtgctcctgtcgacctgcgcgtgttgcgttctcgtctggtcatcgcctggagggcgatggttattaggtgcttttacggttttacca

SEQ ID NO: 92676 - DNA, 1847 bp, Zea Mays
aagtcccaaccgaacctaaaccaaaagcaggcgagagtctagaccgcagcggaaggggagcaggcggcggccccgattgcggtaatggagctgtcgatgagtggcagctccctgcgaacgttcggccggtgcgtgaccttcctcgcgcgcgttgcctccgagctcgtgctccaggcgcaccccgccaagctggagatgcacacgcttaacagctcgcggtcggcgtacgcttcgatctccctagcgcgcgacttcttcgaccagtatcacctcgacgccgcggcttcggcaccgtcttccacgccgctgcagtgcagcgtcctcctcaagtccctgctcgccgtcctccgcacgccgcacgccgcgctcgaccgactcgccgtatccctcccagaacccgacgcacccaagctccagatcaccctccactgcctcaatggtgtgaggaagacgtactggatcgtgtgcagcgcagagcccgaggtgcagtcgctgtcgctagaccggggacggttcccgagccgcctagccattcggccgcgggagctggcgcggctgttgtccaacttccagtcctcgctgcaggagctcacaatcatcgctacagatcctgcttcagggttacctgatgctagcggtgacgtcgggggcaaggctgttgagctccggagctacaatgacccgacaaaagatgactgtgacactagactgcacacacaactgtggatcgaccctgccgaggagttcgtggagtttgttcatgctggtgatccggtggatgtcacctttggggtaaaagaactgaaggcttttttaacattttgtgaaggatgtgaggttgacatcctcctattctttgagaagactggcgaacctgttcttttggtcccgagattcggattggatgatggagcagcttctgattttgaagctactctagttctggctactatgactgtatcacaattatctgacagcgatgatgcccaacaaccagctacatcagcacaaaacgcgggagaaccaggggctgctgcaccaacactagttcctgaaaatgtctcgaaccatactaaaatatggtcggagctttcaggtagtactcccaaaagcattgaagctaacagagaaaatcatgcccagaagaagagaaacgcaagcactaatatgctgaacgacatgtcaatgctgcccaatgttacaaatgctccaagcaagccaccagttgcagataatgcaaacaatataatgcagcctttgcaaatggatcacatggaagaacgtcctgaaggtatcagtggtattcctcgatcacaacaccacccgagcaactgggtcggtgctgatgataacgacgatgacaatgaagacgacgaggagcttttagtccagacaacaccctactatatggactgaggataaatgctgattctaaaatatgtaggtgcatttcagcgtagtgtactatacgaacgaattaggaactagctgaaggctttacgtgtactcttgtagtcttatttctagtagggctggagttggtgactttgactgacgcagtaagaactctcttaacttaggtcatgtttgaatgcgttagagctaatagttaactgctaactagttgaagatgtctaaatagtctatctaatagttcaactattagctatttttaataaattacttaatagttagttagctaatttcgctatcatttttttagtcaactaactaactattagttctaatacattcaaatacctccttagtatctagtgtgactttcatttcttttcataatgtagagaaacattaaagttgatctgttccaattcgcatagatgtta

SEQ ID NO: 92677 - DNA, 885 bp, Zea Mays
aagtcccaaccgaacctaaaccaaaagcaggcgagagtctagaccgcagcggaaggggagcaggcggcggccccgattgcggtaatggagctgtcgatgagtggcagctccctgcgaacgttcggccggtgcgtgaccttcctcgcgcgcgttgcctccgagctcgtgctccaggcgcaccccgccaagctggagatgcacacgcttaacagctcgcggtcggcgtacgcttcgatctccctagcgcgcgacttcttcgaccagtatcacctcgacgccgcggcttcggcaccgtcttccacgccgctgcagtgcagcgtcctcctcaagtccctgctcgccgtcctccgcacgccgcacgccgcgctcgaccgactcgccgtatccctcccagaacccgacgcacccaagctccagatcaccctccactgcctcaatggtgtgaggaagacgtactggatcgtgtgcagcgcagagcccgaggtgcagtcgctgtcgctagaccggggacggttcccgagccgcctagccattcggccgcgggagctggcgcggctgttgtccaacttccagtcctcgctgcaggagctcacaatcatcgctacagatcctgcttcagggttacctgatgctagcggtgacgtcgggggcaaggctgttgagctccggagctacaatgacccgacaaaagatgactgtgacactagactgcacacacaactgtggatcgaccctgccgaggagttcgtggagtttgttcatgctggtgatccggtggatgtcacctttggggtaaaagaactgaaggtgataaattctctatcccttactcttgtggtgggaaacagattgtaatatgatatgccttgaagtggataataactt

SEQ ID NO: 92678 - DNA, 440 bp, Zea Mays
atggcttcggcacggcacacgctgctcctcgcggccgcgatgtcggcgctcgccgtctccagcggagacacggcgtcggagctgatgatctcgatcatccacgcgcgcgtggcggcggagtgggcgtggccgggggccggggccgcggcttcttccgacgactcgtgctggggctcgcctcgccggaggagtgccccgtctattacggcgtggacgccgaaggcggcgccgcgccgtgtggccggatgcgcctgctactgtactacgacgtggacaccgcggccagcctgctgcccacggcgcagtacatcagctacagcgcgctgatgccggactcggtgccgtgctccgtgccgggggcgtcctactacaactgccagccgggcgccaaagccaacccctatacgcgcggctgctcggccatcaaccagtgccgcgag

SEQ ID NO: 92679 - DNA, 1299 bp, Zea Mays
atattcattgttcggcccccaagcgagagcatactccgcattgcgaatttgcaagctaaccatggcaccctcgcatgcccactctcgctccgtgccgctcctcctcctcgtgataggagtttgttgctgctgcagtggagcatcatcgcccgtcgtcggtcgtctcgacgacgacccgacctgtcctcgggagccgacggcggcggtggcagccgtgtcgtcagctgagtctagctacgtcgagccacgccggtgccagccgccggcgccgcacatcgcggtggccgtgttcccctacgacgtcgacccgatgcagttcgcgctgaacctggagtacaccgaggccgagttcttcctgcacggcgcgtacggcgtggggctcgaccacctcgcgccgaggctggcgctgggcggcccgcctccggtgggcgcccggaaggccaacctcgacgaggtgacgaggcgcatcgtcgcggagtttggcctgcaggaagttggccacatcagggctatccagcgcacggtcggcgggattcctcggccgttgatagacctcagcgcccacaacttcgctagggtgatggacgaggcgttcgggacccgcctggaccctcccttcgatccctacgtcaacagcctcaacttcctgctggcctcgtacgtcatcccctacctcggcatcaacggctacgtcggcaccaaccccatcgtcgacggctaccagacaaagaagcttctggcagggctgctgggggtggaggcggcgcaggacgcggtgttccgggcacgcctcttcgagcgcctcggcgaggccgtgccaccgtacgggaacatcacggtggccgagttcacggaccgcgtgtcggcgctgcgcaaccggctggggcggtgcggggtcaaggacgaggggctcacggtgccccgccggctcggcgccgagggcgccatctgcaccaacgtgctctccgcggacagggactcgctctcctacgcccggacgcccgccgagctgctcagcatcctctacctcaccggcgacgagcgcgtgcccggcgggttctatccggagggtgccaacgggaggatcgccaggtcctttcttggcaagccacatggaaactagccaatgcaagctgccgatttgaactacgtgtccgtgcagaaacccggaacatatatatgcatggttggatgaacttgcaaagtttgctgaataatataacagtggattgatatcagcaagtggtccaccaattctttctcttaactttctataagagcttcatttgcttcctaatt

SEQ ID NO: 92680 - DNA, 89 bp, Zea Mays
caaacagtggcgaacttggctggagccggaggtcgtggtccattttcatgctcacggtactccaacttcttttctggctcacctcaatc

SEQ ID NO: 92681 - DNA, 1883 bp, Zea Mays
cttccctcccaagttgcaacggccagaaagccacgttagcctagccgagctcctctgctcctctcgtggccgaacaggcagagcgaccagtctccagagcgctccccatggcgtcaggagctgcggcccctgtcgttcagaccctggtgctgaaggtggccatccactgccatggctgcaagaagaaggtccggaaggtgctcaggagcgtcgaaggcgtgcagaacgtgacggtggacgcctcgcagaacaaggtgactgtggtcggcaccgtggacgccgacacgctcatccagaggttgtacaagtccggcaagaagggggagccctggcagtgccacccgcccgtcaagaagagcgagcccgcgccggaggccccgccggctgcgcatcctgccggtggcggcggcaaggacgctgctactgctgcggccgcggtggacaagaagccggaggagccgatgaagaagccgcagggcgacagctccgaggagaagaagaagaagccggaggaggcggcgaaggagccgcagagcgagaagaagaagccggaggaggcggcgaaggagccgcagagcgagaagaagaagccggaggaggtggtgaaggcgccgcagagcgagaaggaggagccgcagagcgagaagaagaagccggatgaggcggccgagagctccaaggagaaggagaagaaaccagaggagccagtgaaggagccaaaggccgagagctccaaggaggagaagaagaagaagccggaggaggccgtgaaggagccgcagggtgagagctccgaggagaagaagaagaagacggagcaggagggcggggccgcagagaagaagcccgaagcagagtcaaagaagaaggacggcggtgacagcaagggagctgagacgaaggccaagggctcagcagagccggcaaaggaagctgccgccgtccccgcccccgctgccgccgccgctgtcaatgacaaggccgaggcaaagaagagcgagaagcccaaggacgccggtaaggcggcggagccagccgccgtgacgacggagaggtcgctgcctgcgccgccggcgccggcgccaatgcccgcgtacgagcaggagttccgccacccctactacgccccgcagccggtgatgagctaccacgcgtcgcagccgagctcgagcgtgtcgtacacgtacttcgcgccgcagacgcagccggcgtactccatgcaacaggcacagccgcacccacaggcggcggcctcctactccgtgcagccgacaccgccggcgtactactccgcgcaggagctgcagccgcagcagccggcgaagcagtggtcgccgtcgtacctgtacatgccgtacccgcacgcgcaggcggcgccggagccttactaccagcagcaggactactacagcccgcccgggacgcacgcgtcgccgatgcacgacccgtaccgcatcttcgacgacgagaaccccaactcctgcagcgtcatgtgagaggcgcgagctggttggcgcggcccggccgctgccggccgccgtgggcagcgagtagtttggggggggggggggggggggaggcggcgccgcgcgctaccgcaacatcagagagagacgtctctgtggctgtataggtagaggtagagtagcctgttactgtttaccacccctcttccttccattccatttccacctagtatagaggtcaaacctcttctccgtgcagtgacggaaccttttcttaatttccatctttttactgttctgaatcaagtgattagaaagaacatgtaaattgtaacgagatacgttcatgttcaccgcgtctgtatatgccggctactagaactttgaatgagctacggctaccacagatacatacag

SEQ ID NO: 92682 - DNA, 312 bp, Zea Mays
atcgggtcctatttctattaatttttgaactaaaatttatttagggctctaccattttatgaagaagtatttggatcacgatttgattagttagatcatcggctaaaccaatttctgatatggtagattttgtttataatcaaaactgcatacaatttagtactagttggtatcattgttttcttttaaagcaggttcaaagatttaaagacatataatgtcatatttattcttcattttttatattcatggaaaaatataagaaactgagtttttactaaaactcacagaacctagaaaaggaaataaatt

SEQ ID NO: 92683 - DNA, 723 bp, Zea Mays
agagatactaaacagggaagagggcgggcaaagagcaagatgaggcagccgagctcgagtaggttcacgacgatctgtgtcttctgcggcagcagcgaagggaagaggacgagctaccacgacgccgccattgcccttgcccaagagctggtgtcgagaggcatcgacctggtgtatggcggcggcggcataggtctgatggggctcgtctcgcaggccgtccaccgcggcggcaggcgcgtcgtcggagtgattcccaggactctgatgaccactcctgagacaatcggagagacggcgggggaggtggtcgcggtggcggacatgcaccaaaggaaggcagagatggcaaggcaagccgatgcgttcatagccctgccgggggggtatggaacgctggaggagctgctggagatgatcacgtgggcgcagttaggcatccaccgtaagccggttggattggtgaacgtcgatggctattacgaccccctgctggcgttcatcgaccaggccgtggaacacgggttcatcagccccagcgctcgccacatcatcgtccaggctcctacggcgcaggacctcatggccaaacttgaggaatacgtcccgtactacgacagagttgcttccgggctcaactgggagacaagggccgtcgtcgttacggatgcggccggtgctggtggttcagggccagcagggattagcgttccaggcatctga

SEQ ID NO: 92684 - DNA, 411 bp, Zea Mays
gcttgcgctagggccaaggtcgccctctcgctgctgctgctcgttgtcgaggtcgcggcctacctccggggctggcacctcgaggcggacgtgtgcgcggggatcctcgctgtcgacggcctcttcgctgccgcctacgcggtctggatgcacgcccgcctcgactacctcgcgacgctgctgcagttcctcaccaacacctgtgtcgtcctcttcctggtccagagcgtcgaccgactcatgctctgcctgggctgcttctggatcaggctcaagggcgtcaggcccgtgccgtcgctacccgctgacaaggaggacatcgaggccggtaccgagggcgttcccatggtgctcgtgcagatgcccatgtgcaatgagagagaggtgtaccagcaatccatcggtgtggtg

SEQ ID NO: 92685 - DNA, 2893 bp, Zea Mays
ctttgtctttaaagcccgagcaccccctctccagccccgtctccgcctcctctctccctctctacactccaacccaccaccgccccgcgaccggtcctcggcctcgccgtactctccactcgctccaccctgcggcgcgctgctccgtgttcttccctcccgcaaaccgtcggtgaatctcgccgctcctaccgtccggttcagattctcgctaccggtcgggggcgtctgtttctcgtccgggaggccggagggctcctcgtggccggagcctgggggaggagccgccagcgcggcgtgcatggaggctaagatggagtctgaatcactcgattttgaagacaatggagaccaccaaccttcatcagaagcttctcttgcttcagatgtggtatatgatgactcgcttgtatgtccatgcattggaagtgagcaccaggcagaaatccccaatcttgctacagaggatgagtgccgtaagctcatggccagttcacataatgattccatattccatggctatggttaccctgttgtggttgggttagctttaccaattacgtgggcatcaccaagcgaagttgataagacggaagaggtactacaaacgcaaaaatgttcagaatttggaacaaaaggcagcactggagatgtgcacagtcaggtgacctcaacttgtgcaactagcaatgacactggcatatgtgctgcaacattccagtatccacatacagtagtgcctgtagttcaaattaaatctgacagtaatcaagcatacgatgaaaaaatggtcccttgccccactcaagaaggacagaatgttaccaataattcaataatgcagcagagagaaaccaaacaattaagtcctctaccttattcacccgttgctctttggagtgatcttgaggcagaggtatttctccttgggctctacatttttggcaagaatctcaacctgctgagcaggtttctgggtacaaagactgttggtgatgtgcttgcatactactatgggaagttctacagaagagatacatacaaaagatggtcggactgtagaaaggcaaaaactaggaaatgcattcttggggaacgcatttttcaaggatggcgacagcaggagctaatttcacgtctgaaatctaaaatccctaaagaagctcatgattcgttaattgaggttttcaaatctttcagtgatagccaaacatctttgaatgaatttgtcttcagtctgaaatccactgtcggagcagaaacttttgtggaggtggttggggttggtaaagggaagcacgatttgactggattcgttacggaccaatctaaacctaatcatgctctctctgttcatagtgacttgcctacaggtaaagactgttcttcacttgcttcagaagatataatcaagttcttaaatggcgatttcagaagaagtaagactagatcaaatgatattttctgggaagctgtatggccccgtttgcttgcaaaagggtggcactcagagcagcccaaggatgttagcacaactaagagttgccttgtatttcttgtgccgggtataaagaagttctcgagaagtaaactcaccaaaggtactcattattttgattctgtcagtgatgtccttaaaagagtggcagcagatcctgttcttcttgagttaaaggtagatgcgataaacaatggtttaactgctgaggaaaatggcagtatcacagatgtgaaactgaaccaggatagtccgttagatggatatcaggagcttcctaagttcacaataatcgatactagcttagtcgaaggggaagagccattcaatatacgggaactgagaaacttacctgcagatgcaaatattacttttctcctttcacaacattcatctaatatggtgagttacagctcctctgaagaggaagctgccaatgatagattatcagatgaccaggaagattgtggacgagttaaagctgaggccaaggaaattgaaatggtttcagctggttcattgcaaaacatggttactgctaatggccactcttctaatgtcaatgataaaattgatctgacaggcatctatggcatcaaaacaaaacctgaaaggcgcaagtatttgtccccagtgtcaaagcgcagaagattaaatagctgtagtaatgaacaggccagccggcgcagtttttctttctcaaaaggtggtggttttgagaaacagaaaagcaagccaccgttgatttcatccaaaccagctgctgttgaagttggcgacacttttcagagtaaaacaatttcaagctgttctacaaaggagaagccatctgagcacacagcagatgcattgaactcccttatcgatgatgagcaaaatgcgagaatggttatggaggttgaagcagtggctgaagttcactcaaaggtcattgccgttcagccaaaatttgtcaaagaaagagctgagtttattggtccagttgatttgaataagctggaaacgctacatgatgataaggcaagtcgaagcattgacaccacatcattgggaaatcttggtagcatgaaggttgatgaagctccctccagttcagacaagaacatggcctgtgatccttcaggggcagcaggaagacctgttagcgaggcacctgatcctgctttgcaggtgaatgctcggaggcacggaaccagaaacaggcctcccaccgcaaaagctttagaagctgtcgcttttggacttcttggaagcgggaagcggaagggtgacctgaaaaacagggcgacaagccggccttctcagcgagctcgcaaatctgccaaagacttggttcccgtggcttctagtggtgacgcaaaggcgtcctgcatagatgcagaagaacagcgatga

SEQ ID NO: 92686 - DNA, 852 bp, Zea Mays
atggcgagtggaaggacggtggagatcgagagcatgggggcaggcgttgttggggccgagacaaatgatatgaacttggcattcgatgcaactcgaaaagcagaatctgtgattgcatctgctactgggtgtccggaaagaggtgttgttggtgatggccttgcttcggtaaaagcagtcttggatcttaacttcaacaatgtgaatgaactactaaggcttgttcgggtttcaatggaatcaataagcagctgatgatgtgttcaaaaatcggaattgcacagaatgtcacacagtgaactgctgatattggattaacatgcaatctgtgctccgtgatgctggttgcagctatgtcagtatatttttacagtgcaaaacaaattaacttgaaatcaagcattccctttcctaaattggaaattatgtgaaccaaggttctggaattcgggagcggtactgctgcatcttgtggtagtgtaaccatgcattgatgtgtgtttgtttcaatgggtcagaggagatcgattgcgattacctgcactacctgtcatgtacgggcgctcgtacgccaggcagcgtcgcgcccgtgacaggcgccgcgcacaggagcgcgatctgggagatcagcaggaacctatggaaagcagtggccaggaaggaaattagaagaatggaaagttgagggaaggaaaggagagattgattagtgattgattaagtgattgattagtgattgattagtgttaccatgtttaggcttgcctaaaataaaggctctaggacagcaggccgatggctatatatgcggcacaaggagacaggaataaagggcagcaaacaagttatctc

SEQ ID NO: 92687 - DNA, 2102 bp, Zea Mays
gaggtattatggaaaggaacaaggcttatccaaagttaaagactaaaataaggattgatcaagatgaacagaaatcatataagaaaactaaaattgaggcttggcatcaaattgacagaggccaggaccacaggtgtgattcagatggtgtggaagttcctgatgaacacaaagctttacttgcaaaagcaaaagcaatgaagggttcacatgaaactgatgacatgtctttatgcaagaaaaatatcgcttcagggtatgattcatcggaaaacgtcaataatgttaatgctttggatgtaccctttcacagtgagaagaaagaacatccttctgatgtagacatattagatttgtcttgcaagaagaatgcagtgaagaaattggagattcagcttaactctttacattgtataagcaatgggccccagaagaacttgaaggaaaagaagtctaataaattgaagtctaaagagatggcatccaaggaagatagtagacatggaaaagtgcagcatgcagatgccgtgttgtcttctctggggcacctaaattatgaactaggtgctgacaacaagtttgttactgggaaagaaagtctttcagaacaattagaaactttacctgccaagcaagttttggacttggctgaagcccctggaagggatgtagcctatctgcagtcttctacaactgtgagctcaagctcttcgaagatttcaagctccagaagaaacacaaactcgcaagaagcaaatgactctccaattaaatcagcctcttcattgccactgagagatttcagcattaaaatgatttccggtaacagaaaagatggaacagtggatgcttccttgggcaacacacacaatttagcaaggtaccaaaacagtgaagtcattgcattaaattatggtcagcaagctggaaactttgagggggatcaggttgcaggtgaacccaattttcatggttctttgcaaggaatctcggatagcaatatcaaggaaatacctcagtcagctggtgctcaagtctccaatatcactggttttgggaggagtttggataatagtctgccggaggcatcatgtagagaggaccttactgtaaatgatactgttgtaggtagaggagaccatcaactgtgttctggtgaacaaaaggactttaatatggaggttcgtttaccactacctgatcagcattgttttggcaggattaacactgagtctggttctgttcgacatgaaagtaagaacattgaagttcgccaaggtagtggaactgctcagcggctgggcatgttatttaaaaaagaaaaatctcaccttagaatccttaatcgagatattcagaaccatgttaatcaagttgtcaattttcctttgaaaggaggtaaacaaaaggtctgccctacttcagtaaaatctgaatcgttgaaaatgaaagcaaagttagtgaggttcaatgttgaaactggagtgcaacatggcagtgttaagcaagtgacatcaagcactttggacacaagtccaatgaggaaggatggtagtatgattacatttgctctcaaggaagctagagatctaaagcataaagcaaatgatttgaagaataaaggacaagaacttgaaagtacaggtctgtacttcgaggcggctttgaagtttctgcatgttgcgtttcttctagaaactcctagttttgacatttcaagacaaggtggtggaggtcggtcaatgaagatgtactctgaaactgcaaaattatgcaatttttgtgcttatgaatatgaacggtgcaaaaaaatggcttctgctgctttagcgtacaagtgtgtagaagttgcttacctcaaggctgcatactacaaacaccgtactgctacaaaagatcaacaggaacttcaggcagctgtacagataacccgaggtgaaccaccatcgccttctgccctagatattgataatttaaatagccatggatcatcaaatgcctcctcattaaagggtgacaattcacctcatgtgccaggcaatcatttgcctctagctattcacaaccaagcccagctgttgagattacttgcctatgtaagt

SEQ ID NO: 92688 - DNA, 1173 bp, Zea Mays
atggcatggctagccgcgacggtggcggctgtggcagggccgccggcgcccatggtcactggggagtgggggggagggctccatgggaaggggaggggtgaggccggcggcaccagctggggggaagacgatggtggcgggtggacgccggggatgttaagcagggcacaatctttgacagggtcgaaatttggtggatatggttcatttttacccacatatcagcgttctcccctgctgccccaatctgaaagcccacacattgcattgaacattagcatgtcaggatcaccttaccaaccatctgctgagagaatggatcaaaacccctctactgtagctgtggagcccatttcccgaaataacggttttggagcaccttcagctagtgattcaatcaagaagaaaaaattcctgagtacaaatgatgaggaatcgattgcaggttccgattctttggacacttcacttagtggtagtgactcaaagtcactcaaatttcagaccaaagtttgtctcagcaatgatctgccaagagaaaatgcagttatctatagtggcctgggccttgatatttctccacgttcgtccatggaggagagtcctaatgggcttgggggactatctcctgagtgcagcaatgtgccatttgaatcacctcggactatcctacaggtcatgacatgccttccagttcctggaggtttcttgttgtcacctctgcatgggaatttgctgcaattaagaaataaagttgctccggtgctaaagaatttggaaacacatttagacatggaaaatgtatctagagcattggaaggacgttcacagtcttttcatccccttggacttatcagaggcaatgtgactaagcagatgaggccttgcagtaagaaaaaagtggcagtggatacaaagactagcaagtacaaaggtgatgctagtgcaaccatgaacaatgaagttaacatccaagtgcctgccagccaaaaagagaagatgaacacgaataacaagaatgagtttgaagttggttctgcaaggaaggagatcccagccagtgtaaagcatggagagttgtatatgcagccggccagcagtgtatcaactatgaatgcatatcatgttcctgcaccagttgtgatcgaggaccactgggcctgggatgaatag

SEQ ID NO: 92689 - DNA, 1606 bp, Zea Mays
caggcgtgtgcgcagtagagtgtttggcctgaactagcgaaacaacacaagctagctagacaggcggcccctgctgcttagctctcgatcctgttgttaggcacctattgagagagctagctgagcattcaagatgattactgttgggcacccggtggtgtttgctgtggggatcctaggcaacatcttatcattcttggtcacccttgcaccagtgccgacgttctaccgtgtttacaagaagaagtcgacggagtcgttccagtcggtgccgtacgtggtggctctgctgagcgcaatgctgtggctctactacgcgctgctcagcgtggacctcctcctcctctccatcaacaccatcgcctgcgtcgtcgagtccgtctacctcgccatctacctcacctacgcgcccaagcccgcgatggctttcaccctcaagctgctctgcaccatgaacatggggctcttcggggccatggtcgccttcctgcagttctacgtcgacgggcagcgccgcgtctccatcgccggcggcgtcggctccgccttcgccttcgccgtcttcgtcgctcctctcaccatcatccggcaagtgatcaggaccaagagcgtggagttcatgcccttctggctctccttcttcctcaccgtcagcgccgttgcctggttcttctacggcctcctcatgaaagatttcttcgtcgcgatgccgaacgtgctgggcctgctgttcggcctggcccagatggccctctacttcgtgtaccggaaccggaacccaaagaagaacggcgccgtgtcggagatgcagcaggcagcggcggtgcaggccgacgccgagaaggagcagcagctgcggcaggccgacgccgatgccgacgccgacgggaaggctgcgacaaccgacgacgacgggggccagaccgccgtcgtcgtcgacatcatgccgccaccgccactgctgccagcggagagggccccgccgctgccgctgcccccgcatccggcgatggtgatgacgaccgcgcatcagacggccgtggaggtggtctgatctatacatcggcagagattgatcgatcgacacacacgcatgttccggagctagctacatgcacgactgacctgactatgattgctgctcgatcattcatttactttgtgctactagtatatgtatgcgtgtttgacgacctatatgtgtatcgcgcgcggcaccacggtacaagtagacgcgtatagctatagtatatatatagaagtaagtactgtacgtacgaatgaatgtctcctgtggtgcccatatatgcgtatgtgtactgtaaggtcgtgttatctcttctacctatacacgtctgtatcttatgcctgttgcctacatgcgcctctatcgttcaactagctaagcttattattatgtgaagaatccaaatgatcaacagagccagaggattgagacttaataaattttcacttaagcctaaattcagcggctaatagccgccgaaattaacagtccacggcatcgtaagccacccaaaataaagaataaatttcagcagttacgccgccgccgccgccgccgccgccgcccatagccgtcgaa

SEQ ID NO: 92690 - DNA, 378 bp, Zea Mays
atggtgctcgcccaggctcgccggcatccatggccgcagttccctagatgctgccagctctggctccctagacgccgccagctctggctcgccggtctccgggctcgttggagatggcatattacctccaagacctacaacctagtgctcctcgacgtcgacagtcacgaccgcttcctcaagtccgtttgctgcaagcacgacgaggtgctgctcatcatcaaggtctacttcaagcgcaccggagcagagtggaggctggagaggattaggaacactttcaaggggatcgagggatcccacatgtggccctttcagatgaggattctatgcttagggcttaccgtcctgattctgattctagggtgtaggttgtag

SEQ ID NO: 92691 - DNA, 1614 bp, Zea Mays
atggcatctcacaatgctagtgttagtgtcccagagatggcgtcgggtttccatccgactaagtcggaggagtggacagcagagaggatgagccagctaaaggagaaaatagctgggctattcggagcctgcacgacgacagccgagcaactcaacctagtggacacgctccagcatctaagcatagaccaccatttcagcacccagatcctctccgtcctcactagcgcccacgccgcggaagaactcaacagcggcggcgcctgtctccacgacgtcgcccttcggttccgcctgctgcggcagcaagggttctgggtgtctccagaggtattcgaccggttcagagacgaaaacgggagctttgacgtcggcgtggcagacgacgacgcgagggggctgctgagcctatacaacgcggcttaccttctcacccatggagaggcagagctcgaggaggctgcattgttcgccaggcagcgtcttgagtccatgtccatgagaggtagccttgagtacccgctggcccagcaggtgagccgagcgctccacctgccactgccgcggacggtcagaagagtcgagactctgcattatgtctcggagtacggaggagacccgacgcatgagcatgagcatgacccctccgttctggagttcgcccggctggatttcgagctcttgcaacgtctccacgtgaaggagctcaaggctctttctaggtggtggaaagatctctacaacgaagctggagtgacctactcgcgggaccgcgtggtggagtgctacctgtggtcttacacggcgtactacgaggaagaacacgcgagggcgaggatgatcctcgctaagatgatcgcgctgataatcttgacggacgacacctacgacgtccgcgctactctggaggagtgtcgaaggttcgatgaagctatacagagatgggacgagagcgctgtttctctcctgccggactacctgaagaagttctacctcaagctgatgaacatctttgaggagtttgaggacgagctggaaccacatgagaagtgcagggtcgcttttagcagaaaagcgtttcaaacattatcgagtaattatctccaagaagcggaatggtttcatggccgttacaagccaagattcgaagatcaggtaaaggtatccactgtgtgctcaggcgctccattcgcagctgttgggttactagttggcatgggaggtgatgtagcaacccaggaggcacttgagtgggcaatgggttgcacggatgctgtcaaggctttcgcagaggtcacacgcttcatgaatgaccttgcttcgtataagcgtggaaagaacaaaaacgacgtggacagctcggtcgaatgctacatcagtgagcatggcgtcacagctgaggttgcctttgcacagataagctccctgattgaagatgcatggaaaactataaacggagcacgctttgagaacagcaaactacttccagcagtgcagcgagttgccgacataaccgccagcatgccgttgatgtacggtgacaacaaggacgcgttcacgttcagcgacggtctaaaggggctcatcgaacgcctgtttctcaacaggccataa

SEQ ID NO: 92692 - DNA, 1422 bp, Zea Mays
gccattacagtctgacagcgaccccacaggctcgtcctccgtaagtccgtcctcctgtcgctgtcccgctcatgaaccgggcaacaactacggagcgagcggacgaggagatgctgtttcgattttccacttcctcttcctctacctctacctcgggccggaccgcatggctgggcagcgctgggtcggtaaagtggcggctgctgctgttgtggcgctcttgctcctgtcgaccgctcttcccggaggagcacggagagaacccgatgtcaacaacaatggacggagttttgtttttaactatactctgaccaaagctgttgtggaatatgctgcagctgtatatatgacagatctgacggctctatacacatggacatgctcaagatgcaatgacttgactcgaggctttgagatgacttgtataattgttgatgtccagaattgcttgcaggcattcgtcggtgttgatcacaatctcaatgctatcattgtttccatcagggggactcaagagaacagcatacagaattggattaaggacctgatatggaagcaggttaaacttaattatccaaacatgcccaatgctaagttttacgtccagccatcacgaatgctgttcgcaaggcaaggaagctacatggacacagtgacgtaattgtaacagggcattcgatgggtggagcactagcttctttttgtgcccttgatcttgcaatgagctttggaagtaacaatgttcatctgatgacttttgggcaaccacgcgttggcaatgctgcatttgcctcctactttgcccagtatgtgccatacacagtccgaatgacacatgaacgtgatattgtacctcatctgccgccttatttcttcttcctcccaaaactgacatacaagcacttccccagagaggtgtgggaacatgaagtcgatggcaacacaacctatcaagtctgtgatggcagcggtgaagacccaaactgttgcaggagtgtgtttgcgctgttctggagcgcttctgaccatttgacctacatgggagttgagatagcggccgacgactggagcacctgcaggatcgtccttgggcgaggcgtcgagcagctcaaagggagtcttcccaacaacattgttacgtccggacgctccgtcgacgttgtcatcgcagacgatgatacacttcagattgattgacgcagttcagggtagtcgttggtagtcatgcatatagctagaagataagctgttggctgttggtgcatgcttcagagcaaatcaaagggctttcttcctttaatcctttttttttgcttcgtgtggttctttcagccatatgtactatgcagcttgtgaatgtaaagctgtacggaaggtgacatgtttctagcttcgtatatagttggagctcaatacagccaa

SEQ ID NO: 92693 - DNA, 1556 bp, Zea Mays
gccattacagtctgacagcgaccccacaggctcgtcctccgtaagtccgtcctcctgtcgctgtcccgctcatgaaccgggcaacaactacggagcgagcggacgaggagatgctgtttcgattttccacttcctcttcctctacctctacctcggggtaacttgtagaactcaatttcacccttgcgttccgtccctttcctatgttcctccagcggtccagcctagtagtttcttgctctgcaattcgccagttttgggctcctgatcgatcgaatcgtcgtcctggtggctcccatacagccggaccgcatggctgggcagcgctgggtcggtaaagtggcggctgctgctgttgtggcgctcttgctcctgtcgaccgctcttcccggaggagcacggagagaacccgatgtcaacaacaatggacggagttttgtttttaactatactctgaccaaagctgttgtggaatatgctgcagctgtatatatgacagatctgacggctctatacacatggacatgctcaagatgcaatgacttgactcgaggctttgagatgacttgtataattgttgatgtccagaattgcttgcaggcattcgtcggtgttgatcacaatctcaatgctatcattgtttccatcagggggactcaagagaacagcatacagaattggattaaggacctgatatggaagcaggttaaacttaattatccaaacatgcccaatgctaagccatcacgaatgctgttcgcaaggcaaggaagctacatggacacagtgacgtaattgtaacagggcattcgatgggtggagcactagcttctttttgtgcccttgatcttgcaatgagctttggaagtaacaatgttcatctgatgacttttgggcaaccacgcgttggcaatgctgcatttgcctcctactttgcccagtatgtgccatacacagtccgaatgacacatgaacgtgatattgtacctcatctgccgccttatttcttcttcctcccaaaactgacatacaagcacttccccagagaggtgtgggaacatgaagtcgatggcaacacaacctatcaagtctgtgatggcagcggtgaagacccaaactgttgcaggagtgtgtttgcgctgttctggagcgcttctgaccatttgacctacatgggagttgagatagcggccgacgactggagcacctgcaggatcgtccttgggcgaggcgtcgagcagctcaaagggagtcttcccaacaacattgttacgtccggacgctccgtcgacgttgtcatcgcagacgatgatacacttcagattgattgacgcagttcagggtagtcgttggtagtcatgcatatagctagaagataagctgttggctgttggtgcatgcttcagagcaaatcaaagggctttcttcctttaatcctttttttttgcttcgtgtggttctttcagccatatgtactatgcagcttgtgaatgtaaagctgtacggaaggtgacatgtttctagcttcgtatatagttggagctcaatacagccaa

SEQ ID NO: 92694 - DNA, 1459 bp, Zea Mays
gccattacagtctgacagcgaccccacaggctcgtcctccgtaagtccgtcctcctgtcgctgtcccgctcatgaaccgggcaacaactacggagcgagcggacgaggagatgctgtttcgattttccacttcctcttcctctacctctacctcgggccggaccgcatggctgggcagcgctgggtcggtaaagtggcggctgctgctgttgtggcgctcttgctcctgtcgaccgctcttcccggaggagcacggagagaacccgatgtcaacaacaatggacggagttttgtttttaactatactctgaccaaagctgttgtggaatatgctgcagctgtatatatgacagatctgacggctctatacacatggacatgctcaagatgcaatgacttgactcgaggctttgagatgacttgtataattgttgatgtccagaattgcttgcaggcattcgtcggtgttgatcacaatctcaatgctatcattgtttccatcagggggactcaagagaacagcatacagaattggattaaggacctgatatggaagcaggttaaacttaattatccaaacatgcccaatgctaaggtccacattgggttttactcttcttacaataatacagttttacgtccagccatcacgaatgctgttcgcaaggcaaggaagctacatggacacagtgacgtaattgtaacagggcattcgatgggtggagcactagcttctttttgtgcccttgatcttgcaatgagctttggaagtaacaatgttcatctgatgacttttgggcaaccacgcgttggcaatgctgcatttgcctcctactttgcccagtatgtgccatacacagtccgaatgacacatgaacgtgatattgtacctcatctgccgccttatttcttcttcctcccaaaactgacatacaagcacttccccagagaggtgtgggaacatgaagtcgatggcaacacaacctatcaagtctgtgatggcagcggtgaagacccaaactgttgcaggagtgtgtttgcgctgttctggagcgcttctgaccatttgacctacatgggagttgagatagcggccgacgactggagcacctgcaggatcgtccttgggcgaggcgtcgagcagctcaaagggagtcttcccaacaacattgttacgtccggacgctccgtcgacgttgtcatcgcagacgatgatacacttcagattgattgacgcagttcagggtagtcgttggtagtcatgcatatagctagaagataagctgttggctgttggtgcatgcttcagagcaaatcaaagggctttcttcctttaatcctttttttttgcttcgtgtggttctttcagccatatgtactatgcagcttgtgaatgtaaagctgtacggaaggtgacatgtttctagcttcgtatatagttggagctcaatacagccaa

SEQ ID NO: 92695 - DNA, 1605 bp, Zea Mays
gccattacagtctgacagcgaccccacaggctcgtcctccgtaagtccgtcctcctgtcgctgtcccgctcatgaaccgggcaacaactacggagcgagcggacgaggagatgctgtttcgattttccacttcctcttcctctacctctacctcggggtaacttgtagaactcaatttcacccttgcgttccgtccctttcctatgttcctccagcggtccagcctagtagtttcttgctctgcaattcgccagttttgggctcctgatcgatcgaatcgtcgtcctggtggctcccatacagccggaccgcatggctgggcagcgctgggtcggtaaagtggcggctgctgctgttgtggcgctcttgctcctgtcgaccgctcttcccggaggagcacggagagaacccgatgtcaacaacaatggacggagttttgtttttaactatactctgaccaaagctgttgtggaatatgctgcagctgtatatatgacagatctgacggctctatacacatggacatgctcaagatgcaatgacttgactcgaggctttgagatgacttgtataattgttgatgtccagaattgcttgcaggcattcgtcggtgttgatcacaatctcaatgctatcattgtttccatcagggggactcaagagaacagcatacagaattggattaaggacctgatatggaagcaggttaaacttaattatccaaacatgcccaatgctaaggtccacattgggttttactcttcttacaataatacagttttacgtccagccatcacgaatgctgttcgcaaggcaaggaagctacatggacacagtgacgtaattgtaacagggcattcgatgggtggagcactagcttctttttgtgcccttgatcttgcaatgagctttggaagtaacaatgttcatctgatgacttttgggcaaccacgcgttggcaatgctgcatttgcctcctactttgcccagtatgtgccatacacagtccgaatgacacatgaacgtgatattgtacctcatctgccgccttatttcttcttcctcccaaaactgacatacaagcacttccccagagaggtgtgggaacatgaagtcgatggcaacacaacctatcaagtctgtgatggcagcggtgaagacccaaactgttgcaggagtgtgtttgcgctgttctggagcgcttctgaccatttgacctacatgggagttgagatagcggccgacgactggagcacctgcaggatcgtccttgggcgaggcgtcgagcagctcaaagggagtcttcccaacaacattgttacgtccggacgctccgtcgacgttgtcatcgcagacgatgatacacttcagattgattgacgcagttcagggtagtcgttggtagtcatgcatatagctagaagataagctgttggctgttggtgcatgcttcagagcaaatcaaagggctttcttcctttaatcctttttttttgcttcgtgtggttctttcagccatatgtactatgcagcttgtgaatgtaaagctgtacggaaggtgacatgtttctagcttcgtatatagttggagctcaatacagccaa

SEQ ID NO: 92696 - DNA, 2395 bp, Zea Mays
gatcactcaattcctcgttgcggttcgcgggtcctggaagcaggaatcatcaagacgctccgcgcgccattacagtctgacagcgaccccacaggctcgtcctccgtaagtccgtcctcctgtcgctgtcccgctcatgaaccgggcaacaactacggagcgagcggacgaggagatgctgtttcgattttccacttcctcttcctctacctctacctcggggtaacttgtagaactcaatttcacccttgcgttccgtccctttcctatgttcctccagcggtccagcctagtagtttcttgctctgcaattcgccagttttgggctcctgatcgatcgaatcgtcgtcctggtggctcccatacagccggaccgcatggctgggcagcgctgggtcggtaaagtggcggctgctgctgttgtggcgctcttgctcctgtcgaccgctcttcccggaggagcacggagaggtacttcgatctcactcgtgccagattcctatggatgcgcagcggaatccatgcgctccggacgggctctgactagttattttgctcccagattgggggtttccatccccggattcccccatttgcctctctgctttcccagtcgtatcttgctaccgtgtgtttttaatgttaactaaagataagtaagaactgccttgtgtaaaccaactgctctaattatcacagaacccgatgtcaacaacaatggacggagttttgtttttaactatactctgaccaaagctgttgtggaatatgctgcagctgtaagttatttcaaagcccttcatttattttagcttaatgtgccatagtactagtttttttgtattttattttccccacatttttcttaagtgcttccaaataaaccctaagagtcagccagtttatgcatcttgttactttattttaatatcattcatttagtttcgatttttcactctatattttaatgttgtcaaaatagagattcccattttttccctggtacataggtatatatgacagatctgacggctctatacacatggacatgctcaagatgcaatgacttgactcgagtaagattatctaggagtatggcgtgtagtgaatagttcaatgtgacctgtttcagttgaagtacaacaaagatacgtttttcactgactttgccattgttacctatttcacaaaacagggctttgagatgacttgtataattgttgatgtccagaattgcttgcaggcattcgtcggtgttgatcacaatctcaatgctatcattgtttccatcagggggactcaagagaacagcatacagaattggattaaggacctgatatggaagcaggttaaacttaattatccaaacatgcccaatgctaaggtttgtggtattaaccatctgatgcaattttacttctcttttcaacagtaaggcatgacttatctttcctccaccttttttttcttctgatgagatttctcctatggttaaaggtccacattgggttttactcttcttacaataatacagttttacgtccagccatcacgaatgctgttcgcaaggcaaggaagctacatggacacagtgacgtaattgtaacagggcattcgatgggtggagcactagcttctttttgtgcccttgatcttgcaatgagctttggaagtaacaatgttcatctgatgacttttgggcaaccacgcgttggcaatgctgcatttgcctcctactttgcccagtatgtgccatacacagtccgaatgacacatgaacgtgatattgtacctcatctgccgccttatttcttcttcctcccaaaactgacatacaagcacttccccagagaggtgtgggaacatgaagtcgatggcaacacaacctatcaagtctgtgatggcagcggtgaagacccaaactgttgcaggtggggggcgggcgcctgtttcgattcggcactggagtgtgtttgcgctgttctggagcgcttctgaccatttgacctacatgggagttgagatagcggccgacgactggagcacctgcaggatcgtccttgggcgaggcgtcgagcagctcaaagggagtcttcccaacaacattgttacgtccggacgctccgtcgacgttgtcatcgcagacgatgatacacttcagattgattgacgcagttcagggtagtcgttggtagtcatgcatatagctagaagataagctgttggctgttggtgcatgcttcagagcaaatcaaagggctttcttcctttaatcctttttttttgcttcgtgtggttctttcagccatatgtactatgcagcttgtgaatgtaaagctgtacggaaggtgacatgtttctagcttcgtatatagttggagctcaatacagccaa

SEQ ID NO: 92697 - DNA, 1278 bp, Zea Mays
tatataaaataatgtcctactcctaccccgccaccacgccgcggcagcacaagcccctctccgcccccagccagccctcctcagatctcaatcccggcgctccctccctccctcctcgcctcgggacagcgagcgccgccgtccgccgtccatggagcacgacgccgaggcgcgccgcgggttcgccaggatgggcttcgggtgcaagcactaccggaggcggtgccggatccgcgcgccctgctgcggcgacgtcttccactgccgccattgccacaacgagtccacgaaagacgggcacgagctggatcggcacgacgtccaatcggttatctgcctcgtctgtgacaccgagcagccgatcgcgcaggtgtgctgcaactgcggcgtctgcatgggggagtacttctgcgcagcctgcaacttcttggacgatgacgttgacaaggagcagttccattgcgacgattgcggcatctgcagagtaggaggaaaggagaacttcttccactgccaaaagtgtggatcctgctactcgacgacccttcgcgacaggcactgctgcatcgagaactcgatgaagaacaactgccccatctgctacgagtacctgttcgattcgctgagggagacgtcggtgctccgctgcggccacaccatgcacctgcagtgcttccacgagatgttgaagcacgacaagttctcgtgccccatatgcgccacgcccatcttcgacatggacaagttcttcaaggccctcgacgcagagatggaggcaagctacttgtacacgggaaagggatgggtcgtgtgcaacgactgcagggacacgacgcaggtcttctccggcatggcgggccacaagtgctgccactgccagtcccacaacacctgccgggtggcaccccccgtcctcccgtagccaccaccaccaccacatcattgttgttggaattggatgcagccagccaagatacccccggccccagcagctacgctattattaccagtagcgcctgcgcttttacgcaccgctccgttccagtccatgatgaactgcataatttcgtgccatgcaggtatgtacgtacactgttattggagatcggaagatttatccgactcgggacgcattatttgtaccacaacaaaacacgtgttacactattgtaataccagatctggatacgaaactattttttaggatgcttgaacgagtggtatttccttggagtgtgtataacatttatttattagctcaaatctctctctctctct

SEQ ID NO: 92698 - DNA, 1300 bp, Zea Mays
aatccacgacgcccatttccgattcttgccgttttcgggcaggcagccagtccctttaaagcaccactaggcaggcactaggccggtagtatataaaataatgtcctactcctaccccgccaccacgccgcggcagcacaagcccctctccgcccccagccagccctcctcagatctcaatcccggcgctccctccctccctcctcgcctcgggacagcgagcgccgccgtccgccgtccatggagcacgacgccgaggcgcgccgcgggttcgccaggatgggcttcgggtgcaagcactaccggaggcggtgccggatccgcgcgccctgctgcggcgacgtcttccactgccgccattgccacaacgagtccacgaaagacgggcacgagctggatcggcacgacgtccaatcggttatctgcctcgtctgtgacaccgagcagccgatcgcgcaggtgtgctgcaactgcggcgtctgcatgggggagtacttctgcgcagcctgcaacttcttggacgatgacgttgacaaggagcagttccattgcgacgattgcggcatctgcagtaggaggaaaggagaacttcttccactgccaaaagtgtggatcctgctactcgacgacccttcgcgacaggcactgctgcatcgagaactcgatgaagaacaactgccccatctgctacgagtacctgttcgattcgctgagggagacgtcggtgctccgctgcggccacaccatgcacctgcagtgcttccacgagatgttgaagcacgacaagttctcgtgccccatatgcgccacgcccatcttcgacatggacaagttcttcaaggccctcgacgcagagtgctgatcgatgctcgtgtgtgtgtgtgtgctggtgcagggatgggtcgtgtgcaacgactgcagggacacgacgcaggtcttctccggcatggcgggccacaagtgctgccactgccagtcccacaacacctgccgggtggcaccccccgtcctcccgtagccaccaccaccaccacatcattgttgttggaattggatgcagccagccaagatacccccggccccagcagctacgctattattaccagtagcgcctgcgcttttacgcaccgctccgttccagtccatgatgaactgcataatttcgtgccatgcaggtatgtacgtacactgttattggagatcggaagatttatccgactcgggacgcattatttgtaccacaacaaaacacgtgttacactattgtaataccagatctggatacgaaactattttttag

SEQ ID NO: 92699 - DNA, 2955 bp, Zea Mays
atggctacaggcgatgcgcgtgattcaagccccagcccagcaaccatttcagcagaacgctccaccgcttctccgaaaaggcaaaaaccccacagctcgagcgccgcgccggaagcctgcgcccccgaaaccacgagcgtaaaccctcctagtccggcggtgatggccggcgtcggtggcagcggcggtggaggtggggacgacgcggagatgggcggttggacggggcttctccactcctccacgaagctcctcgagcaggcggcgccaaccccgcacttccctccccttcagaggaatctggaccagctcgaggcgctctccaccaagctcaaggccaagaccatccgctctgaggctccgtcacagtcgctctccgccaccagattgttagcacgcgaggggatcaatgctgagcagctcgccagggacctcaagtcattcgaactcaagactacctttgaggatgtttttccatctgaagcaactactgttgaggagtacttgcagcagcttcatgaaatggccattgtttcatccatccaagaagctcagaaggacaatttgaagagttttaacaactatatgatgcaagttcttgaggatgactggcagaaagagaagagagacttcttgcagagtctaagccggctttctacattacccaagagaaacactaatctctcgaccagtgggttgggtcgccctgcttcaatgccaccatcaacttccagtcttcatgctccatcaggcctgccttctgctgaagtcatgcctataccgaacaagactattattgaaaaaaaatcttcagtttatgctggggttgtgagggacctcaatgattctagagggcgcagtctaccttttaatcctgctacggcttttagggctgcttatgaatccttgtctattgatgccattggcacaaagtcagtgagtatgcagaaagtgtggcatctaattcaggcattggttggggaagggttgactcatcgaaatgtttcaagaaaaatgtcactagtggtaggtgcaaggcaccatcttgagtggggtcatgaaaagtacatacttgagaccatcaacagccatccagctcttgctgcccttggtggatctgttggcaatcttcagaagatccgagcatttcttcgggtaaggctgcgggatcaaggtgtgctagactttgacgcaaccgatctacgcagacagcctccagtggatacaacctggcagcagatttacttctgcttgagaaccggatactatgatgaagcaagacaagttgcccaatcatctcgtactgcatataacttcgctcccctgcttgcagattggatttctactaatggtgctgtatcaccagagactgctctggcagcttctgaggaatgtgataaaatgctcagaatgggtgatcggccagggcgtcctggctacgacaggaagaagttactgctttatgccataatttgtggttgtcggcggcaaattgaaagaatgctaaaagacctaccaacactttttaacactatagaggatttcttgtggtttaagctgtcagctctgcgggaatacaccaatgcatcttcttctaatcttatgaatgaaggcttggtgccttatacgctggatgacctgcaaagttacttgaataaatttgagccatcatattatacaaagaatggaaaagatcccctagtctatccctacattctgttcttaagcatccaattactcccagcaattctttatttgtctaaagaagttggagaggatggataccatgttgatgctgtgcatatttcaattgctttagctgaccatagtgttctccctgacggtattgggtcaggccagaaaattggcgtcatggatgcctgtgcagaggctgcaagcataatacgacagtatggctctatatacttgcgtaatggtaacattgatctagccttggagtattatgcacaagctgctgctgccatgggtggaggtgaggcatcgtggattggtgaagggcatgctgataagcagcgacaacgaagtttgatgttgaagcaactactgatggagatattgctaagggatggtggtattcaacttttgcttggtccaagtggaatgggagaagaaggagagctgaaaaagtatatgatggattggagaagtaggcagcaattcttacttgaagctgcccatcggtgtcaagaggctgggctctatgacaaagctgtggaaattcacaaaagagtaggagcctttgccatggctcttcagacaataaacaagtgcttgtctgatgcagtctgtgccatggcacggagtatgttagatggcgagagtcgtgctgctgccctaattcattctggcaatgaaattttggagacagctagatactcttctgaagccagcattcaagagaaggacctcatttctgagcaacaaactgtgctgagacagcttgaagctattctccatatttataggctagctcgagctgggcaaactgtagatgctttgagggaaaccatcaggctacccttccttcatttggaccccaaggctccaaatgtgactgttgacattttcaggaacttgtcaccccatgttcaagcttgcgtgccagatctcctgaaggttgctctaaattgcattgacaatgttagagatactgatgggaccttgcgcgctgtcaaatcaaagatcgcaaaccttgtagcaagcaacatgagccggaattggccacaggatttgtatcagaaggtggcacagtgcatatgaagtggcttgtgttttgagttgatcaggaatctggactaatctgtatcagaactctgaagctttcaaacaatatggttgtcatcccatcctgtgtttaatgtgtgtcaaatgtaagatgtttattttttaaaaaagaaatttccactgatatttttctgtctttgtcgtgggaaa

SEQ ID NO: 92700 - DNA, 1502 bp, Zea Mays
cattgatacagaagttggacaacagcactgtcatgatttagtaaatgtaaaatggcattttgtcctcctttgagctcctgttaaacacgagtgctaaatagtgagctacttaaattgacccagaacttttgtggtattttaatgttaatacctatgccctttgtaagttgaaaaaagggggaaaatgagagaatgacgaaagagcctcatgacgtgctggttttacgcttccattatactatacaaaagcaaaaaacatttcttctctcaaaaaaccattttagttagccactggtcaaacttcgtgtgctaaaatctccaggatttctgtaatttgttgagtatgctttgtagacctcatagttgagtcaaaggacaagtactgtctcatttttctgattgatttttttcactgattgcatgtcctcatatctgcaactagtcagatatcctagtggtctcatgccagttcaattgattgcttcttatgcactatcagtagtgggcccagcgtttgatcatagcttgggcaaaacacattgagccaattaaatcatgtactttagcacctgatgcaaatcatgccatacaaacataactacataaggatccagtggcatcacagccgagcaggtgcccagggtcgtcggctcctgtgtccgccactgcacactatcatgatgctacctgacttgtctaccatgttcaacagtttaagggctactggtggtagagctaacggtgatggagccaagaagacgagagcacgtgatcgacctaaggcagttccagctccagaggcaaatgctgaacttcaaaaacgaaggttcgtcactcatgcagctaagagcaagagcgaaaagttccctcccccacatcaagatggtgcggttggtgtccctttggacacttcaaatcatatggacccactatatgagcctccagacccgtcttccttcagcactgtgttcacgcacgagaaaggcgctgtgcctacttggtccggaccattggttgatcctgctgcagtggtgaaccaaaagcggaagcacaagtttgggcgctcatcgaaacaaccggccactgcccgtgctcggtaagatcctaaggatcaatatttacaggtaaaaaaaaggagacttcaacatgggggaaatgctccatgcagctgttttgcaaacgaaaaatgcaatgataatgtattttgttggttacctgttgtcatgtgagtgattttttttctagacatcatgtataggctggggagggagttgaagtagttagttctgtatattaggttttctttcctgctctttaagcagctgcgtttgatgttagatttatttgaatggaagcttagatctctagcgtttcactacacccctttccattgtaacagtctgttgcctgcataatcagttatcaattcaacgcaaattttcaatcggatgttttggtgaaaagttggtggattcatgaaccatgacatgtatcacattgta

SEQ ID NO: 92701 - DNA, 2233 bp, Zea Mays
gtcaaacctttctccggagtccggagcacgggcacacaaggcagagccgcagaggcacgtccagctctcctcctcggtcccggtcccctccccggtccacactccatcgcgcccgctgcactccactccctctccccactccccaaccccagctccagagccaccgccggtgaccagcaacaccctcatgggctgcgtccacggccgcccctccacgcccagccccgaccacccgccgcagccgcccgagccgccagcccccgcggcggcgcaggaggccaccgggaaggccgagcagccggcggcgccagccgagaagccggccccacgggagaggcgctccctctcgccgcgcagcggccccggccccagcttcgccaacagggcgcgcggggagcaggtcgccgccggctggcccgcctggctctccgccgtcgccggcgaggccatcgacggatggaccccgcgtcgtgccgactccttcgagaagattgacaagatcggccagggcacatacagcaacgtgtacaaggcgcgcgacacggtgagcggcaagatcgtggcgctcaagaaggtgcgcttcgacaacctcgagcccgagagcgtccgcttcatggcccgcgagatcctcatcctccgacgcctcgaccaccccaacgtcgtcaagctcgacggcctcgtcacctcccgcatgtcctgcagcctctacctcgtcttcgagtacatggagcacgacctcgcgggcctcgccgccagcccggaaatcaagttcaccgagccacaggtcaagtgctatatgaatcagttgttgtcgggtctggagcactgccacgaccggggggtgctgcatcgcgacatcaagggctcgaatctgctcctggacaacaatggcatgctcaagattgcagattttggtctcgcgtcattcttcgacccggaccgtaaacagccgatgacgagccgggtggtgaccctatggtaccggccacccgagctacttctcggcgcaacggactatggggtaggtgtggacctgtggagcgcagggtgtatcctggccgagttgctcgctgggaggccaattatgccggggcaaacagaggtggagcagatgcataaaatttttaagttatgtggctccccgacagaagaatattggaaaaagtccaagctacctggtgctacaatatttaagactcagctgccatacaaaaggcgaataagagagacatttgaggattttccacaatcagcgctgcagttgatcgagatactacttgcaattaatccagcagatcggttaacagcgacttctgcattaagaagcgatttctttacaactgaaccttttgcatgtgaaccatcgagtcttccaaaatatcctccaagcaaagaaatagatgtgaaaagaagagacgaagaagccagacgtttaagggctactggtggtagagctaacggtgatggagccaagaagacgagagcacgtgatcgacctaaggcagttccagctccagaggcaaatgctgaacttcaagtaaatatcgataaacgaaggttcgtcactcatgcagctaagagcaagagcgaaaagttccctcccccacatcaagatggtgcggttggtgtccctttggacacttcaaatcatatggacccactatatgagcctccagacccgtcttccttcagcactgtgttcacgcacgagaaaggcgctgtgcctacttggtccggaccattggttgatcctgctgcagtggtgaaccaaaagcggaagcacaagtttgggcgctcatcgaaacaaccggccactgcccgtgctcggtaagatcctaaggatcaatatttacaggtaaaaaaaaggagacttcaacatgggggaaatgctccatgcagctgttttgcaaacgaaaaatgcaatgataatgtattttgttggttacctgttgtcatgtgagtgattttttttctagacatcatgtataggctggggagggagttgaagtagttagttctgtatattaggttttctttcctgctctttaagcagctgcgtttgatgttagatttatttgaatggaagcttagatctctagcgtttcactacacccctttccattgtaacagtctgttgcctgcataatcagttatcaattcaacgcaaattttcaatcggatgttttggtgaaaagttggtggattcatgaaccatgacatgtatcacattgta

SEQ ID NO: 92702 - DNA, 2570 bp, Zea Mays
gcactagcagagctaaaacccttgcggcggctacctttccctcaccccctttctcgcctcgcggcggctacctttccccccttctcgcctctcgcctcgcggcggctacctttccccccttctcgcctctcgcctcgcggccgccgcaggcgaccccttgtcgcctcgtgctgtccaccgccgaatcttccccaggttagggagggtatctgttgtttcagctcagttttaccgggggactggttgtgggcggagatgttggtgctctttgagacccccgcgggcttcgccctattcaaggtgctcgacgagggtaagctcgacaaggtcgaggatctatggaaggagttcacgacgtcggactcagcaagaaaggtggttgagctgaaggctttcaataagtttgagaacacatctgatgctctatctgcggcaacccttattattgatagcaagcctagcaagggtctgcgcaagttcttacagaaacattgtgagggtgaaacattagcggttgctgattctaagctaggaaatgctataaaagaaaagctgaaaattgactgccttcacaatagtgctgtgatggagctgatgagagggctgagaaatcagctcactgagcttataactgggttgggtgctcaagaccttggcccaatgagcttgggattgtcccacagcctgtctaggtataagctgaagttcagtcccgagaaggttgataccatgatcattcaagccattggattattggatgatcttgacaaggagcttaacacttatgccatgagagttcgtgaatggtatggctggcactttccagagctcaccaaaatagttacagataatatacagtatgccaaagttgtgaagatgatgggaaacagaaccaatgcagtcaatcttgacttctctgagatattatcagatgaagagctagaaacacagctaaaggaggcagcagtgatatctatgggaacagaagttagtgacctcgacttgtcaaatataagagagctatgcgatcaagtgctggcactttctgagtacagagcccagctgtatgactatttaaaaagcaggatgaacactattgcaccaaatctgacagccctagtgggtgaattagttggtgctcgccttattgcacatggtggaagtttgctaaatttagccaagcagcctggtagcacaattcagatacttggtgcagagaaggctttattcagagctctaaagacaaagcattctactcctaagtatggcctcatctaccatgcatccttaattggtaaggcttctcaaaagcacaagggaaaaatctctcgttctcttgctgcaaaaactgctcttgccatccgatatgatgcgcttggcgatggtgaggacaactccattggtactgagagccgacttaagcttgagacacggcttcaagttcttgagggtagagaacttgggaaatctgctggttccacaaaggggaagcccaagatagaagtgtatgaaaaggaccggaagcagggtgctggggctttaacaactcctgctaaggtaagcagtgttatgatatcttgctctccatctgagaaggcttttggataatcaatggttgggctgaaaacttgcgcagccctagaagatttttttgtcagaaccttgtaatgttctagttctggaccgttttaactatttaccgtaaaaacgttccccattggtttgactcgaagtatacttgggcaaacacttttgttgcagtaggtttaccttatatttttctctacaaatattgcacacatgaatttgttttgatttgatgcttcgattttgttttagacatacaaccctgcagctgatctggtacttactgaagaaacaccaaagaagtcagaattggcttcaaagaagaggaaacatcatgaggttcaaactgaaccatcggcagagcttgcagagggagcagtccaggaggataggaagaagaagaaaaagaacaaggaaagcgaggaggctcctgctgctgaaggtgatggtgagaagaaaaagaaaaagaagtccaaggatgtcggggaagagcctgctgtggctgctgctgctgccacagaaggtgagaaaaagaagaagaaaaagaagtctgacgcggacggtgagggtgttacaacgcaaaccgaagagtctggtaagaaagataagaagaaaaagaagaaaaggcatgccgatgatgagtgagacattcttcggaagagaatgtgcgggtaccaaatgctgggactcagctgttctgtaaaatgggtatcacggggttagaaaacatattgagatcagtttttggggttacctggtttttttgggggacctggcttgtattcaacaattacttgctcggtctagatgatgatggaatttttaacttttgctgttgtaaccccataaatttagtatgatgattgtcatggtaactctgcaactgagagaccttccattctcaatgctgacctggacttgctttgccactcttgtaatcggtaattcggtactatatatctcgaggtcaccaaatttctggt

SEQ ID NO: 92703 - DNA, 2277 bp, Zea Mays
gcactagcagagctaaaacccttgcggcggctacctttccctcaccccctttctcgcctcgcggcggctacctttccccccttctcgcctctcgcctcgcggcggctacctttccccccttctcgcctctcgcctcgcggccgccgcaggcgaccccttgtcgcctcgtgctgtccaccgccgaatcttccccaggttagggagggtatctgttgtttcagctcagttttaccgggggactggttgtgggcggagatgttggtgctctttgagacccccgcgggcttcgccctattcaaggtgctcgacgagggtaagctcgacaaggtcgaggatctatggaaggagttcacgacgtcggactcagcaagaaaggtggttgagctgaaggctttcaataagtttgagaacacatctgatgctctatctgcggcaacccttattattgatagcaagcctagcaagggtctgcgcaagttcttacagaaacattgtgagggtgaaacattagcggttgctgattctaagctaggaaatgctataaaagaaaagctgaaaattgactgccttcacaatagtgctgtgatggagctgatgagagggctgagaaatcagctcactgagcttataactgggttgggtgctcaagaccttggcccaatgagcttgggattgtcccacagcctgtctaggtataagctgaagttcagtcccgagaaggttgataccatgatcattcaagccattggattattggatgatcttgacaaggagcttaacacttatgccatgagagttcgtgaatggtatggctggcactttccagagctcaccaaaatagttacagataatatacagtatgccaaagttgtgaagatgatgggaaacagaaccaatgcagtcaatcttgacttctctgagatattatcagatgaagagctagaaacacagctaaaggaggcagcagtgatatctatgggaacagaagttagtgacctcgacttgtcaaatataagagagctatgcgatcaagtgctggcactttctgagtacagagcccagctgtatgactatttaaaaagcaggatgaacactattgcaccaaatctgacagccctagtgggtgaattagttggtgctcgccttattgcacatggtggaagtttgctaaatttagccaagcagcctggtagcacaattcagatacttggtgcagagaaggctttattcagagctctaaagacaaagcattctactcctaagtatggcctcatctaccatgcatccttaattggtaaggcttctcaaaagcacaagggaaaaatctctcgttctcttgctgcaaaaactgctcttgccatccgatatgatgcgcttggcgatggtgaggacaactccattggtactgagagccgacttaagcttgagacacggcttcaagttcttgagggtagagaacttgggaaatctgctggttccacaaaggggaagcccaagatagaagtgtatgaaaaggaccggaagcagggtgctggggctttaacaactcctgctaagacatacaaccctgcagctgatctggtacttactgaagaaacaccaaagaagtcagaattggcttcaaagaagaggaaacatcatgaggttcaaactgaaccatcggcagagcttgcagagggagcagtccaggaggataggaagaagaagaaaaagaacaaggaaagcgaggaggctcctgctgctgaaggtgatggtgagaagaaaaagaaaaagaagtccaaggatgtcggggaagagcctgctgtggctgctgctgctgccacagaaggtgagaaaaagaagaagaaaaagaagtctgacgcggacggtgagggtgttacaacgcaaaccgaagagtctggtaagaaagataagaagaaaaagaagaaaaggcatgccgatgatgagtgagacattcttcggaagagaatgtgcgggtaccaaatgctgggactcagctgttctgtaaaatgggtatcacggggttagaaaacatattgagatcagtttttggggttacctggtttttttgggggacctggcttgtattcaacaattacttgctcggtctagatgatgatggaatttttaacttttgctgttgtaaccccataaatttagtatgatgattgtcatggtaactctgcaactgagagaccttccattctcaatgctgacctggacttgctttgccactcttgtaatcggtaattcggtactatatatctcgaggtcacc

SEQ ID NO: 92704 - DNA, 614 bp, Zea Mays
gcactagcagagctaaaacccttgcggcggctacctttccctcaccccctttctcgcctcgcggcggctacctttccccccttctcgcctctcgcctcgcggcggctacctttccccccttctcgcctctcgcctcgcggccgccgcaggcgaccccttgtcgcctcgtgctgtccaccgccgaatcttccccaggttagggagggtatctgttgtttcagctcagttttaccgggggactggttgtgggcggagatgttggtgctctttgagacccccgcgggcttcgccctattcaaggtgctcgacgagggtaagctcgacaaggtcgaggatctatggaaggagttcacgacgtcggactcagcaagaaaggtggttgagctgaaggctttcaataagtttgagaacacatctgatgctctatctgcggcaacccttattattgatagcaagcctagcaagggtctgcgcaagttcttacagaaacattgtgagggtgaaacattagcggttgctgattctaagctaggaaatgctataaaagaaaagctggtcagtagtatttctcaatttattacttttttgtgaatggtcagccttcatgggacttt

SEQ ID NO: 92705 - DNA, 1008 bp, Zea Mays
atggcttcaataagccatatggtcaagcatatgggtaaaagcatgcaatccttggccagtgatgcaggtcctggagacaacatggtcaaatggaatagcagatatgggaaagctgtagatgaatgtcttgttcagttgtctagaaaggtcggtgatgctggacctatccttgatacattagctgtagtactggaaaatatttcgagttctatgattgttgcacggtctactatctctgcagcatatcacactgctcaaatagttgcatcattgccaaaaatcaactttctggtgaagcaatgtaccacaataaaagggacttccaagtttcctcattgtcctctatatagtgctaacatttcaactgatcagaaactggttatgtcaaagcctccagctgtggagaatgctgcagatgggagagctgaaaggatggagaagccctcggaccctcctatagccccaccagttgatgatggaaaatctgttatgcctgatgagaacctgaagaagcgaaagaacactgaaacgaatggttacttacaaaacaaccttgatatgcggcctacaaagttgccgagaccagcactccccagcaatcgtgtggacaatggtacagcatctcatgtagccgcgccactctcttctgtgaagcaggaagccatagatattgaaaaggctgaaaggctccataaggaagagaaggtcaatggcaaccaacagggtcagcagcgaggtccagtcgatccggtggctgcttatgagaatggcacaagctctaggaagccacctcaccccgactgcaagtatcttagccagatatacaacattcctttagcccctcaaatgatggaattgcctgggcaggaaggtgaggactggctgttcgacaaaggcggcacccagccaaggaagccgaccagttcagcgcttgagtctgatggagtcccccaagtgtgggctcaggctctgaaaattgaccatgctgatggtggtggtggtggctga

SEQ ID NO: 92706 - DNA, 2375 bp, Zea Mays
tgccgctccgcgcacgcccgcggccgaacgctccccgcaccttcatcctccgcgcagccacgcatccacagccgtgattcccgccgccccgccgcgctcaccttccagcccgcggccgaacgctcccccgcaccttccatcctccgcgcagccacgcatcccgcagccgcgattcccgccacgctcaccttccatccccgcgctctcccatcgacgtcgatgctcatcctccgcgcagccacagccgcgattcccgccgccccgccgcgctcacctaccagccccgccgcggatccctgatgttgagatctgggagctgaagctgaagatctcgcggatgcgggtgcggctgacggagctggagcgggagcaggggctaatgaagcagcaggggaggatgcgcggcggggacggcggcggcggcgagcacgaccgcgccttccttgcgtcgctctcgaggggcatcggcagcatcaccatgttcggcgggcccgcggcggccgacagacggcgcaagaattgtggcggccggagctcccagtgctccgacggcaaggcccgcaggcggcagaaggcatccttccctatgactgatgcttcgctgctagcgtcgacagtggaggcgcggcaggcggtgatcgtggatggatgcggtctcagcgtctggaggatcggtcggagctaagcagggacggtgggtgctgacagctgagtgatacgtgtatttctaggaagatcaagcccagagctgtcgcatagccagaactgcatctacttccacggcaccgtcagcaaggacaagttggtcatccagctctctaggaagatcaaggacggcatctgaagactgaagtactttgaagtttgatgaacaacaaggacatcctcacgcacaagtttgatgaacaagggagttgccgacctttctctaggttcctgcctgatgactcatttctccagttctttgatttcaccacaaattcgaaggttcaaggtcaacaaaattcttgagccagttcactccaacccaatgggacaaggatcagtggtatcctttcatggggccactgcggtccatccaagtgttgttcatttgtgttgtcttcgtgatcgtggagatcaacacattcttccttaagcttacgtccttattgccgagttcctcaaaaggactaagtcgttactgtggttcagtctctacttgaatgatattagtgacaaggtaaaactattcctttattgttaattattttctatatgcatgatggcagtaactaaaatattggattgtgttggacatacaacaagttctagaagccattagctaaccacataatcattgaccttaacccagtgaccatttaacaacgtatataatataaatttacattagatgctttatttttgcagtgtagacctattgcacatataagtgctccttagaacttaggctgttattttcagtctcattattccattctttactaaagaattgtacatcaaacaaatttatgtagtacatatattgcagaggtcctcaaaatctacaccaagttatgtcagggactatatctccactcaactcattttaacgttgtacatttcaatcaaatccaaatacatgtgaaataaataataatagaagcatatagaaaccgatataccttatttactcataacacaatattaggtctagttaagtattacaaagctcctactacacgtctataacttatggcgttatttggccttagaggatatccttcgtaatgtgataacttatcgcttattgaaagtggtgtggcgacgtgacgggtttacaatctgccaccccaacttgtttacgatgttcaaaagcataattttcttgagtaagtgttaattttataccaacaaaatagtaaatatctcataagtccttgagagcaaatccttttcatgagtctcgcaacaaagttgtggtggtgttctttgatgaaatagtaacaacaatatcatccatatataccaacacaaaaatcgttatattgttcttgttataaaagaataaggatatatttacctttgatgcatggaagagattagtttattacttagccgagagagccatgctctagaggcttgtttcaaatcatgtatttctttatcaagtttgcaaacatgtacagatcatgacagatcttgatagtcacgaggttgctctatttggacctcttcttctagatacgcatgtatgaatgcattttgtacatcaagttcacgctagctccaacgtcttgatacagaaacagatagaaaatatgaacagtagacattttaacaatcggactgaatgtgttattataatcaatgttatatttttgtttaaaacattt

SEQ ID NO: 92707 - DNA, 1363 bp, Zea Mays
atggcgaccatcctcctatcctcccgcctcccaaccaccggtacagccacgccgtcgcccacccgccccgctccgcggttcctctccttccccgggaccgccatccgacgccgcggccggggcccgctcctcgcctcctccgcggtctcaccgcccgcgccggcttcggcggcgcagccctaccgcgcgctgccggcctcggagaccacggtcctcgtcacgggcgccacgggctacatcggccgctacgtcgtccgggagctcctccgccggggccaccgcgtgctcgccgtggcgcggtcccggagcggcatccgcggccgcaactcccccgatgatgtcgtcgcggacctcgcccccgcccaggtcgtcttctccgacgtcaccgacccggccgcgctgctcgcggacctcgccccgcacgggcccgtccacgccgcggtctgctgccttgccagccgcggcggcggcgtgcaggactcgtggcgcgtcgactaccgcgccacgctgcacacgctccaggccgcgcgcgggctcggggccgcccacttcgtgcttctctccgccatctgcgtccagaagccgctcctcgagttccaacgcgccaagctcaagttcgaggaggagctggccgcggaggccgcgcgggacccctccttcacctacagcgtcgtgcgccccacggcgttcttcagagcctcggcggccagcgaggaggacctcgccgccttcatcgccgactgcatatacgaccaggacaaggccaacaaggtgctgcccattggcgggccggggaaggcgctcacgccgctggagcagggggagatgctgtttcggctgctcgggcgcgagcccaagttcatcaaggtgcccatacagatcatggacgccgttatctgggtgctcgatggattggccaagctgttcccggggttggaggacgccgccgagttcggcaagattggcaggtactatgcctcggagagcatgctgttgctggacccggagaccggggagtacagcgacgagaagacgcccagctacggcaaggacacgctcgagcagttcttccaaagagtgataagggaagggatggcggggcaggagcttggcgagcagaccatcttctaggccttctccattaccagtttccgggagaaagaaacttgtagtagattatatgccgacaatgtacttgtagagatgtgagctttttgacttgctgatgatgtaaacacgactcgcgattcaatcataccaaagtatgatgattgtctaatttggaggaagagaaatgttttgacttgttgcttcaaagaagctgatatcttgtctgcacataatacatgttttcgcccacagt

SEQ ID NO: 92708 - DNA, 183 bp, Zea Mays
atggacacgagaaaaataggcgttcgagagggggggacacgagaaaatctatccaactccccggagatgttgaaacgtatcgacagggaagcgaaaaatcgggaggaatcaaacctcaatgaaaacggatcgacggggaaacaaagaaaggaacgaaacagtgccccgagcgatcctagttga

SEQ ID NO: 92709 - DNA, 1667 bp, Zea Mays
atgtctttcaggagcctgattcaggacatgaaggacgagttcgggagcatctcgcggcatagcctgcggtcccggtctcaccgctccgccgggaacgcggcgcgggcggcggccgcgggaccgtcggaggcgatggatcagagctgctggtcgcagctgccccccgagctcctgcgggaggtgctggtgaggatcgaggcatcggagagctggtggccagcgcgcaagaacgtggtgtcaggcgccggcgtctgccggacctggaggggcatcatgaaggaggccgtgcgcgtcccggaggtgtcagggaagctcacgttccccatctcacttaagcagcctggcccaagggatggcactcttaaatgtttcatcaggagaaatcgaactactcagacatattatctgtatattggattgacagaagcattggctgatgatgggaagtttctacttgctgcacgcaagtgtcgtaagcccacctgcacagactacctaatttctcttgataaggtcgatatgtcaaagggaagcagcacctatattggcaagctaagatcaaatttccttggaacaaagttcactgtctatgatgctcatccaccatatgatggtgctgcggtctcaaagagtcgctctgcacgtgtggttggtttgaagcaggtctcccctagagttccggctggaaattatcccgtttcacatatttcttacgagctaaatgttctgggctccagggttacgggggtcgtacgagtggtagatttagggtctagggttctaggaccaggacctcggcgcttgggcgctgtcgggctgttggtggagaaggtaaggaactgttcacgcgatgaaaaaggtccaagaaggatgaactgtgttatggattccatccctgcatcagctgttaaggaaggagggaaaactcctacacagactgaatttccacttagcagccttgactctttcccatcatttccattcttcagatctaaatcagctcggatagacagttcaacgtcgcaatcatccagtcagagggaagataggttggtgcttaagaacaagtctcctaggtggcacgaacagctgcagtgttggtgcctgaatttccgtgggcgggtcactgttgcctcggttaaaaacttccagttggtggcttctgaggacaatggaccagagaaccaagagagtgacaaggtgattctccaattcggaaagatcggaaaagacttgttcaccatggactacggttatccaatatcggcatttcaagcttttgcaatttgtctgagcagttttgatacaaaaattgcctgcgaatgaggcaagagaaaaataggtgcagatttgcttgtgcaagcaaaacatctgccctctctccacctttaactcaacaatgcttttgtcctcgtctatctgcagaagctggatagcggtggcggatagcatgacagcaatagggggatagcatgacagcaataggaaaacggtcgcaaacgtatatttattcggtttgacttttttctttaattttgaataaataagatatataatgtgcaatacaaatttatatttttgtttttagcattgagtctgtaaaagttcataaaagataaatctcaaatttattatatatcttctcttcttaaataagattcggatac

SEQ ID NO: 92710 - DNA, 1574 bp, Zea Mays
atgtctttcaggagcctgattcaggacatgaaggacgagttcgggagcatctcgcggcatagcctgcggtcccggtctcaccgctccgccgggaacgcggcgcgggcggcggccgcgggaccgtcggaggcgatggatcagagctgctggtcgcagctgccccccgagctcctgcgggaggtgctggtgaggatcgaggcatcggagagctggtggccagcgcgcaagaacgtggtgtcaggcgccggcgtctgccggacctggaggggcatcatgaaggaggccgtgcgcgtcccggaggtgtcagggaagctcacgttccccatctcacttaagcagcctggcccaagggatggcactcttaaatgtttcatcaggagaaatcgaactactcagacatattatctgtatattggattgacagaagcattggctgatgatgggaagtttctacttgctgcacgcaagtgtcgtaagcccacctgcacagactacctaatttctcttgataaggtcgatatgtcaaagggaagcagcacctatattggcaagctaagatcaaatttccttggaacaaagttcactgtctatgatgctcatccaccatatgatggtgctgcggtctcaaagagtcgctctgcacgtgtggttggtttgaagcaggtctcccctagagttccggctggaaattatcccgtttcacatatttcttacgagctaaatgttctgggctccagggttacgggggtcgtacgagtggtagatttagggtctagggttctaggaccaggacctcggcgcttgggcgctgtcgggctgttggtggagaaggtaaggaactgttcacgcgatgaaaaaggtccaagaaggatgaactgtgttatggattccatccctgcatcagctgttaaggaaggagggaaaactcctacacagactgaatttccacttagcagccttgactctttcccatcatttccattcttcagatctaaatcagctcggatagacagttcaacgtcgcaatcatccagtcagagggaagataggttggtgcttaagaacaagtctcctaggtggcacgaacagctgcagtgttggtgcctgaatttccgtgggcgggtcactgttgcctcggttaaaaacttccagttggtggcttctgaggacaatggaccagagaaccaagagagtgacaaggtgattctccaattcggaaagatcggaaaagacttgttcaccatggactacggttatccaatatcggcatttcaagcttttgcaatttgtctgagcagttttgatacaaaaattgcctgcgaatgaggcaagaagctggatagcggtggcggatagcatgacagcaatagggggatagcatgacagcaataggaaaacggtcgcaaacgtatatttattcggtttgacttttttctttaattttgaataaataagatatataatgtgcaatacaaatttatatttttgtttttagcattgagtctgtaaaagttcataaaagataaatctcaaatttattatatatcttctcttcttaaataagattcggatac

SEQ ID NO: 92711 - DNA, 1992 bp, Zea Mays
atcccatcccaccagttccccaattccatttctccatccatgacagctcgccatttccccacctgttcctacgctaccgccacctaaaaaaaattccaggcacctagtgcttcccattccaatcttgctcaaaggtcatttcatttcggccggtgcctattttaggccgattggagggaaggctggtctgtgttttattttcctgctgcgagcgctttcttgggcgagttgaatttgggcgcctcttgctccaggcagtattttatcgagctagagtctggtacccggtgattcttgcttggtccaggcgccaaggcgaggaattgggcctagctccagctcaaatctgtgccttgttgcagacagaaggatttctgcatgggcgagttgaatttgggcgcctcttgctccaggcagtattttatcgagctagagtctggtacccggtgattcttgcttggtccaggcgccaaggcgaggaattgggcctagctccagctcaaatctgtgccttgttgcagacagaaggatttctgcatgggcgaccataactaagatgtgagatttggtggcgtcagctcggctggtgggtgattctcggtgcgtacacagacacatccctggagcctggaggcttgagctgatttggcgaggaggacagtgcaggagagagatgtctttcaggagcctgattcaggacatgaaggacgagttcgggagcatctcgcggcatagcctgcggtcccggtctcaccgctccgccgggaacgcggcgcgggcggcggccgcgggaccgtcggaggcgatggatcagagctgctggtcgcagctgccccccgagctcctgcgggaggtgctggtgaggatcgaggcatcggagagctggtggccagcgcgcaagaacgtggtgtcaggcgccggcgtctgccggacctggaggggcatcatgaaggaggccgtgcgcgtcccggaggtgtcagggaagctcacgttccccatctcacttaagcagcctggcccaagggatggcactcttaaatgtttcatcaggagaaatcgaactactcagacatattatctgtatattggattgacagaagcattggctgatgatgggaagtttctacttgctgcacgcaagtgtcgtaagcccacctgcacagactacctaatttctcttgataaggtcgatatgtcaaagggaagcagcacctatattggcaagctaagatcaaatttccttggaacaaagttcactgtctatgatgctcatccaccatatgatggtgctgcggtctcaaagagtcgctctgcacgtgtggttggtttgaagcaggtctcccctagagttccggctggaaattatcccgtttcacatatttcttacgagctaaatgttctgggctccagaggtccaagaaggatgaactgtgttatggattccatccctgcatcagctgttaaggaaggagggaaaactcctacacagactgaatttccacttagcagccttgactctttcccatcatttccattcttcagatctaaatcagctcggatagacagttcaacgtcgcaatcatccagtcagagggaagataggttggtgcttaagaacaagtctcctaggtggcacgaacagctgcagtgttggtgcctgaatttccgtgggcgggtcactgttgcctcggttaaaaacttccagttggtggcttctgaggacaatggaccagagaaccaagagagtgacaaggtgattctccaattcggaaagatcggaaaagacttgttcaccatggactacggttatccaatatcggcatttcaagcttttgcaatttgtctgagcagttttgatacaaaaattgcctgcgaatgaggcaaggtgatttttccccttctctattccccttgcttgtattatggacatgcagtaaaattttattgaacatgcaatttccaatgtcaaggatgattggatgaagctctcca

SEQ ID NO: 92712 - DNA, 595 bp, Zea Mays
ttttaattttaattgcttatagaggacaatgcattacacgttgcatttgtggttgagtaatatttccctgttcttcaacttgtgcagatatcgagaagaccgatgcatctcccaagaaaagcaagaaaaagaagaccaaaaccaaggctgatggtgatgcaatggacgtggataaaccctccaacgttgctggtggagaagctgagcctggaactgagaagaagaagaagaaaaagaagcataagctggaggaggaggcacaggaggagaacggtgcagcagatactacccctaagaaaaagaaaaagaagagccgtgaagcttccgaagaagctgaacctaagaccgccaccgatggtaagaagaagaagaaaaagaaggctaaggccgaggatgatgagtagccaagttatttgttgtatggcgtatgaatccgagagtatttgttgaaaaacagagatgaacgcctgcctagctcaactagcttgtagttcatgaggcgtttgatgcaaacccaactcaaagtacgaagttttcctatcgtctttacaaaaaaagaaaaaagaaaaaaaagcttctgcaaccatcagattaa

SEQ ID NO: 92713 - DNA, 1484 bp, Zea Mays
tgcatagtgtatcaaattttgttgtgaagttggatgcttgatgtgcttaatttgtttttccgatggtgattgtaggattctgacttggagaaggcccagcttggcctggggcatagctacagcagggccaaggtgaagttcaatgtgaatcgtgttgacaacatggtgatccaggcaatctttctattggatacgcttgacaaggacatcaattccttctccatgagagtcagggaatggttctcatggcacttccctgagcttgtcaagattgtgaacgacaattacctatatgccaagcttgctaagtttatcgtgaacaaatctgatttgacggaaaaagatattcctgctttggctgatatagttggcgacgaggacaaggctaaagaaattgttgaagcagcaaaggcttcaatgggccaggatctgtcaccagttgatttgatcaatgtccagcaatttgcccaaagggttatgaatctctctgagtatcgcaaaaacctttatgagtatcttgtgactaagatgaatgatattgcacccaacctgacatcgttgattggtgaagtagttggagctcgcctaatctctcatgctggcagtctttcaaaccttgctaagtgtgcagcctccacccttcaaatacttggtgctgagaaggccctattcagagcactgaaaactcgagggaacacaccaaagtatgggcttatattccactcctcctttattggccgtgcttcaactaagaacaagggcagaatggctcgttacctggcaaacaaatgctcgattgcttcacgcattgactgctactcggaggctagcacctctgtctttgggcaaaagttgcgtgagcaagtcgaggagagactggaattctatgacaagggtgttgcgcctcgtaaaaaccttgatgtgatgaaagccgctattgacagcatggtcaatggcacctcaatggatgatgatgatatcgagaagaccgatgcatctcccaagaaaagcaagaaaaagaagaccaaaaccaaggctgatggtgatgcaatggacgtggataaaccctccaacgttgctggtggagaagctgagcctggaactgagaagaagaagaagaaaaagaagcataagctggaggaggaggcacaggaggagaacggtgcagcagatactacccctaagaaaaagaaaaagaagagccgtgaagcttccgaagaagctgaacctaagaccgccaccgatggtaagaagaagaagaaaaagaaggctaaggccgaggatgatgagtagccaagttatttgttgtatggcgtatgaatccgagagtatttgttgaaaaacagagatgaacgcctgcctagctcaactagcttgtagttcatgaggcgtttgatgcaaacccaactcaaagtacgaagttttcctatcgtctttacaaaaaaagaaaaaagaaaaaaaagcttctgcaaccatcagattaa

SEQ ID NO: 92714 - DNA, 870 bp, Zea Mays
ttagttcgaggaagctctgtcaccggactgttttgtatgctaagtttactcattccaaaagcatctttttgattgttttgtactgtactcttgacttcagaggctagcacctctgtctttgggcaaaagttgcgtgagcaagtcgaggagagactggaattctatgacaagggtgttgcgcctcgtaaaaaccttgatgtgatgaaagccgctattgacagcatggtcaatggcacctcaatggatgatgatgatatcgagaagaccgatgcatctcccaagaaaagcaagaaaaagaagaccaaaaccaaggctgatggtgatgcaatggacgtggataaaccctccaacgttgctggtggagaagctgagcctggaactgagaagaagaagaagaaaaagaagcataagctggaggaggaggcacaggaggagaacggtgcagcagatactacccctaagaaaaagaaaaagaagagccgtgaagcttccgaagaagctgaacctaagaccgccaccgatggtaagaagaagaagaaaaagaaggctaaggccgaggatgatgagtagccaagttatttgttgtatggcgtatgaatccgagagtatttgttgaaaaacagagatgaacgcctgcctagctcaactagcttgtagttcatgaggcgtttgatgcaaacccaactcaaagtacgaagttttcctatcgtctttagcttgtatttttattttttggttggatatgctagtgaactctagtgacttcgtatgctaacgatgcagaatagcagatccaatcagcagcgatgagtgttcgtttgttattttgattgcgagaactgaaatatgcagcaaggaacgaaaccagac

SEQ ID NO: 92715 - DNA, 2067 bp, Zea Mays
acgagagcccataaattctgccccgccgcctcgtgtcaaccccgtcactcttgtgtcctcctaaaaccctaaccctccgccgcccctcggacccccaaccagcagctgccgcggccatccgccggcgagatggcgctgtacctgctgttcgagtcggcgtccggctacggtctattccacgcgtacggcatcgatgagatcgggcagagcgtggaggccgttcgctcctccgtgctggacctcgatcgcttcggcaaggccgtcaagctcaccgccttcaaccctttctcctctgccgtcgatgcactcaatcagtgcaacgctatatccgaagggatcatgaccgatgaactgaggagtttcctggagctgaacctgccgaagcccaaggaggggaagaaggccaaatacagcctcggggtcgtcgagcccaaggtcggttctcacatctccgaggtcaccggcattccctgccagagcaacgaattcgtccaggagctgctccgcggtgtccgcctccacttcgaccgtttcatcaacgagcttaaggattctgacttggagaaggcccagcttggcctggggcatagctacagcagggccaaggtgaagttcaatgtgaatcgtgttgacaacatggtgatccaggcaatctttctattggatacgcttgacaaggacatcaattccttctccatgagagtcagggaatggttctcatggcacttccctgagcttgtcaagattgtgaacgacaattacctatatgccaagcttgctaagtttatcgtgaacaaatctgatttgacggaaaaagatattcctgctttggctgatatagttggcgacgaggacaaggctaaagaaattgttgaagcagcaaaggcttcaatgggccaggatctgtcaccagttgatttgatcaatgtccagcaatttgcccaaagggttatgaatctctctgagtatcgcaaaaacctttatgagtatcttgtgactaagatgaatgatattgcacccaacctgacatcgttgattggtgaagtagttggagctcgcctaatctctcatgctggcagtctttcaaaccttgctaagtgtgcagcctccacccttcaaatacttggtgctgagaaggccctattcagagcactgaaaactcgagggaacacaccaaagtatgggcttatattccactcctcctttattggccgtgcttcaactaagaacaagggcagaatggctcgttacctggcaaacaaatgctcgattgcttcacgcattgactgctactcggaggctagcacctctgtctttgggcaaaagttgcgtgagcaagtcgaggagagactggaattctatgacaagggtgttgcgcctcgtaaaaaccttgatgtgatgaaagccgctattgacagcatggtcaatggcacctcaatggatgatgatgatatcgagaagaccgatgcatctcccaagaaaagcaagaaaaagaagaccaaaaccaaggctgatggtgatgcaatggacgtggataaaccctccaacgttgctggtggagaagctgagcctggaactgagaagaagaagaagaaaaagaagcataagctggaggaggaggcacaggaggagaacggtgcagcagatactacccctaagaaaaagaaaaagaagagccgtgaagcttccgaagaagctgaacctaagaccgccaccgatggtaagaagaagaagaaaaagaaggctaaggccgaggatgatgagtagccaagttatttgttgtatggcgtatgaatccgagagtatttgttgaaaaacagagatgaacgcctgcctagctcaactagcttgtagttcatgaggcgtttgatgcaaacccaactcaaagtacgaagttttcctatcgtctttagcttgtatttttattttttggttggatatgctagtgaactctagtgacttcgtatgctaacgatgcagaatagcagatccaatcagcagcgatgagtgttcgtttgttattttgattgcgagaactgaaatatgcagcaaggaacgaaaccagac

SEQ ID NO: 92716 - DNA, 742 bp, Zea Mays
attgtcctttttctggtgtatggttggaaacgacaaaatcaattgatttcagtctttatcactaatctgagatgcagatgctgccgacagatatgcatagaagagaacatatatgcatagaagggagtaaaactaagatttggatattttcatccgaacacagagtaaagaattctccactctcttggcttgaagaggctacataactagaggccatcagaggagaactgaagactgagagcattctctgcttataatctttattcctctatattctaaattattattttttcaatccccttcaacctggattcgatttgaatcccacaccgcgtggtgttcttcctctatcgaataaacgttgtttcgcttgtatgatcatcggatcgatagggcactgaaagagtcattcctagagactctacggaaggacacaacggagatggagcagcctgcttgagaagaggcggaggaggagaaggaagcgctcaacccggactcgtggccatcgaccagcatgagccttgtcgtcgtcttgtttgattcatttatctgattttttgaacaaaattgcccttgtctatgtccttcctcccttttttcatttttgtaatgccctcatgtaaaatataaggcatgtgttattaaatatttcatttgaaactacatgtatttcatgtgttactcaagaagtcaccactttattttttgtgatatttgcattgcagtataatttgatttg

SEQ ID NO: 92717 - DNA, 189 bp, Zea Mays
atggcggatcagttcgcggattctgcgtatgacacatttgatattggtttcattacacctgatgaatttggtaatgcggatatcttagaagcaacctatcctgctgttgcgaagagacttcatggggactggatacaggatccagcgatacatgttgttactgggttccttgggaaggtatctcattga

SEQ ID NO: 92718 - DNA, 1226 bp, Zea Mays
cacggtgtacctttcatcggcacggtgatctcctcccgcaatcctagaaaattctccgtcgacgcccgccatcatcgcccccgcgcccgacatcctacccctcgtgcaccttccttcgactccaccccctgcctccgtgacccccgtgccccgccccaccaaccccggcaatctctctccgtgaccctggcccccccgttccacccccaatctcacggaagcagtactgatggggaagggcgaggcggagaggaagaagagatccggagacgagcgagcgtcgggaccgtcgccacccgacccatctcgtcgatccccatcagaacgacctccacgaccgcctcgcgcacctctccaccttctcctcaaggaccaccatcgtgggttgttcaaggcgtagctggaggcgtcctgcacggcgcgcttctaggtcgggcgatggcgggccatggcggatcagttcgcggattctgcggtaagcctcgaattcttccttccttaatcctatggcatgggagaccaaagcaagttcgagtttgaatgtatagggtcagaagcggcaccgccgcatcgtctctctgggcgactccgccaccgccgccgaaaaccaccaattgccccctctcccggccgccgcttgtcggcaccaccttttctccctcctctatccctcttctccatcttgcaattgaacctctagcagcgtcgtcgccatccggtcgacggctgtgtggatctggggcccctaggtgtggatccgctcgtaccttccccggacctggtgtcctatcgcccgggtgtgctccgatgctctgcccggccctctggcgtcgtgcacgggcaggttccacttattctcgcgcgagacaccttggtctaagcagtctgtgtggacggtgttactcatgaggcggtgacagctgtttgttccgatgttttggcttgtagaagtaagcgctccatggccggagctgtagttgattttggtgcatctgatttgagtttgatgtgtggaggactggatctgtagaatttgggcaagacttctacgtgatcattaggccatgtgataaactgataattgtgcttgtttgaaaaaaaaaggcatgtttcaattgtgtcctagaaaagagatggtggactgcttttatcttgtacgtgagcccacaaaagcatctataaaaaaatgatgtgaactcaagttcattattaatattatttgaaaa

SEQ ID NO: 92719 - DNA, 877 bp, Zea Mays
atgggcatgctgcttgatgtgaaaaagagctcccacaagaagcatacgaatactcatgacaatgacagtacggacaagaatggagagcccgatgtgggaggtgatcacccggggagtattcacacagaaaatgaacagatcggcgaaccaaggcctaaaagatcaaaaaggctgatgaagagcattactgataaggaactagcggctgctgcaggtgatgaggaaccggcagaaaatcacagagcccatgattatgatggtacagaagaggttcaagacggcactgcagcctgatccacttgacatataaacgagaaccgaggatgatacatggcaagacgagtaatttactatgctgagcttgggcatcagaggtgtgtagatcaggagccttctacatggtacagacatgggaagcacacagattatttaaccacacacctcccatactaaaatcagcgaaatcaggtgattaggccgtcagtgcggtggtccgtagcaataagctgacagagggagagggtgttgccttttagaggcgagggctatatcctccagaggttaacatgcagtccacatctgcagtattcgttgtgctggctgtgaccataatggaggaggtggagggtccatgaccagcacacacagaaatagtttcgcgtaaagagggtagctatatctgtattggcgatagttttggtgttgataattaaagcaatggaacacggctggaaaatagctgccgtgatgttgtaatgtattttaaggggggcgtttggtatggctcaatcctaacttcagagttgtaaagtagttttgggagctgcagtataaatttaattttcgacttttggaacacagctgtcaaacaccctct

SEQ ID NO: 92720 - DNA, 114 bp, Zea Mays
tttttttctttgagaaccacaatcatttttgtttattgcttctttatagatgaagctgagtgtagtattacactcttatccattttgatttgcagtggcaacatgtattcttcg

SEQ ID NO: 92721 - DNA, 717 bp, Zea Mays
gtcagggcaagactcgcagcccggacaaggtaaggcgacgtacggcggcgatggcgccggtggtcatgatgagcatgtgcgtcgtcgtgtcgctggtggcggtgcagctgcaggcgacgagcagcgacggcgccacggccgccacaccgtccgtggtgctgccgccggtgacggtgccccgtgtgcgcggccggttggaggccggtcgtaagctgcaggccgtcgacgccgtcgggatgggcatggactccgtggtgcgtcggacggtggtgctcaccacgatgcagacgagcaactcgccctccctgggctacggctcgctccgcccgaacaacgctgtgtgcgggtccagctgcgccggcagacctcctgtgtttatgtttatagtgtaaaggatgcggcgtggatttggacgaaagcaaatgggtgagcatgaagattaacacctcaaagaaatacattagaaaacttattgaagatctgtcaagatcatgcaggagtataaaacatgagacaatagaagcccaggaaggcaagaaaagaaatgagaagtcatgaagaaaacaggctgcacagagtgcagtggatgtgtccgatggcacatcggatagacatgcgtgtacagatgtgttcatgagcttttgtagcaaaggacatgctctacatcgtcctaatcaatctctagaccagcttcaataatctcaaagttgcttactt

SEQ ID NO: 92722 - DNA, 823 bp, Zea Mays
cgcgcgatgaaatgtcatgtctgtgttcaattatcatccgaggggagcgagtcgacggcaacaacagctcgaggagacgcgccaccgcccaccagctagcgcaccacgccaccacccccgcccccgatcaacgcagcagcagggacgcctataaatgcctaggtgcgtgcgggcatcgtctgacgccccggcgccttcctgctagcactacgccactaccagtcagggcaagactcgcagcccggacaaggtaaggcgacgtacggcggcgatggcgccggtggtcatgatgagcatgtgcgtcgtcgtgtcgctggtggcggtgcagctgcaggcgacgagcagcgacggcgccacggccgccacaccgtccgtggtgctgccgccggtgacggtgccccgtgtgcgcggccggttggaggccggtcgtaagctgcaggccgtcgacgccgtcgggatgggcatggactccgtggtgcgtcggacggtggtgctcaccacgatgcagacgagcaactcgccctccctgggctacggctcgctccgcccgaacaacgctgtgtgcgggtccagctgcgccggcagacctcctggtgagccgtatctgcatcagatccgcccgtgtggggagtattatcagtgtccgtctacaccgtcttaattagatctaggcggcgcggcgtacgtttcatcaaattcaataaacataaatatgtataggtgagaactctatgaaatatatatgaatgtgtcatgtatatgcacgatggattatgaaatatgtatgttatattattctataatagtacacaaaatgtttcta

SEQ ID NO: 92723 - DNA, 2162 bp, Zea Mays
ggctactggattcttctctcttctctttctctgagtcgcagcttcggcagctggcggtctggtctacggtctaccactaccactctaccagagaggggatcgatcacacaaacacacccatggcgggctgcgcggcggcgcgcatgttcgcgtacaacgccagcctctgcgcctgcgatccggggtactactactacctcagcagcaacggcaccgcgagctgcatcccgatgccgggcggcgggtggggcgactggcaggtgggctccgtgggcgcgccgaggaaccagagcctctacttcctggagccggtgctctcggtctacgccatccgccgcctcacccagtcccaggccgtgctcctcgaggcgaccctcgcgtcgctcctctgctggatcgccttctgcgccgcagccaggttcggcggccgggacccccgcggggagaagaggctgttccgggcccggtactgggtcagccgcctcgactgcctcttcgacaacagccactgggcgggggatcagcaagtactaaggaaaaggaaaaccgaattgggtggcacattctcagtcgctagcttgatcatcttcactggattattaactgtcctcttgtatcaagccatcaaaaggcgcagccttgagatgcatcgagtcaagccagcaaatgctccggacctgctgtctttcgtgaatgatctcgagttccacatctcaaccatctccagcatgtcctgcactcaagcggttgctcctttgacggtagcaatggggacaccagggttcatggacttcagggtggttcccctgtcaacactgttcacctacagttgcacaaacacgagccacgggccatccattacgctcaggtgcaatggatgccgggtccctccaagagatcactacgtgtcctggcaatttgttgacctgctggggcagccagcaactgctgttggtttccagttcaacctgaccgcaaggcaacatggcaacaatcagcacatgagctttgtgagtggtacaatgaactctgacggttatactgatgatgtcaagttgaagacgttcagggggagggattccaatgttctaaagatccagctgtttcctcagatatacaacaatcttggtaacctgcggctcttgcagccactggttcaagacttcactcaaggatctatgttttctgatgtcagcagcttgaattcctccctgcagaaccctagggatggagtggtgaatactactctctacataagttatctctcagactacattgtggagatcagcaatgagagtgtagtaggcccagttagtgtactcgcaagtattggtggcctttatgccttcagtgtggcaatttgtctctgcctcatgtctcaatgtgaagcaaggataaagaagcttcgtgacgaggataccagaatgctgaaaattctgagcaaacgacgtgctcagcggaattgggataagctgcggaagtttgtcatgtatacctggggtctaagcaacctagacccatctgatagaacctgtcagcagcctgaaggatcagtgatggattctcggcatatgagaagagaagcaattagacaaggaatctaagacgctaacagtactcatagagttcctgatgaaatggggggaaattgacatagaaagagctgcgagcatccaagcagttcaatatagccttgatcaagacttttagacgcaaagttgacatagccacttcgactcattcagatcccttcctgatatccttcatagatggaccttttgaaattttcccctctgcatagtcgtgttggtccctgaagatttgtcaatgcaaagagcaaaaaaaaaaaagtacagaggcagcagattgtccatgtcggttgcacctgaagctgcagagatagacttctggcatgttcctggtatagctcagctcattcgctagtcaccacccagttttattttctagttggcattacgctataaagtgactaacacgttgtaaacaaacggtacacacacaactagcatcctatcgtgccgtgaatttgcgatttggttactcagctggtgtttggtcaaaacgaatccaatactgacatggaagattacagtcgctaacccaacctgtgttcctatcctgaaacagagatcagttttaat

SEQ ID NO: 92724 - DNA, 2594 bp, Zea Mays
cgagcccgatcggcaaaagggcaactcgaacgttgatgttgtttccagttgagttggagcggagtgcgggcaggcaaaggccgcaggacacgccgaccagcagcttcttttccgccgcctcgcctcccacacttttccctctgctgtgctgggtgctccgctttgctctgcttgccgctctccgcctctccccgatctccactcgactcgtgttggcttggcttccacttccaactgactcgactggattcaagcgcccgacatccgcggagacttggccgcgagcctgcgttcgaatcctgaggacgagatcgccagagccgccgggaccgatcgagttccggctgccaatgccggctctgctcttgctgctcctgttggccgcggcgccggcgccggcgcgggcgggagacccgtactcctactacgactgggaggtctcctacatttcggcgcagcccctcggcgtcaagcagaaggtgattggcatcaacggccagttcccgggccctcccctgaacgtgaccaccaactggaacgtggtggtgaacgtccgcaacgcgctggacgagccgctgctgctcacctggaacggcgtgcagcagcgcaagacggcgtggcaggacggcgtgctcggcaccaactgcgccatccccgccgggtggaactggacctacacgttccaggtcaaggaccaggtcggcagcttcttctacttcccctccacgccgctgcaccgcgccgccgggggctacggcgccatcaccatcaacaaccgcgacgtcatacccatcccctttgcctttcccgacggggacatcacgctctttatcggtgactggtataaccgtgggcacagggagctcaggagcgcgctcgacgggggcaccctgctgggcgcccctgatggtgtgctcatcaatggattgggaccctatcagtacaacgaatccgtggttccaccagggattgtctatgagaggatcaatgtcgagccagggaaaacttacaggtttcgggtacacaatgttggggtctcaacaagcctcaatttcaggatccagaaccataacctgctccttgttgagacagaaggctcctacacctcgcagcagaactacaccaacctggacatccatgttggccagtcctactccttcttggtcaccatggaccagaatgccagcactgattactatgttgttgcaagcgcacgctttgttgatgcagctgttgtggataaattgaccggtgttgctattctccattactctaactcccagggtccagcctctggccctcttccagatcctccgaacgatcagtatgacacggcgttctctataaaccaagcaagatccatcagatggaatgttacagctagcggtgcccgcccaaatccacagggctcattccattatggtgacattactgtaacagatgtgttcctgttgcagagtagagcacctgagctcatagatggaaaactgcgttctactctcaatgagatttcttacattgcaccctcaacccctttggtgcttgcacaaatatttaatgtccccggagtcttcaaattggattttcctaatcatcctatgaaccgactaccaaaagttgacacatctattataaatggcacttataagggatttatggagattatattccaaaataatgccacaaatgttcagagctaccacttggatggctatgcattctttgttgttgggatggactatggtctatggacagaaaatagtcgcggtacttataacaaatgggatggtgttgcacgctctacaatccaggtattccctggagcttggacagctattcttgtgtttctggacaatgcaggcatatggaacttgcgtgttcagaaccttgacacctggtacttgggtcaagaagtgtacataaatgtggttaacccagaggacagcagcaccactcttccggataacgcaattttctgtggtgcactctcaagcctacagaaagaacaatcacatagattccaatactcaaaagctgccccagttccacaatggggagaaacaatttctctcctggttttgttggcatgctttgccctttggtcgctatgattcaacccccacctaagttgtctattgaggtcagtaggggggcactgctacaatggacatggaaggcagtgtggatgatgttagattattttctgaggactccgattcttgatttggttacgctcgtgtggtttgatgcaactcccaagagtgggagatttgcagaggtggagtaagttttgttttttcccctccagaagtgtaggtaaataatgcgcttggtgttgccgggtgagttgattgttttcgtgttctgtatgtaatttgactggttaattaagaccactatgttgtacttattacacaggttgagtgttgttaggactccgatctggatactagaagcttagaataccatattatcaaatcgagacagtaatgaacttttatattatattatccctatcctgatactataattgagttccatatgattccatgatattgtaatcttgatcctacataatataaatggctttcaaa

SEQ ID NO: 92725 - DNA, 1915 bp, Zea Mays
gtcccaccaacggcgtccaagccctagcctaacgatacttgcttcagcccagggctttcctccgaatccccttctcgtccaggcagttgttgcaaaaatcccgcctccctgattgcggttgttgcaaaaatcccgctacgctagtcgctaggctttcctcagcagcacttccgcgcttcgactcctggcagattggattgggtcgctgcttccaccagcaatccaattccggagatgactaccactcagttcgccatggttgaggagctggcctcgctcatcaaggacaacctgcacagcaagcacctgatcctctccaccgaggaagccctcatcgcagccctccagcagctgcactgccgcgacggcgaccgtgaagaggacgacgatgcggcggatacgatagagcttcagcctgctggggcctaccaccgccttctcttgcatcgccttgctgaaatctatgggttcgctcatgaatcggttggtgaaggcgaggatcgacatttagtcctccagtgctgccctgaaacagccatcccatctgtccttgttagtgatatgatatggaagtttgataacagtgacgatttggcgtccgttgtgctaaccagaaatgatatagattttcaaaaacctcagaaggcagatgttgtcaaagatgtttctgttaaaaactcacatctgaaagataatacagacttgaaacctctgaagcagccagcagtacttccagcggcgtcattgaaggagagggaagctgcttatcgagctgctcgtgaacgaatcttctctggggatggtgccaagggaaatgatagatcatatgtgaaatgtagacaggttcctgtcgttgcaaaacggatgattgcccatgcactcggtcaaaaggttcaaaataccacagagacagccgcctccaaagaaagcaaagggaaacaactgtcgaatgggaaaactattccgacacatagcaggaacaacttctgcccagttacaccagataacatagaagcagttctaatggggatgccaagctcagctggtagtaactcgtatcaaactccaccaagccaaaggtgccacgcaactaatactagagctgttactgctgaaagcttgaagaaagagcagactggagcagctaagagaatgtttgcgcatgcactggggctgtctgcagctcgaggaagttgtggtacgctgcccaaaccgaagtaaagatctggagtcgagaacgcggataagtgaagaaggttggctgttgccgatgcaaggtccgactgagcttcatgtcctatcatatgtgagccatgggaatggaatgagcctgcaatggttggtgccatctactgatctacctctgcgaaacacgttttttgtgatgtgctagtagatgaaagggtttgttggttggatgttaattgttgggacccagagaggatctggtagccctggttcgaaacgcaacctcagtcggtgagagagcttgctggaatgctggatacgcatggacatggcatgccaagccaagtggatgttcttcaccagagtggaagcaaaatgatccttcacatgctctaggttgctgcaatgctgcatatgtttactctagcatgttgttaggctgtctccagcaaaacttgtatacaggcgtttaaaacactttttatactgtagacatgaggctttccatgcttacgtaagcatgaggcttttaataagtgttaattagagctccagcctcacgaattttgtagctgtctgtctctagctatagaaacttaagctgcgggtaggttgaaggcatttaattgatcctttctttttcttattttggattggattaattttaaggtttagtccatttcaattatcatgtgaacctgatgtactaactaaaacaggctcctgt

SEQ ID NO: 92726 - DNA, 1856 bp, Zea Mays
gtgaaatgaactagaccaatttccttgcagagagtgttttggcgatggacgttgccttaagcaccattgtgtttgtcatcgccgttttcatcccggcactgctgacgctggtgcaaagaagccgtagccggcacgccggccataacccaccacctccgccagagcccagagccattcccctggtcggccacctccaccacctcctgagaaagaagccactccaccgcaccctcgcccacctcgctgagcgccatggagacgtcctgggcctccggttcggttccagccgagtcgcagttgtgtcctctgcctcagtcgcccagcagtgccttgtcgcactggacacctcgttcggcaaccgtccacggctgccgtccgcgaggatcctctcctatgagtggtcgaccatgggccattccaactgcgggccgtactggcgccaagctcggcgcaccaccagcacggagttctcctccgtggaacgagtgcagcacttcgctgatgtccacgagcaggaggcgcgggccatggcacgccgcctttgtcgtgtggcacatgcttctgggggacgcgctcttgtagacgtcaagtcgcgactgttggagatgctaatgaacggcttactggacatgctcttcaagaggacaacctctcggagttggagtagtgacgaaaaggacgaggccgtggaagtgagcgaggaggcccgatgcttcatggccatggcggaggagacgatggagctgacgctgacggtgtgggacttcctgccgccactggcgcggtggctggacgtcgacgcggtgggccgccggttgcagcgactgcaagcaaacaggacggagtttttgcagaggttgatcgaggaacacaaggagatggagaagggcggtcaagtcacacgcaggacgttggtcggggtgatgctggagctgcaggacaaggatcccgaagcctacacggatcagctcatccgctccttgtgtgttagtgcactcgaagctgggacgctcagtacaggctatacaattgagtgggtgatgtctctcttgctaaacaaccctcacatcatgaagaaagctcgcgacgaaattgacgcatgcgtcggggaacccaaacgcctactggacgcgactgatctcccaaagctgccgtaccttcgatgcatcatcctggagacgcttcggctgtaccctgtggtaccccttctagttcctcgtgaatcatctaccaactgcacggtcaacgggtttaatatcgccaaaggaacgatgcttcttgtgaatacgtttgctatccatagggaccctaggacatgggatgacccagaaaccttcctcccggaaaggtttgaggatggcagtaaccaagcagggaagacgacgacgacgaccgatctgtcgtttggcatggggagacgacgctgcccagcagagaacctggggatgcagttggcaggcattgctttggggactatgatccagtgcttcaactgggaacgagtgggcacggagcttgtggacatggctgagggctctggcctaaccatgtcaaagaaggttcctttggaggccttctgtcaacctcgtgcttctatggtcgatctccttgcaaacatctagagctgctatatatacaagttgcactaccaagacaatgcaagcacacgtcattatgaattctcgttgttattacagaataagtcaaaagctctgctgcttttatataaaatcaccctagctatgtatgcatgtatgttcatgtagaaacctgctatcaaataatatgtgtcctgtacagcctcatatagcatgaaataaaagtatactgtgaaacatagacctatgtgtatgtag

SEQ ID NO: 92727 - DNA, 1998 bp, Zea Mays
gctgaaaggtgcatcagcgttttgctcgagctgattaagataaaagttaattatgttgttcaggaagctataattgttatcaaagacatcttcagacgctaccctaatacgtatgagtctatcattgctacactttgtgaaagtctggacactttagatgaaccagaggctaaggcatccatgatttggataattggagaatatgctgaaagaattgacaatgcagatgaacttcttgagagcttcttggaaacattccctgaagaaccagcattagttcaactgcagctgctaaccgctactgttaaattgtttcttaagaagccaacagaggggccacaacagatgattcaggctgttctcaataatgcaacagttgaaacagataatcctgatttgagggacagagcttacatatattggcgacttctgtctactgatcctgaggctgcgaaagatgttgttttggcggagaaacctgtgatcagtgatgactccaaccagcttgactcatcacttcttgatgagctgctagcaaacatttctaccctttcatcagtttatcataagcccccagaatcatttgtcagccgtgttaaggctgctcctagggccgatgatgaagagtttgctgatacagctgaaacagggtactcggagtccccatcccagggtgttgatggggcatcaccttcatctagtgctggtacttcttctaatgtacccgtgaagcagctggcggttgcatccccacctgcaatgccagaccttttaggtgatttgatgggtatagataatgctattgttcctgttgatgaacctgcagcaccttccggccctccactacctgtcttactgccttcgactacaggtcaaggactgcaaattagtgcacaactaacacggcgtgatggccagatatactatgacatatcttttgagaatggcacccaaggtgtcctagatggatttatgattcagtttaacaagaacacatttggtcttgctgctggtgaagcacttcaggttactccactgcaaccaggccaatcaacaaggacacttttacaaatgaccccgttccagaatatcagccctggtgcaccaaactcgctactacaggttgctgtgaaaaataatcagcagccagtgtggtacttcaatgacaaaattccgctgcatgttttctttggtgaagatggaaaaatggaacgagctggttttcttgaggtaaaaagcgaactcatgaactcatgtttgcgtggttttcctgtttccttttcttgttttggcagtcaaggcgagtgatgtactgcttacagtactagttgattaaagtcactcaacagttgattcaagacacccatgtttggttctttcatatgaaatctgaagtgactgtatatgaccgcaggcctggaaatctttgcctgatgacaatgaatttacaaaagaattcccgggctctgtcatcagcagcatagatgctactgttgagcgcctcgtagcatcaaatgtgttcttcatagccaagcggaaaaatgcgaacatggatgttctgtatctctccgcgaagatgccccgtggaatccccttccttatagaggttacagccgtggttggtgttcctggtgtgaagtgtgcagtcaaaacaccaaatagggagatggttcctctcttctttgaagctatggaggctctcaccaagtgacgacaaacttaatggatctggatcggtggttctacaaaaaaaataccagtcgatgagctgctataggtgtttggacgtggcattttatttttcacggaagctggtgtgaattgtagtttttttggtattagattacagtatttaaactgctagtttcctggttccaaagttttttcaccagaaatactggaggtgttcatgccttgcatgatttgtacatcttaccatgttgtatgaagcgatgaaattgtaggtgacgaaaaagtagaataagcatagattaactg

SEQ ID NO: 92728 - DNA, 1811 bp, Zea Mays
gctgaaaggtgcatcagcgttttgctcgagctgattaagataaaagttaattatgttgttcaggaagctataattgttatcaaagacatcttcagacgctaccctaatacgtatgagtctatcattgctacactttgtgaaagtctggacactttagatgaaccagaggctaaggcatccatgatttggataattggagaatatgctgaaagaattgacaatgcagatgaacttcttgagagcttcttggaaacattccctgaagaaccagcattagttcaactgcagctgctaaccgctactgttaaattgtttcttaagaagccaacagaggggccacaacagatgattcaggctgttctcaataatgcaacagttgaaacagataatcctgatttgagggacagagcttacatatattggcgacttctgtctactgatcctgaggctgcgaaagatgttgttttggcggagaaacctgtgatcagtgatgactccaaccagcttgactcatcacttcttgatgagctgctagcaaacatttctaccctttcatcagtttatcataagcccccagaatcatttgtcagccgtgttaaggctgctcctagggccgatgatgaagagtttgctgatacagctgaaacagggtactcggagtccccatcccagggtgttgatggggcatcaccttcatctagtgctggtacttcttctaatgtacccgtgaagcagctggcggttgcatccccacctgcaatgccagaccttttaggtgatttgatgggtatagataatgctattgttcctgttgatgaacctgcagcaccttccggccctccactacctgtcttactgccttcgactacaggtcaaggactgcaaattagtgcacaactaacacggcgtgatggccagatatactatgacatatcttttgagaatggcacccaaggtgtcctagatggatttatgattcagtttaacaagaacacatttggtcttgctgctggtgaagcacttcaggttactccactgcaaccaggccaatcaacaaggacacttttacaaatgaccccgttccagaatatcagccctggtgcaccaaactcgctactacaggttgctgtgaaaaataatcagcagccagtgtggtacttcaatgacaaaattccgctgcatgttttctttggtgaagatggaaaaatggaacgagctggttttcttgaggcctggaaatctttgcctgatgacaatgaatttacaaaagaattcccgggctctgtcatcagcagcatagatgctactgttgagcgcctcgtagcatcaaatgtgttcttcatagccaagcggaaaaatgcgaacatggatgttctgtatctctccgcgaagatgccccgtggaatccccttccttatagaggttacagccgtggttggtgttcctggtgtgaagtgtgcagtcaaaacaccaaatagggagatggttcctctcttctttgaagctatggaggctctcaccaagtgacgacaaacttaatggatctggatcggtggttctacaaaaaaaataccagtcgatgagctgctataggtgtttggacgtggcattttatttttcacggaagctggtgtgaattgtagtttttttggtattagattacagtatttaaactgctagtttcctggttccaaagttttttcaccagaaatactggaggtgttcatgccttgcatgatttgtacatcttaccatgttgtatgaagcgatgaaattgtaggtgacgaaaaagtagaataagcatagattaa

SEQ ID NO: 92729 - DNA, 707 bp, Zea Mays
cacaagacccaaacccattgattcgtgctttggctgttaggacaatgggttgtatccgcgtggacaaaatcacagagtatctctgtgatccacttcaaagatgcctcaaggatgacgatccgtatgtacggaagactgcagctatttgcgttgctaaactttatgatataaacgctgagctagtagaggacagaggatttctggaggcccttaaggacttaatatctgacaataatcctatggttgttgcaaatgctgttgctgctctggcagagattcaagatagtagtgttcagccaatctttgaaatcaccagccatacactgtcaaagcttctgacagctttgaatgaatgcacagagtggggccaagttttcattttggattctttgtcaagatataaagcagcagatgccagggaagctgaaaacatagtggaacgagttacaccccgtctccaacatgcaaattgtgcggttgttctttctgctgtcaagataatccttctacaaatggagctcattacgagcacggatgtagtcaggaatctctgcaagaaaatggctccccctcttgttactcttttgtcagcagagcctgaaattcagtatgtagccttgaggaacattaatctgatagttcaaaagaggcctacaatactcgctcatgagattaaggttttcttttgcaagtacaatgaccctata

SEQ ID NO: 92730 - DNA, 2409 bp, Zea Mays
atgggcggtccaaggctcagagatggtgcggcgactcctcggctggaggttcctcttcttctccacgctcctataaagaggctgtcctctccagctcggtttgcgcagccaccccttctccctcggcgagtctctgcgccgtcagtccctctcctgcggccctcccggcgggtgaggaaggctggcaggtggttggtcgtaggcagaggtctcggggtgagcatctccctcgtccagggtcccgtgtggacctccgaggtgcggcaggaaacctcccagaaggctccggtgtggtcgagggctcctgtgcgacctccggtgtggcagaggctctccaacatggacttggttccttctccggaggataagtttcaggaaccgtctcgcagaaaggcttcagtctggaagcgccttgcttcttcacaggatcatgcaatgtcggaagaatttgctgtggcagacaacaagatgtgtactcggcccatgaggaaaaaaagacggtccaaacacggaaaaggtacagctgcgcaggatttgggtcccactcagccatgcccacctcccccccagctggattgtttcagacctgagatgccttggccaccctctgcctcctcctgcgttctggaattttctgaagaccttgctagggaggaaattgcccttcgtcgtgctctgtttgtctctgtgactggttcacgtcctggggtttctggttccgacgtgttgaaggaggtgaggcatcgttttggtgtcaagttggaggacatgaggattcatcagacctaccctgaagatttcctgctgtttctgccggatgaagacacagcaaccaaggttctcaacgaaggaagacctctgaggggaccccgtttcagtttgctgctcaaaagatggtccagattcgctcatgcgtcctcatcgtcgatggctgagttggttgttgttagattaactggcattcctcaacatgcttggagtagatctacagctgaacagttgctcagggactcatgttgggttgaagcattacattcagaagctttggaaatgagggatttttcagtcttgatggtgaaagcttggtgttttgatcctgaaaagctggtcaggaaaatggatttacacatcttggaggctgggatagatgatcaggaaaagagattcttaacctataagatttccattgatatccttccaccgaagaccctgcagatggcatcggcgaccccaccacctcctcctccacctccatcgggaagggaacctgatgatgatgatgaccctgaggatcaagatccccagcatcggcggcggccggtccctgttgatctacggcggcctgttcagatgcgtctgggcccacggcttcctttgggtcgcgcgcatgcggtaattgtgccaccggttcgggtggaagtcgaggaggatcttggggagaatgtgtgtgcttcgtttcctcccgatgctgggataattgacattcagttggaagggacgctgggtcaggccacttctccgcacctgggaacatttgtctcagggccgctggaaatcttgtgccatgactcgccccaccaggaaccatatgaagaagctataacccttgatgggccgctgggatcgtttggtccatcttcgccccaccacaatcccttggatgggacgctggagatgaccaacctgaactcgcctcatcagctatctcccatagttaaggacactgtgatagggtcgctgggcctgaataaattctcttcgcctactcacatccagcctgaggagacgctggagagaattgtttctagctcgccccataaaatcacagcgaacagtgaagccccgacaagtgtttcttactcctccgcgacctttgggaagaaacagatttccacttccctgaaggtatatattagaaaaatgtcaagaaacaaggtgtgccaggatactgaggttgtccaggtgattgttgatgaaagaagagatgctgagcaagtcctggataacttggctgaaatggaggttgttagctcagatgtggaaaaacagatcagttgttcaagctctgagtatttcctgaacagagttgctatcaggccggctgctctactgccaaatccatgcatcaatgtttacaagaaggcatcttctccactctcatcgctggctgttccccgaagaagtcgtagagtggctggggttggagttgaatttaacatgcaggacctaggaagaagatcaatgaaaaaagctatggcaaccctgcacattatttcagaaactgagggcatcagtcaggaagctattgatgcatacgccaaactgttttcccaacccctgtctcagtgtcatgttgaagcccttgcagccttgtttggctggagtgctccttctgttttggagccttga

SEQ ID NO: 92731 - DNA, 2970 bp, Zea Mays
atggacgccgtcgcccaccgcctgggcgcatgcctgccccgcgtcccggttgcatgggccgacatggctccgcccccatcgcagacacatggaaaggacggcggagccgcggaggggccaaggagcggactgtcgtccttcacctggcgaatggtgacctacgacctccgtctccggctgccgtcctccggctccggctgccgtcctctgccatggtccatggaccgtagtccggcagcagcagggctccagcctctgcccaaccgcttgcccgccaccggcttccggcctcagcccgccaccggcgtctgccacctccgcatccggcctctgggcaccagtgtcccgtctctgcccccgacgttcatcgtccggtctccgacaccaggccctcagctacagcagtacagcaccagttcccgcaacagcgaggaggagccatctcctccaaatccacagccaatttattgcccgccaggtgttcgaccaaagtcccgcgtcgtggcgcgccttcctcaaggcctactcccacggtcctttcccctggaagctctgcacctcttcaagcacgcgcgccagcacctggctgatgacacatttgtcttcaagttcgtgctcaaggcttgtgcgggtctggggtggcatcgagctggtgcacagctccatgcgctcgttgtccagaaggggttcgagttccatgcctatgtgcacatcgcccttatcaatgtgtatgtcatgtccaggtgcttggtggaagcacgcaaggtgttcgatgaaatgccagtgaagaatgtagtttcgtggaatgtgatgatcactggctttgctggatgggatgaggttgagtatgcgaggcttctgtttgatcagatgccctgcagaaatgttgtctcatggactgggctgattgatggatatacacatgcttgtctttatgcagaggctcttactcttctccgccacatgatggcaggaggcattagcccgagtgagataattgttttagcagttattcctgcgatatctaatcttggagggatcgttatgggtgagatgctgaatggctattgtgagaagaagggtatcatgtcagatgtccgggttgggaattcactcatagacttgtatgctaagattggctctgtgcaaaactcgctaaaggtgtttgatgaaatgctggatagaagaaatttggtgtcatggacatcaataatttctggttttgcaatgcatgggctgtcagttgaggcacttgagttgtttgcagagatgagaagagcagggattaagcccaacagaatcaccttcttgagtgtcatcaatgtctgcagtcatgggggtctggtacagcaagggttagcatttttcaaaagcatggtttatgagtacaatatagatccagagatcaagcattttgggtacatcatagacatgctaggtagggctggacgtttgtgtgaggctgagcaaataatagaagggttgcctatggaggttaatgtaactgtatggaggatactgttaggttgtttcagtaagtatggagaagttgagatgggggagagggcaataaagatgatatcagacttagaaagagaatctggaggtgattttctgcagggctatgaaaacatgcgacacggaatagtagaaactcaccccaagcagcaagcacccgagcggccagctccagccccaccagagaaatacggcgtaaacgccgccggggaccaacccaggcgaccggggtgcctagctcgccgtttcttttcgccttctcctcgcaatttcttaggatcaacgccctactacacgacgggggttttccccttcggccgccactccgtcctttcgcagcctgccgccggcgccatgctgtacatcgtgggcctcggcctgggcgacgagcgcgacatcactgtgcgggggctcgatgccgtacgcagctgctccaagatatacatggaggcatacacatccctcctttccctcggcctcgacccggccgcgctcgccaacctggagaagctgtacgggaaggagataacggtcgccgatcgggagatggtggaggagcgtgtcgaccaggtgctaagcgaggctgccgacactgacgtcgccttccttgttgttggcgacccgttcggggcaactacacatactgatctggttgttcgtgccaagaaaatgggagtagaagtgaaggtgatccacaatgcatctgtcatgaatgcaattggagtttgtgggctacaactttaccgctatggagaaactatctcaataccattcttcacagacgaatggagaccagatagtttctatgagaagattcagaacaatcgccagcttgggctacacacactttgcctgcttgatatccgtgtcaaggagccaacatgggaatctttagccagaggaaagaaagtctatgaaccaccaagattcatgactgtaaacactgcaataagtcagctttttgaggtggaggaagcacgtgggggatatgcatatcgcagggaaacattgtgcataggagtggcacgacttggaagtgatgatcagaagattgttgctgggcctatggagaagctactagatgttgattttgggccaccccttcactgcctgatcatagtgggagagactcatcctttggaagaagagatgctagagttttacatgatcaagtagtgatatacacaccctacacatgtgagttttcacttgtattgactaagggaatgcttagacttctgtccttgtcaatattggattgttgaatacttagccatttggatgtagaaccccaggaaatggtgcagtatgtgatttggagtgctggcagcttgtaaaacaaatctgtgctagcagtctaccattagtttacatctccgaatcttgtttgaaacttgcatgtgaacgcaggcctctgtctcaaaatataatttgttttagattaaacctaca

SEQ ID NO: 92732 - DNA, 220 bp, Zea Mays
atggcggtgggttgcttcaaccccgtgctctcgccgctcgttccttcgccgccgcgtagccgcctccgagcggcgctgcggtctcactttcaccagccgaccgcggtctcccttcgcttgctcccgtccggcgcggcagctggtcgtggcacgtggcggctcgcggcggcggcagagtcgcaggccgtgcaggagcagcaggcgcggacggaagagcccg

SEQ ID NO: 92733 - DNA, 801 bp, Zea Mays
attttccatcctttgtccagtattggtaccaaggaaataggctatgctatatcttgtttctggagtccaggaacaggaactgtaaaatctgtgttatctataacaaacataatcaagtgtcttgatcacttcctcacttcctctgttatttattgtggaactattgggaataatactgttgagggacttcttctccgccgaaggtcctctaagcaaaaacaccttcggcaaggccatatgcaagcaggcacaacacgaagaacattgacagacaacatcatcgttggtgtgtcgaaaggattcgataagaagcttcagctagtgggcgtcgggtatcgtgcggcggtggagggcaacgatctcgtgatgaacctgggattctcccaccctgttcggatggccattcctgaaggcctggcggtcaaggtggaggagaacacaaggatcaccgtgagcggctatgacaagagcgcgatcggtcagtttgctgctaccataaagaagtggaggccacctgagccatacaagggaaagggtatcagatatatggatgaagttgtccgaaggaaggaaggaaaagccggaaagaagaaatagaaagtgtttttttgccctctccttacttcatttcatttttcccactgtaatgatcttcgtttgctaaggctgaacctaagaaatatattgttctgtgctgatcatggcatatagatgtatactttgagcaccccattgtttcataatttcattgtttttcaaggtatttattctgctccattgaaaaagcgaaatgaatatcag

SEQ ID NO: 92734 - DNA, 978 bp, Zea Mays
agaatagaaccgctgtgtgcaagctccggaccgtcaggataagaaaacagcgcggcggcaggcagctcctcctgcgactgcgagcgcccgtccatggcgtccatctccccttccctccatcacccttgcaattctagaactggcttccttggaaagacacacgggactcgtcctcgtcttttctctgctggaagagttggatttgtcagaacactagtggagtgcaaggaatctagaattggaaagcagcccattgaagtcccaccgaatgttactctcacattagaagagcagtttgtcaaagctaagggcccactaggggaattatctctcagcttcccaggtgatgtgaagattgtgaaagaagaatccggtaacctgagagtttataagactgcagagaccaagcgggcgaaccagatgcacggtcttttcagaacattgacagacaacatcatcgttggtgtgtcgaaaggattcgataagaagcttcagctagtgggcgtcgggtatcgtgcggcggtggagggcaacgatctcgtgatgaacctgggattctcccaccctgttcggatggccattcctgaaggcctggcggtcaaggtggaggagaacacaaggatcaccgtgagcggctatgacaagagcgcgatcggtcagtttgctgctaccataaagaagtggaggccacctgagccatacaagggaaagggtatcagatatatggatgaagttgtccgaaggaaggaaggaaaagccggaaagaagaaatagaaagtgtttttttgccctctccttacttcatttcatttttcccactgtaatgatcttcgtttgctaaggctgaacctaagaaatatattgttctgtgctgatcatggcatatagatgtatactttgagcaccccattgtttcataatttcattgtttttcaaggtatttattctgctccattgaaaaagcgaaatgaatatcag

SEQ ID NO: 92735 - DNA, 860 bp, Zea Mays
agaatagaaccgctgtgtgcaagctccggaccgtcaggataagaaaacagcgcggcggcaggcagctcctcctgcgactgcgagcgcccgtccatggcgtccatctccccttccctccatcacccttgcaattctagaactggcttccttggaaagacacacgggactcgtcctcgtcttttctctgctggaagagttggatttgtcagaacactagtggagtgcaaggaatctagaattggaaagcagcccattgaagtcccaccgaatgttactctcacattagaagagcagtttgtcaaagctaagggcccactaggggaattatctctcagcttcccaggtgatgtgaagattgtgaaagaagaatccggtaacctgagagtttataagactgcagagaccaagcgggcgaaccagatgcacggtcttttcaggtagacaattggaaactgtaatatgattttgcccatattagtttttactgatttacttctcataatgtgattcactgtttcactgcctttattccttgttgtgtatgccttctcctgatattcctaaaagcaactcgctaacttctgaactgtctgcttcttgccaaaactcttatatttgtgtcactttgtacaatcaagagcagtattgattcccatgggtatttcactgcgatagtaccagtgccttgaataagccgtatcacacatgttattttcatatgtgagtagataaactgtcctgtgatcctgctacctcttacaacgactaggattgagattttagatagcattgctctgcttcatgtgtctattttttcctctggcctcttgtctcaccaatgaccagtaaatatgatggac

SEQ ID NO: 92736 - DNA, 102 bp, Zea Mays
ggaacacatctgtgctgaactcgtgtttgcttggttaccagatcagaatgtccctgctctggaatacatttgtgagttcgcggttccacgtttgccagttcg

SEQ ID NO: 92737 - DNA, 1522 bp, Zea Mays
gaaaacaaagcacgaccagaaccgcagaggggggacacccggactcagagagagagagaggggcattcgcccgttcgaattctctcgcctcggcctcctcctcacctgcctgctcggctgctcgccagaccaaccacagccgtcggcgctgcagaccgcggcgggcaggatcagcggtgcgtagcctgcccatttcgcgaggaccatataattccaagaccctgatgatggccacaactgcttatatcgatgattcctgttcggaggttattgatcccccgaagactgaggtgctggatgttgctgaactccctggtgaccatactcagaacccaccaaaaccgaatgttgtggtgtctagcagtgtgcgtgaacttctggaatgtccagtctgtttgagtgccatgtatcctcctattcatcagtgctctaatggtcatacattgtgttccggatgcaaaccaagggttcataaccgttgtccaacttgtaggcatgaactgggtaacataaggtgtcttgctcttgagaaggtggctgcatctcttgaacttccatgcaagtaccagtgctttgggtgcccaggcatttatccttactacagcaagctgaagcatgagtcgcagtgccaatatagaccttatagttgtccatatgctggatctgaatgcacagttgctggtgacatcccatatttggtgaatcacttgaaagatgaccacaaagttgacatgcacaatggctgtaccttcaatcatcgctatgtaaagccaaaccctcatgaagttgagaatgccacatggatgcttacggtattcagctgctttggccagtacttctgcctacacttcgaggccttccagctgggcatgtcacccgtctacatcgccttcctgaggttcatgggagacgacgcggaagcgaagaactacagctacagcctggaggtagggggcacggggcgcaagatggtctggcagggggtgccgcggagcatcagggacagccaccggaaggtccgggacagctacgacgggctcatcatccagaggaacatggccctgttcttctcgggtggcgacaggaaggagctcaagctgcgtgtcaccgggcggatctggaaggaacaatgagcttgatgggtcagctagtacgtctgtcccgctccgctgctgccctgaactcatgaatcgcatcgcaaagagcttttgccagtcgtaggaatgggcgactctgtggttcgttctgtgttttcagcttcttctcgcttgctattgtcttcatggttcctgcagggtaggtaggtgctgttggatgtgtagatcatgtagaggttggaggttgctaccgatgcagaattcgtggagatttcctattttattgaactgtctttagagcagcttcaagagatgagctattagtgttgtcgagtaaaaaatttggatgcccttcccgcgcggaagcatctttattcccgcacgtagccaatatcggtgctgcgagtagagatggcaacggctat

SEQ ID NO: 92738 - DNA, 1435 bp, Zea Mays
gaaaacaaagcacgaccagaaccgcagaggggggacacccggactcagagagagagagaggggcattcgcccgttcgaattctctcgcctcggcctcctcctcacctgcctgctcggctgctcgccagaccaaccacagccgtcggcgctgcagaccgcggcgggcaggatcagcggtgcgtagcctgcccatttcgcgagcaggaccatataattccaagaccctgatgatggccacaactgcttatatcgatgattcctgttcggaggttattgatcccccgaagactgaggtgctggatgttgctgaactccctggtgaccatactcagaacccaccaaaaccgaatgttgtggtgtctagcagtgtgcgtgaacttctggaatgtccagtctgtttgagtgccatgtatcctcctattcatcagtgctctaatggtcatacattgtgttccggatgcaaaccaagggttcataaccgttgtccaacttgtaggcatgaactgggtaacataaggtgtcttgctcttgagaaggtggctgcatctcttgaacttccatgcaagtaccagtgctttgggtgcccaggcatttatccttactacagcaagctgaagcatgagtcgcagtgccaatatagaccttatagttgtccatatgctggatctgaatgcacagttgctggtgacatcccatatttggtgaatcacttgaaagatgaccacaaagttgacatgcacaatggctgtaccttcaatcatcgctatgtaaagccaaaccctcatgaagttgagaatgccacatggatgcttacggtattcagctgctttggccagtacttctgcctacacttcgaggccttccagctgggcatgtcacccgtctacatcgccttcctgaggttcatgggagacgacgcggaagcgaagaactacagctacagcctggaggtagggggcacggggcgcaagatggtctggcagggggtgccgcggagcatcagggacagccaccggaaggtccgggacagctacgacgggctcatcatccagaggaacatggccctgttcttctcgggtggcgacaggaaggagctcaagctgcgtgtcaccgggcggatctggaaggaacaatgagcttgatgggtcagctagtacgtctgtcccgctccgctgctgccctgaactcatgaatcgcatcgcaaagagcttttgccagtcgtaggaatgggcgactctgtggttcgttctgtgttttcagcttcttctcgcttgctattgtcttcatggttcctgcagggtaggtaggtgctgttggatgtgtagatcatgtagaggttggaggttgctaccgatgcagaattcgtggagatttcctattttattgaactgtctttagagcagcttcaagagatgagctattagtgttgtcgagt

SEQ ID NO: 92739 - DNA, 1364 bp, Zea Mays
gaaaacaaagcacgaccagaaccgcagaggggggacacccggactcagagagagagagaggggcattcgcccgttcgaattctctcgcctcggcctcctcctcacctgcctgctcggctgctcgccagaccaaccacagccgtcggcgctgcagaccgcggcgggcaggatcagcggtgcgtagcctgcccatttcgcgaggaccatataattccaagaccctgatgatggccacaactgcttatatcgatgattcctgttcggaggttattgatcccccgaagactgaggtgctggatgttgctgaactccctggtgaccatactcagaacccaccaaaaccgaatgttgtggtgtctagcagtgtgcgtgaacttctggaatgtccagtctgtttgagtgccatgtatcctcctattcatcaggcatgaactgggtaacataaggtgtcttgctcttgagaaggtggctgcatctcttgaacttccatgcaagtaccagtgctttgggtgcccaggcatttatccttactacagcaagctgaagcatgagtcgcagtgccaatatagaccttatagttgtccatatgctggatctgaatgcacagttgctggtgacatcccatatttggtgaatcacttgaaagatgaccacaaagttgacatgcacaatggctgtaccttcaatcatcgctatgtaaagccaaaccctcatgaagttgagaatgccacatggatgcttacggtattcagctgctttggccagtacttctgcctacacttcgaggccttccagctgggcatgtcacccgtctacatcgccttcctgaggttcatgggagacgacgcggaagcgaagaactacagctacagcctggaggtagggggcacggggcgcaagatggtctggcagggggtgccgcggagcatcagggacagccaccggaaggtccgggacagctacgacgggctcatcatccagaggaacatggccctgttcttctcgggtggcgacaggaaggagctcaagctgcgtgtcaccgggcggatctggaaggaacaatgagcttgatgggtcagctagtacgtctgtcccgctccgctgctgccctgaactcatgaatcgcatcgcaaagagcttttgccagtcgtaggaatgggcgactctgtggttcgttctgtgttttcagcttcttctcgcttgctattgtcttcatggttcctgcagggtaggtaggtgctgttggatgtgtagatcatgtagaggttggaggttgctaccgatgcagaattcgtggagatttcctattttattgaactgtctttagagcagcttcaagagatgagctattagtgttgtcgagt

SEQ ID NO: 92740 - DNA, 880 bp, Zea Mays
cttctagcccccttccaactttgacgcccgcgtcagacggacaacgcacgatgcaagcccgagacccctccctccccacgccgccacccaccatgccctctccctcccctcacagccgtccctctccccaccccctggccccaccgcactaaacagcagcgacacacccgtccctaccccaaggaatcaagaggtcaatccccctgtgcttcgaccattctggaccgtatgagtaaagattccattgcgaaggaggtggcggaggcgcaatcggtactaacagtggacgccgtgtctgctgtattgtcaaggtaatttttcaataacacatcgggagattattttatgatggcatgtggtgcatggtcaaacggaaacttttcatgcaaaacaaggagcggctcgttcatgtcctgaaggggattacggtcggaatagagaagtgccaagcgacaccactatctcaggaagtgttgattgtatggggagaccacaaccagttgttcctggtggaggcgtttgcagttcataggactctgaattggagcgctagactggaggtcatatagaagacaagccatgttcctcagctggaggattcgacttgcttcaacaaggtcatcctggactttctcaaaaagcctaatctgtcggttaatggtagctcgcaataaggtaccaagctgcattggtgattagtcaatgatagtcgacttgattgtttgtaataagatatctagacagttcagtccattcaacaaatggtaactttcaaaaagaaaaaaaatatttctactttatctaagaacgtcgcaacagatatgcatgtatattgtaagttttggtcgtatggtgttttgatcgtcacttctcctatata

SEQ ID NO: 92741 - DNA, 816 bp, Zea Mays
cttctagcccccttccaactttgacgcccgcgtcagacggacaacgcacgatgcaagcccgagacccctccctccccacgccgccacccaccatgccctctccctcccctcacagccgtccctctccccaccccctggccccaccgcactaaacagcagcgacacacccgtccctaccccaaggaatcaagaggtcaatccccctgtgcttcgaccattctggaccgtatgagtaaagattccattgcgaaggaggtggcggaggcgcaatcggtactaacagtggacgccgtgtctgctgtattgtcaaaaacttttcatgcaaaacaaggagcggctcgttcatgtcctgaaggggattacggtcggaatagagaagtgccaagcgacaccactatctcaggaagtgttgattgtatggggagaccacaaccagttgttcctggtggaggcgtttgcagttcataggactctgaattggagcgctagactggaggtcatatagaagacaagccatgttcctcagctggaggattcgacttgcttcaacaaggtcatcctggactttctcaaaaagcctaatctgtcggttaatggtagctcgcaataaggtaccaagctgcattggtgattagtcaatgatagtcgacttgattgtttgtaataagatatctagacagttcagtccattcaacaaatggtaactttcaaaaagaaaaaaaatatttctactttatctaagaacgtcgcaacagatatgcatgtatattgtaagttttggtcgtatggtgttttgatcgtcacttctcctatata

SEQ ID NO: 92742 - DNA, 1925 bp, Zea Mays
ggaatcctcgcccaaaatccatagctgtcgcaccaccttccatccttggcagttggcacccccttcggcagcgccccccttctagcccccttccaactttgacgcccgcgtcagacggacaacgcacgatgcaagcccgagacccctccctccccacgccgccacccaccatgccctctccctcccctcacagccgtccctctccccaccccctggccccaccgcactaaacagcagcgacacacccgtccctaccccaaggaatcaagaggtcaatccccctgtgcttcgaccattctggaccgtatgagtaaagattccattgcgaaggaggtggcggaggcgcaatcggtactaacagtggacgccgtgtctgctgtattgtcaagttagctgctctctcgtgccctctgcaatgtttccctacctctttgttgtacgtgcctttgtagccctatgtactgccatgaaatgttgggctcgtcgtcgttgtagacatcgtgtgtggttttttgtgtgtttggaatcatctctggtgttcttcttgattcatgccccctgactgctttgtctggcagacgacaagcagggatggtgccttatcttctttacagcctaacgaatgatggttttgaggtcattgtctaattaggtttaatcttggactaatccagtaatatttgtttgccattgttgaatcgaatactgctctttccattccccatcgtttggtgtgtttagactgtatgtgttgggtgaatggtgcccaaagtttatgagacatggaatgagtacaaataatctggttgttgttttttccagggtaatttttcaataacacatcgggagattattttatgatggcatgtggtgcatggtcaaacgggtaatgcatggtgcagattccatcgggagttccacatctatgtgtgcaatctttttgacacaagacgtgtatatgtaaattaggtccaataataccatgattcagatttagttgtgtcaaggcgtttaggaaaaaaatgtccctgctcatccataggaccaaaaatcgtttccaggatactatttcgctttggttagatagctggtccatgtaatcttccttttcctttacctccttttccttgtccatgtttgtaaatactttcctttatttataatttaacctggtaggggtctatcttttatgcctaaacttgacacttccttcagttttaactgttttttaatcgaagtaaccccatttccattcacagaacggaaatacaagtgagaaagatattacatactaatttaaagtttcatgttcatcgcctcctgaaatgctgccatagatgttgcttgtccactggtccagccagttcagcattgaagtactcctagcactgatttttttctttacctgtcatatgtcagaaacttttcatgcaaaacaaggagcggctcgttcatgtcctgaaggggattacggtcggaatagagaagtgccaagcgacaccactatctcaggaagtgttgattgtatggggagaccacaaccagttgttcctggtggaggcgtttgcagttcataggactctgaattggagcgctagactggaggtcatatagaagacaagccatgttcctcagctggaggattcgacttgcttcaacaaggtcatcctggactttctcaaaaagcctaatctgtcggttaatggtagctcgcaataaggtaccaagctgcattggtgattagtcaatgatagtcgacttgattgtttgtaataagatatctagacagttcagtccattcaacaaatggtaactttcaaaaagaaaaaaaatatttctactttatctaagaacgtcgcaacagatatgcatgtatattgtaagttttggtcgtatggtgttttgatcgtcacttctcctatata

SEQ ID NO: 92743 - DNA, 1098 bp, Zea Mays
atgcagcagttcctcgcacaaaccggcggcagcagcagcagcgcggcgacgtcaccgccggcgtcgccgcagccgcgtctcaggcagcaggcgcctaggaaggaaagggacccgcagaacaaggagaaggaggcgccgccgcccatggccgacgagcaccaagacctcaccagggccttcgcgggtctgggcgggctgggcgtggacgagacggcgctggtgtccgcgctggggcggtggcggcgggagccggagaagcgggcgcagttccggcgcggcttcccgggcttcttctcgtcgagcgccggcgccgggatcgagcggtgcgaggacgagtacctgctgcacctcaaggcggagttcgcgcgcttcaaggacgcggcggtgctgtgggcgatgcacccgtgggagcgcgacgcgcgctgggcgcaccacgtgctgcacaaggcgcacccgccgcacatcctcgtcgaggtcgcctgcacgcgcaccgccgacgacctgctcggcgcccgccgcgcgtaccaggcgctctaccaccgctcgctcgaggaggacgtcgcgtaccgcgtcagggacgccaacgccagtctgctgttggggctggtaagcgcgtaccggtacgagggcgcgcgcgtgaacgaggacctcgccactgaggaagccaaggcgctggccgccgctgttagggccgcgccggcggcggcgaccaagctagtgcagaacgagcaggtggtgcgggtgctggttaccagaagcaagccccagctcggggccaccttcagggtctacatggagctgcacggcaagccgcttgaagaggaactgcccgccgagccgtgcctgcgagaggccgtcaggtgcttggactcgccgcccaagtacttcagcgaggtgatccacagggcgttcagcgacgacgcggacaggcaggccaaggcggcgctcacccgcgtcctcgtgtcccgcgccgacacggacatggaggatatcaaggacgcctacaccaggcagtacgggacaaagctcgccgacgccgtggccaagaacacccatggccactacaaggaagcgctgctcgccatcatcggcaagtga

SEQ ID NO: 92744 - DNA, 3229 bp, Zea Mays
ctttcctttcctccctttccctcgccgtaccaccacccgctcctcttctccgcctctgcctcctcctgcagaagccgccgcacaaaacccaaaccctaaccgccgcccctccgaggcgcgccagatcggcggcggcgcccactgctgctgctccggatccaatgcagcggctgccgtagcgcgggagctgccgatctgaggcggcggcggcggcgctggcgcaggtgggacagggatgtcgtctgcgccggtggcgggggcggcgttcgagcggtaccagcagcgcggaggtggcggccccgcggcggccaacggcaacacggttttcaagagtgggcctcttttcatatcatccaaagggattggatggaaatcatggaagaaacgttggttcatcctcacaagaacatcattggttttcttcaagagtgatcctagtaccttgccccagagaggtggtgaagtgaatgttactctaggagggattgatttgaacaattctgggagtgtggtagtcagagaagacaagaagttattgactgtacttttcccagatggccgtgatggtcgtgcattcactcttaaggcagaaacttctgaagacttgtttgagtggaaaacagcattggaagaagctcttgcacaagctccaaatgcagctcttgtgatgggacataatgggatatttcgtaatgacacagctgacacatatgaaggagctattccaaattggagagagaagagaccgatcaagtcattggtgacaggcaggccaattctgcttgcacttgaggatattgatggcagcccttcttttttagaaaaagccctgcgctttcttgagaaacatggaataaaggtggaaggaattttgaggcagtctgcagatgtggaagaagttgacaggagattgcaagaatatgaacaaggaaggactgagttttcagcagatgaagacgctcatgttgtcggtgactgtgtaaagcatgttctccgagagctgccatcatcccccgtgcctgcttcttgctgtacagcattattggaagcgtttcgtctggagactaaggatgctaggataaatgctatgcgttcagctatatctgagacatttcctgagcccaatcggaggttgctgcagagaattttaaaaatgatgcacactgttgcatctcacacttctgaaaatcgaatgactgcatcggcagttgctgcctgcatggcgcctcttctgttgcgtccacttctggctggtgaatgtgagatggatgaggtatttgatatggatggtgacgattctgcgcagcttcttgctgcagcaaatgccgcaaacagtgctcaaggaattgtcgcaactctcttggaggaatatgagggcatttttcatgatgaacacctcagatgttccttgtcacctgaatctcaaattgaagatagtggtactgaagcatcaactgatgatggtaatttggaagccaagggcaatggatttcatgatgcagaaaatgatgtagatcaagaaatggatgatgacaatggcgtggaacgtatacttagtgggaaattgagtgagagcagtggatatgctggcagtgacctctatgactacaaggcagtcaatgctgaggagtcagatgctgaacgccctgtgaagatgttggaaggaaatttgaatttgagcaaagtacagaacagcctttcaactgaaaatggttcagcgaatgtggatagcttactaagcgaaaataatccttctaacccaacagttggtcacgagactttgtctatgggggagatcctttcttcttttgatcctggaatttctgtaccgacccatagtcctgaatattctgtagagagacagacaaacaaaactaatggatctcacccacatgtgaagcggagtaacttttgggggaggaataatgcaaggaagggccaaaactctgaatcagtcgattcatctggagaagaagagcttgctattcaaagactagagattgcgaagaatgatctgcaaaacagaattgcaaaagaggctagagggaatgcaattctacaggcgagtttggaaagaagaaaacaagcgctacatgaacgcagattggctttggaacaggatgtctccaggttgcaagaacaactgcaagctgaaagggatctgcgagctgcattggaggttggcttgagcatgtcttctggacagttttcaagtgctcgttcgatggacgtgaagacaaaggcagaacttgaggagattgctctcgctgaagctgatgttgcaaggttaaaacagaaggttgcagagcttcacctccaactcaatcaacaacgtcaacaccagtatggctctgtagtagatgcaaatgatcgtcatcaccgcctccctggtcatttctcacagcaaaactttgttcaacaaggatttgatatgaaccttgctttctgcaatcaagagaagcagagaaatgaggagagttcggtggagtcatcacaatggagaaacatcaagcagcatgtgctaccttatggttcttcgaggccactcacacgaaagctttcatttgatgcctcctcaagtgaatcaaggggcacagaaccctcaacaagtatgtcaacagagaacacctctgtgtccatcaacgtcccaaagctggcagagggcattgaatttgggaggcaaccaatggtcacatcctccactttggtagagctaacaactagactagatttcttcaaggagcgaaggtcgcaactgatggaacaacttcatagccttgatttgggacgtggatctgctccgcagggctttccattcaagccaccctctccttggaaccacccgaggtaggaggatgaccgtttgatttcatgattgtaaattcttcagtagtggttcttttctccccgcctggcgattgcagaaaactgcatatacgagtgtaaatgtattttgctcttcgatatggttttagctttcgtgttgtgcgaggatagctccttaagtgggatgtgtgatatagtcttttctgtataacacgttgtcatggagagatgccttttagacaagtttttccagtgttgtggcggtgtatatgtattttgtgcgacttggcgaagaaattgaataggttgactgcttgtatggccgtttgattcatgcctagggcaaaggacaggatgaggaaaactgggatcaaatgagaacccagcacgagtttataaataa

SEQ ID NO: 92745 - DNA, 2992 bp, Zea Mays
ctttcctttcctccctttccctcgccgtaccaccacccgctcctcttctccgcctctgcctcctcctgcagaagccgccgcacaaaacccaaaccctaaccgccgcccctccgaggcgcgccagatcggcggcggcgcccactgctgctgctccggatccaatgcagcggctgccgtagcgcgggagctgccgatctgaggcggcggcggcggcgctggcgcaggtgggacagggatgtcgtctgcgccggtggcgggggcggcgttcgagcggtaccagcagcgcggaggtggcggccccgcggcggccaacggcaacacggttttcaagagtgggcctcttttcatatcatccaaagggattggatggaaatcatggaagaaacgttggttcatcctcacaagaacatcattggttttcttcaagagtgatcctagtaccttgccccagagaggtggtgaagtgaatgttactctaggagggattgatttgaacaattctgggagtgtggtagtcagagaagacaagaagttattgactgtacttttcccagatggccgtgatggtcgtgcattcactcttaaggcagaaacttctgaagacttgtttgagtggaaaacagcattggaagaagctcttgcacaagctccaaatgcagctcttgtgatgggacataatgggatatttcgtaatgacacagctgacacatatgaaggagctattccaaattggagagagaagagaccgatcaagtcattggtgacaggcaggccaattctgcttgcacttgaggatattgatggcagcccttcttttttagaaaaagccctgcgctttcttgagaaacatggaataaaggtggaaggaattttgaggcagtctgcagatgtggaagaagttgacaggagattgcaagaatatgaacaaggaaggactgagttttcagcagatgaagacgctcatgttgtcggtgactgtgtaaagcatgttctccgagagctgccatcatcccccgtgcctgcttcttgctgtacagcattattggaagcgtttcgtctggagactaaggatgctaggataaatgctatgcgttcagctatatctgagacatttcctgagcccaatcggaggttgctgcagagaattttaaaaatgatgcacactgttgcatctcacacttctgaaaatcgaatgactgcatcggcagttgctgcctgcatggcgcctcttctgttgcgtccacttctggctggtgaatgtgagatggatgaggtatttgatatggatggtgacgattctgcgcagcttcttgctgcagcaaatgccgcaaacagtgctcaaggaattgtcgcaactctcttggaggaatatgagggcatttttcatgatgaacacctcagatgttccttgtcacctgaatctcaaattgaagatagtggtactgaagcatcaactgatgatggtaatttggaagccaagggcaatggatttcatgatgcagaaaatgatgtagatcaagaaatggatgatgacaatggcgtggaacgtatacttagtgggaaattgagtgagagcagtggatatgctggcagtgacctctatgactacaaggcagtcaatgctgaggagtcagatgctgaacgccctgtgaagatgttggaaggaaatttgaatttgagcaaagtacagaacagcctttcaactgaaaatggttcagcgaatgtggatagcttactaagcgaaaataatccttctaacccaacagttggtcacgagactttgtctatgggggagatcctttcttcttttgatcctggaatttctgtaccgacccatagtcctgaatattctgtagagagacagacaaacaaaactaatggatctcacccacatgtgaagcggagtaacttttgggggaggaataatgcaaggaagggccaaaactctgaatcagtcgattcatctggagaagaagagcttgctattcaaagactagagattgcgaagaatgatctgcaaaacagaattgcaaaagaggctagagggaatgcaattctacaggcgagtttggaaagaagaaaacaagcgctacatgaacgcagattggctttggaacaggatgtctccaggttgcaagaacaactgcaagctgaaagggatctgcgagctgcattggaggttggcttgagcatgtcttctggacagttttcaagtgctcgttcgatggacgtgaagacaaaggcagaacttgaggagattgctctcgctgaagctgatgttgcaaggttaaaacagaaggttgcagagcttcacctccaactcaatcaacaacgtcaacaccagtatggctctgtagtagatgcaaatgatcgtcatcaccgcctccctggtcatttctcacagcaaaactttgttcaacaaggatttgatatgaaccttgctttctgcaatcaagagaagcagagaaatgaggagagttcggtggagtcatcacaatggagaaacatcaagcagcatgtgctaccttatggttcttcgaggccactcacacgaaagctttcatttgatgcctcctcaagtgaatcaaggggcacagaaccctcaacaagtatgtcaacagagaacacctctgtgtccatcaacgtcccaaagctggcagagggcattgaatttgggaggcaaccaatggtcacatcctccactttggaaccacccgaggtaggaggatgaccgtttgatttcatgattgtaaattcttcagtagtggttcttttctccccgcctggcgattgcagaaaactgcatatacgagtgtaaatgtattttgctcttcgatatggttttagctttcgtgttgtgcgaggatagctccttaagtgggatgtgtgatatagtcttttctgtataacacgttgtcatggagagatgccttttagacaagtttttccagtgttgtggcggtgtatatgtattttgtgcgacttggcgaag

SEQ ID NO: 92746 - DNA, 1305 bp, Zea Mays
aagctacagccgggcaaaagcgaagaactgttgaagcatgccacgcctgaccgcccccctcctcgcctaatctacccaccacccggccacccgtctcgccctctcataaattctctctcgctgccccaccgatcaaccaccccgcttcccccgaccgcgtctcggagcacccttctcaaccgcatcctgcctctgctcggtgtcgccgtctcgactgcaggagaggggagcgccccgtcgccgatctgatcgggagccggaggccaagcgtcgaggtgagcccgtcaggaaccgccatggcagcggccgccgccgattccgacaccgccgcagctgtgggcgccatgtccacctgcgcccactgtcagcgagaaatcccatttttgaacatcgacttgcactctgtacattgcgcccgcaacctccaaaagtgccagcactgcggcgaaatgattcctaggaaacttatggatgaacattatgatgaaaaccatgccccgatcaattgctccctttgtaaagaaacaatagaacgtgagagctgggatcttcataaaggtgaaaagtgcccacaaagaattgtcgcttgtgaatattgcgagtttgaattgcctgcagttgatctccatgaacatcaggatgtatgtggaaaccgaacagagctttgccaaacatgcaggaagtatattagactgcgtgaatggacagggcacgaaatacagtgccatacaaactcaaatggttctgcagacacatcccgagcaattccagagagagaactacgaccgccgccgccgccagtgcgacaggcgcgaccagcacgtcctgcccacgcttcaccacacaagcggctcctcttcacaatcgccgtcactggaatagcagttatgatcggctccatactgttccagagggacgagggtttctagctccagtagccatggactcgctctgtcaaggtgcttcttgaccgggagagtcatgcggtcatgccacaggaaggtggtattaatgtataataactcgttcgaatcaattacaataactggagtttgttagggagtatagccccaggcatgcattcgtcaaaaggcgaagttatgttctgcccctggcagttctgagacttgtgtttgctttgacactgcacttgaatttgttcatctgtaagtcagagatgagttatacaatcggccagtgtcatatctggaattgcgacacggtgcagcagctgttaatactttggcttatatcctgtaatgatactttgctgttggaatgagtatagcgtatcaatttgtgggg

SEQ ID NO: 92747 - DNA, 1833 bp, Zea Mays
cgggggtcgtcctgcaacgcggagcgaggaggctgcgaaagagaccacaacgccgcgcagccggcaggccggccgtcgcgtggctcgttgatacgcccgcgaaccgcgaccccgcgtacgccatggtccggcctgcgcttatccggcgacattactcacgaggcgatggcgatgcgaggaaggacagctaggacctatccttatttaaaccctgacgccaccttgtgctgttcaaggagtgaatactgaacagtccagtcagtcgtctctacctcatacgcctgacgaatcttgattcttgagcttgattgggtgtcatctcttttagctgcaactgcagctggctgtgatcatggcatcgctgagtgctgacctcttttacgacatactcaagcgtctcgatgctgcagctctggcaagagcaggctgtgcctgcgctgattttcgtgccatatcaaatgaagaggatctgtgggaaaatgcctgcacatctctgtggccatcaatgagacgagatgacgttaggagcttaattgcctctgctggtgggttcaggaagttctatgcggattgtttcacacttatactgaacaaggacgtccctgtggttcaagccaatgaaactaacttctttgccgaagaatgggctgagtcttgactactactactacgacgacggcggcatggacgattctgaaaactcattgccttcggatttcgtgtctttgatcgatgtatggtacaaaggccatgcgctctactcgaaggtcatatggggaattcccagctcagacagtgccaatggatggttctacaactacccgttccggatcgacctgtctcaacactcggctgaaaacaacgagaacaacaacggagatgtattcctatccactgtcagtggcgtgtcaccggtaccctcaatggagcaagaaaggaaagacggcaagctatggagggagttgaacgatggtgtaaagctgagctggattgttgtcaacaagaagatgaagagggcagtgaacctgacgagctggcacccgctgagcgggcagaggcactggccgaccgatgctgacttcgttctgcggttcgggtctgtgcttccggcgaaggaggtcctgccctgccaggtggcggaatgcatcctgctgatgaagttccgcgtgacaggcatgggcggcgaggaggctggggagccttcgacgctcgcgctgacggaactgagcatgcagatccaggacatgggcggcgtccatctcaacggccgctgcagcctcctcctcctcaaggaggcgctgagctgccaccgcagcaggaactacgatgaggtgctggagtcttgcaatttgtacctcaaggcacagagtgagctgaaggaagagaagatacgcagcgagtgccggttcgacacgctgtgtgttttcagtggcattgcaatatttgctgctatctgcaccatgtggtatagaaagttttagaagatctgactccataggtagataaggctagctgcggattcagtaagtgttgtagtgattcacatgtttgagaacttgtaaacactgtgtacttattaatgctggttatttagttctccttagatatttcatggggaaaataacctaatgtcctcatgtatgaaagtggaaaataaccaaaataacaacaacaacaacaacaacaacaaagccttttttgtcccaagcacgttggggtaggctagagatgaaaccccgtatgaaaacctcagagctcaacccccaaagaacagaaaagggaaacaaaggcaaaggagaaccgaaaacaacgaaacggggaaacacataaaag

SEQ ID NO: 92748 - DNA, 1439 bp, Zea Mays
atttgtgtaaatcagcctcatcacctggtggtgctggaaaagaagtccgaacggaggagcagagctcgatcccaattaacaatgtcgtccgcagcaagaagcactggttctctcccggtggctaacgtccaggcgctcgcggaggcttgcaatgacgacgggggcgacgtccaggtgcccgagagatatctcagcaaggatcccagcagcgcggaggaggtcgtcgtcgtagccggcgacgacagcgcctgcagggcgattcctgtcatcgatctccgtagcccgtaggttgctcgatccggagtcatcggaggaggagaccgccaagctggcgtctgcctgcctcgactggggcttcttccagctaatcaaccatggaattccggacgaggtgaccggaaacctgatgaacgacgtggctgggttcttcgggcagccgctggacgccaagaaggaatgcgcgcagcaggccgacagcctcgaaggatacgggcaggccttcgtggtgtcagaggaccagaagctggactgggccgacatgctcttcctcatcgtgcagccgagggaggccagggacacgcgcttctggccgacgcgccccgcgtccttcggggactccgtggactcctactccctggaagcttcgaggctagcgtaccgcctgctggagctcatggccaggggcgtcggggccgccgacccggcgtcgctaagacgcgtgttcgaggggcagacgcagggcatgcgggtgaactactacccgccgtgccggcgggcggcggaccgggtgctgggcctgtcgccacacaccgacgcgtccggcctgacgctgctgctgcaggccagcaacggcgtgcagggcctgcaggtcaggaaggacggcaggtggttcgccgtggacgccatcgacggcgccctcgtcgtcaacgtcggcgactttcttgagatcctgagtaatggaaaattcaccagcgttgagcacagggccgtggtacacccaaccagagagagaatgtcggcggcgctgttcctgtaccctcgccagaacatgagggttggcccattgccggagttcgtgaatggcggtaatgagcggtatggatcaacggattatgaggaatttatgaagcattactttgcaacgaagcttgacggaaggaagcacctagacagattgaagttggagcagtaggcagtagctatctctaccgtatctatctcgctggagggaccaataaataatttttctatgcgataaatacttcgtcctcaagcacctagagagcagatataaataatgttctccagctttgattcgcaaaaaatgcgcatgattcaaaatgtgttatgataggataggatcgactcggtccatgaccgagacggtcaagatcaaccctaacattctctccatttaatctcatactcattttcttata

SEQ ID NO: 92749 - DNA, 975 bp, Zea Mays
attgtgccagcatacgcaaacaaacttggcaggtatggatcatcacgtggtgaagacgacgcaccccgtaggttgctcgatccggagtcatcggaggaggagaccgccaagctggcgtctgcctgcctcgactggggcttcttccagctaatcaaccatggaattccggacgaggtgaccggaaacctgatgaacgacgtggctgggttcttcgggcagccgctggacgccaagaaggaatgcgcgcagcaggccgacagcctcgaaggatacgggcaggccttcgtggtgtcagaggaccagaagctggactgggccgacatgctcttcctcatcgtgcagccgagggaggccagggacacgcgcttctggccgacgcgccccgcgtccttcggggactccgtggactcctactccctggaagcttcgaggctagcgtaccgcctgctggagctcatggccaggggcgtcggggccgccgacccggcgtcgctaagacgcgtgttcgaggggcagacgcagggcatgcgggtgaactactacccgccgtgccggcgggcggcggaccgggtgctgggcctgtcgccacacaccgacgcgtccggcctgacgctgctgctgcaggccagcaacggcgtgcagggcctgcaggtcaggaaggacggcaggtggttcgccgtggacgccatcgacggcgccctcgtcgtcaacgtcggcgactttcttgagatcctgagtaatggaaaattcaccagcgttgagcacagggccgtggtacacccaaccagagagagaatgtcggcggcgctgttcctgtaccctcgccagaacatgagggttggcccattgccggagttcgtgaatggcggtaatgagcggtatggatcaacggattatgaggaatttatgaagcattactttgcaacgaagcttgacggaaggaagcacctagacagattgaagttggagcagtag

SEQ ID NO: 92750 - DNA, 84 bp, Zea Mays
ctaaaccaaaaagcagcagttccggagacttccctagctgtttctacagtctacgaaattagcaagctcgctacgtcaactacg

SEQ ID NO: 92751 - DNA, 798 bp, Zea Mays
cccccaaccctagccgccgctcctgccggtaccgcgcggccgcacgcccgcacagttcctctccagcgccgcagcgagctcactgctcagcgcctcttgctccgctgctcagctgctcttgccctcctctcctctccagcgcagcgcctcctctcctgctctccaacgcccgcgccgtgtctcctctccagcgccgcgtcgctgcgcgcttgcggctcacgaccagccaccggccaggccgcaccgcggcacgcggcactgccaggcataggcgccaggacctccatctcccatgagtctgcctcttccgacgacgccgagtccgctgcattcaccgtgaactcggacaatgtcatcgtcttcggccttttgtcacaaggacaatcattggagctgctcgttggaagcaatggctcgatgcagatcgacccagagagagatgtgagtgtgtggggaaaagaaggcaagccatgtgcagtgacaaccgcaaaaggacatcacacatcataaagtttcgacgacgccgagtccgctgcattcaccgtgaactcggacaatgtcatcgtcttcggcgttagcttcaaggtccgtccgtgcacttgacttgaccgtacccccggccctccctccgtttgtacgtccgtctaactagaacgccaaacttgacgacagaacagcgcccgcgtcggcctggtgaacgacccggagatccgttccgtggcggcgatggtggccggcgacaaggcgaccttgtaccactgcccgttctacaacccccaccacaccctgtatcgactt

SEQ ID NO: 92752 - DNA, 516 bp, Zea Mays
acacgtcatccccggctcgatcctcacctcaccagcttatcccagacttcaatcgaaggtcgtcgtcgttcgtgcatccccaagaaaacctaagaatcgggtgaagacgaagttagcagcgcgatttttcccaagcgctcaaccaattgcctcgatcggaaaatcgctaccgatctcgcggattcgagttagctgttgaaacggtacgttaattaatcgcgcgatgcggaagacgagccaagtcgacctcaagtgcgggctaatccgcaggatgatgctgatggacgaaccggaagatggataatctgaacaatgccaacacaaaaggctgatcgtcaagtggtcgtcgtctaacaacactaacctagtgttacccaggcaagccccggtgcattttccacctccttgctattttaaaatcttttatcaccttgtttgatacattaggtgataggagttgtgtgttaaaccgttgatgcatttccttccttgaaaattgattacccttccttgata

SEQ ID NO: 92753 - DNA, 1377 bp, Zea Mays
cagcgcgctatggtcaaaacataatatttcagaacaagtccgaacgaactgaaggagaggaggaggaggaggaatggcggacgcagccagaggcctcgggtcttcgtctctcccggtggctaacgtgcaggcgcttgcggagtcttgcaacgacaacggagccgatgcgccggtgcccgggaggtacctcatcaaggatcctagcgccgaggaggtcgtagccgccggcgacagcgcctgcacgattccggtcatcgatttccgcaagctgctcgatccggggtcgtacgaggaggagtgcgccaggctgggagccgcgtgccaccactggggattcttccagctcatcaaccatggcgttccggccgaggtgactgggaacctgatgaaggacgtagctgggttcttcaggcagccgctggaagccaagaaggagtgcgcgcagcaggccggcagcatcgaaggctacggccaggccttcgtcgtgtcggaggaccagaagctggactgggcggacatgctcttcctcatcgtgcggccgagggaggccagggacatgcgcttctggccgacgcgccctgagtccttcagggattccgtggacgcgtactccttggaagcttcgaagctagcgtaccgcctgctggagttcatggcaaggggcgtgggtgccgacccggcgtcgctgcagggcatgttccaagggcaggtgcagggcatgcgggtgaactactacccgccgtgccggcaggcggcggaccaagtgctgggcctgtcgccgcacagcgaccccaacgggctcaccctgctcctgcagatgagccacgacgtgcacgggcttcaggtcagcaaggacggcaggtggttccccgtgcaggctctccccggcgccttcgttgtcaacgactcaacgtcggtgacgcgctcgagatcgttagcaacggagcgttcaggagtgttgagcacagggccgtgatacacccgaccaaggagcggatttcggcggcgctgttccacttcccggaccaggatcggatgcttggtcctctgccggagctggtgaaggaaggcgacacagtgcggtacgcaacgacgacttaccaagagttcatgaagcgattcttcgctgcaaagctcgatggaaagaagctcatagagagattcaagctacagtagtagctacgacctctcagctcgaacaaaaaataaattcacttgtaattattaataatggccagttattgaacggtttgcttgtctaaaatgttaacgcgcgcaacctcgggttcgggcattactgtgttacatccgtttgcttcctgcatactgtcagagaattaccctgagcatagtggtactcgcatgagttatccaaat

SEQ ID NO: 92754 - DNA, 1465 bp, Zea Mays
aattcttccgttgcaccattgccacccccaccttttaataactcaggatatggagggcaaccaaatcagataccgcctcccccaccatcggcaccactcaatcctcctggtccccaaggcagtttccctgctctcccagcaccatatcatgggaataactatcatcggcctccaaccacatcaatgcctaatgagggatataatctgcaaccagcaccccctccaccgcctccaaatcaattcccttctgtgccaccagaacaccaacataggccgcatcactggggtaataactgtccaccgtgtcctgagagatatcggtacaatggacatgatcgaggtcatcacagacatgatcgaaggcatcatgcgcacgacagacaacaccattatgatgatagaggataccgctatgatgatagaggatatcactatgatgatagaggccattactttgatgatagaagacatcagtttgatgacagagggcatcacttcgatgagagagctattagggggtcaatgcacaatgaggctgctgacaggtcaggatatccttttccaccaggacctcctccgattcctgaccattttgaagctccaccaggcccaatgcactatgggcgaccatcagatcctccaccagggcattgtgcaggctggtctaggccgcctaggatatctaataactattctccctcaagacattctgtggagcctccagtttcccatgcagctggagctggaggacatggtggatggagacctagataaccttttggaatattgaagtggccctgacgcttttcttaagtctgtgggggatttaacctgggagagtccggtggtctctgcttcggattgaaggcactcacggaccactccaggaaagcgggagctgctggtacctgcctccttgtacatatgtatctcaatgattctatggcggtcgcgctgcctgatttgcccttgtatccatcctaccacacggggagctgaattgtagggataggggtgtcttagattgtacttactatttgttggtgccagtctccgattccattgctgatgtccgttcctgaattcctcctggcctcagccgaaactgttgagagtacaccgtacatatatgccaaaaaagagtgaaatacaagtcattttgccctttgcacctctgctgtgctggtgacttgaccgattcgtaaaaagcccctgcatctgctaagacctgcgtgcattgcattgcttgtcaaggtacagagaacaaactgatgttccatctggacagtttcagctctgattgttcatttattttcaaccctattctcgtgtgtgtatgtatatatagagagcgagttcatacggtggaactaatgacttgcgattgatcattattgtttccctagaaaactaaaatctttcgttccgtttaatttatgaatggtgatatggctggtgtcgttcc

SEQ ID NO: 92755 - DNA, 162 bp, Zea Mays
ttgttttttttactctggtgatgatattttatatcccttacactagctcgagcaagcatttcattttgatgcatgtagcttgttacctaagagagccatatctgatatttttctacttggttagacatagtacgaggaaccatatcataaacttgaggacat

SEQ ID NO: 92756 - DNA, 2365 bp, Zea Mays
ctcgactctggggtctggaactctggactcttccaccgaactgccccgctctctcttgactagcgcagtcgcacgctcgacggctcgagtaaacaataaactactaaaaaaatgcgcacaaaataaaaccgctggcgaaccaaaaaataagaatccccaaagctacctctcctgccgctcctcccctctcatgcctcctcccctcgctgccgccgccgccgccgccgttgagagaactaggaccacgggcgggtggagcactggcatcctgcggactcgccgccgctccacgggcgcaggcgctagccgtcgcggggtcgctctgtgagccctggtcggtgctggggggttcggcggcggtctggtagacgggcggtggcgggcgatggcgccggcgaagaggaagcgcgcagcggctgcggcggccgcggcggcggctgccgcggccaagtggaaggtaggggacctcgtgctcgctaagatgaagggcttcccggcctggccggctatgattagtgaaccagaacagtggaagatgccttctactaaaaagaaaccgctggtctatttctatggtactaaacagattgctttctgcaattatgctgatctcgaggcattcaccgaagagaaaaaaagatctctacttgctaagcgacatggtaaaggggctgattttttaagagcagttgatgagataattgaagtttatgattctctaaaggagaaaggtagtaacaaggatgacttggctgctgaagtaaagccaggtgtagaaaagtttgctgataataatgtttgcatggatactgaaaatatggtcagtagctcctatatacaaaatcatcaagagatagatgatcattatgtcactaccaagggtcatgacatgatcaagtctgacaggctttcagtcactataatgagtgacgaacgctgtgttataaattctgctcctgatgagcctactgaaaatgtatctgtacttgatgaaatgagggagatttctttgcgtactaactcattttcaaataagcaaagggatgcacagccacaaaattgctacacacgtagtagggttccatctctgcgaaagtcaaggagttcaataagtgttgaatcaaggaaggctcaaggttctggtaatttttttgatcataccaatttgtcttctattgggtcagttcctaatgaaaataaggaacgctccagtcgtcataggcatgcggatgacaaagctaactcaggttctgtttctatattagataatgtctggttgcattctggcagaggcacttccaaccaacctgtaactttggggactacttgtaacggcagcaaaatgttgaatcctcctgttaaggcggatagtacttgtaacagtgaagcatctgaaaatggaacttcagagacagaattgaaatcaaatggcacatctaatctacccatgaatacagaagtaattttcaggagaataagaaaatcagatagaaaacctgttcctcattatgaagattgtacaacaccaaataaagatgaattacgtgctgagtacagtgaaatcctttcagattctccaaattcaaagaatgaagtatgcaagtcagatggagatgagcacttgccattggtcaaaagagcaagggtccgaatgggaaggtctcatttggaggattcaccagttgatgaagttgatgtttctaataagaagccagagcttacaacaacctcagaccaatgcgataggaatggtaaacctgcaagtcctgtcaatgattattcagctgatcaggtgtccacagttgtaagttctgcttctaatccgtcctgcaaatcagacatgcctatcctgtcaaaggaaggtcatcttccttggaagaataaagaataccacccaaaaattttagcattagatgtggaagctgctttgcctccttcaaaacgccttcatcgtgccttagaagcgatgtctgctaatgtcgctgagaatgtcaagaatatacctgaagtgacaggaccaaatgaaatggctctaaatggctctctgttgacagcaaacaaccattctaataaatctgctgatgcagtagtcacagtatccaataaacctgtaatagttcaatgctctgaaccttctctagacacacagtttaagcatacccaatcaggtaaatgtacgtcagaatcaactttacaaaataataccatccctgattctgcttcagttccatcaaaagaaaatgatatcatgttaaaagaaaatgataccaatggttcctgggtttgtagtgaactagataatggttcctgtgggaaaacttcagccctttgtatgatattgaatcgacccggacttgatgttaca

SEQ ID NO: 92757 - DNA, 332 bp, Zea Mays
acagagctgggactttgagaggaggactcagcgggctccaaagccgacgaggaacaagtggagcccggctccgcacgcgggagctccaaagccgacgaggaacaagtggagcccggctccgcacgcgggagcgagaggatcgccggcgcaggatgtggtgcgcatcgtgcttggcgtccgcctgcgcgggctgcacctgcaacctctgcacgtcggcggcatcggccgtgtcccgccgctcagcgcgcctcgcttactgcggcctcttcgctgcctcccttatcctctccttcttgctccgccagttcgccgcgtcgctcgtcaagcatatc

SEQ ID NO: 92758 - DNA, 1660 bp, Zea Mays
cgagtggatgggaccggcccatgcccacccagactagctgagtcgcacccgtccatctccctcgccgcgtaaaccccccccggctcgttcgactgccgactcggccgcgctcgcctctgttcaatcaccggcgacggaggacgccgaggaggctcttcgccgccgagtccatttctgcgagatccccgccgagcaagaagcgcagcaccgcgtctgcctgcaccagcgggtggccggccgcgtctccttccgagtcccgagcgcctgccgccaaacttctgacgagtgtcagtgacatcgggtcgggttcgctggagaactgaggggggcttgccgccgacgcgatgaacgcctccgcaatcccgtcccccgcaggggtacgggaggccggttcttcacgggcttcaccaaactgtgcaagggcctcgccgtcatcatcttcctcgtccacattttggtccacctcttcccttcagccgccacctatctcacgctgataccagccaggacaatcccttttgcttggaacctgattaccgcttgttatattgagcaaacaattccaggggtatatttccttaacacatctccagtggtccaatataccaattcaccattctgtggttatgtttgctcttcctgctgaccaaacatcaaaacaaaaggtgataatgagcatagttggtcttcttctactcgggaaggtgttggagcctttatggggagctaaagagttgctcaagtttatttttattgttaatctctcaacttcagcttgtgtcttcgtaactactattgtgctgtactacataacacaggaggagacctacctttacacacctgtttctggattttatggagttctttcaggactactggtgggcatcaagcaaattttacccgatcaggagcttaacctttttgtgctcaagattagtgcaaagtggattccatctattgttgcatttacctctgttgttgtgagcttcttcgtaaaggaatcgatatcatacctccccatcatattatttggcatctacatgagctggatttacctgcgttacttccaaaggagtttggaagtaggccttaaaggggacccaagtgatgaattctcattttcaagcttcttccctgtatttttaaggccagttttggaccctattgcttctatattccacaaacttttctgtggacgatctgcaaaacctgaaggcacaggccagacactggatgggtcacagttccctggtttaggctccattgaggcaaacaggaggagagaaaggggtcagagggcactagagcagaggctggcagagaagccggccgcggtcaggaatactgagggcacgcctccgccgaagcagcagctggaggacgcggaggatgatgcttctgacgaagtctgagcccttctgttttcagttggtggaattcgctggcaggagatccttgtcaagttttcgacccgcagtacacagtagctcatggcatggagattgtaacgaagcagtgcaaccgggcaagaaggcaaatgcgacacgcatgctcgaaccagttcttgcaagacagcgagtagtgtttttttttttgttgttaatgggtgtttcgtgtcgtgctcagtacccaactcttgccaaatgctttacattgtttc

SEQ ID NO: 92759 - DNA, 836 bp, Zea Mays
gccgccgacgcgatgaacgcctccgcaatcccgtcccccgcagggggaggccggttcttcacgggcttcaccaaactgtgcaagggcctcgccgtcatcatcttcctcgtccacattttggtccacctcttcccttcagccgccacctatctcacgctgataccagccaggacaatcccttttgcttggaacctgattaccgcttgttatattgagcaaacaattccaggggtgataatgagcatagttggtcttcttctactcgggaaggtgttggagcctttatggggagctaaagagttgctcaagtttatttttattgttaatctctcaacttcagcttgtgtcttcgtaactactattgtgctgtactacataacacaggaggagacctacctttacacacctgtttctggattttatggagttctttcaggactactggtgggcatcaagcaaattttacccgatcaggagcttaacctttttgtgctcaagattagtgcaaagtggattccatctattgttgcatttacctctgttgttgtgagcttcttcgtaaaggaatcgatatcatacctccccatcatattatttggcatctacatgagctggatttacctgcgttacttccaaaggagtttggaagtaggccttaaaggggacccaagtgatgaattctcattttcaagcttcttccctgtatttttaaggtactgcttttcacaagtgatcttgctgtaaagcagtgggaaatggagtaccccttactcagcaatgtgtgaatccctagtttaaaatgttagaacaaaatcatggagtacagttgcaattaa

SEQ ID NO: 92760 - DNA, 2323 bp, Zea Mays
gcgctgtcgccgtctgccgagcccgagcccggaaaaggggaaggcggctacgcaaacgcaaggcaccccaccccgttcaccgcagccgaatcaattaaaaagccggcggcgagaaggtgggttggggaatctgaagcgatcagagaaggcaagcttgcttgcttgcttctccaccgaatcccccatctcgcgccctccgtctctcgccgcggagactcgcccccccgctgatggaccagctcgtcaatttcatcatccgcccgcccagagctgactacagtccaaatgatgatctattagagcaggagtttatgctgaagggaagatggttcctgaggaaggatttggaggtaaaaaatggtcagggcaagaagttacaatgtagtcactacatgcctgttgtgattcctgaaggaaaagctcttccttgtgtcatatattgtcatggaaacagtgggtgcagggctgatgctagtgaagccgctattattcttctaccgtcaaacattacagtctttacactggacttttcagggtctggactctctgaaggagagcatgtcactttaggctggaatgaaagagaagatctcaaagctgtggttaactatttgcgaacagatgggaatgtatcttgcattggtttgtggggtcgctcaatgggtgcagtcacaagtctaatgtatggagcggaggatccatcgattgcgggaatggttcttgatagcccattctccaacttggttgacttaatgatggagctagtggacacatacaaatatccactgccaaaattcactgtcaaacttgcaatacagcatatgcgaaaaattgtcaagaggaaagctagtttcgacatcatggatcttgataccattcaggtagcaaaacaatgttttgttcctgctttgtttggacatgcaactgaggatgattttatacttccccatcattcagacaagatatatgaatcatatattggcgacaaaaacattataaaatttgatggggatcacaattcaccacgtcctcaattctactttgactcaatcactatatttttccataatgtgctaaaccctcctgaagtggcagaggatcattatttcatgacaccacatggtagccttggtcagggtcattgggatacagaacaagacatagagtatcggttctctcaatcacctacagggacagccaatgctactacaacagaagatgccattgcacagttgcgctctagaaggctcatgagtagaatggaggtcccatctggtgccaccaccgaagacaggactgatcgaactgagggtttcgatagtgatcttggtccctcttcatctagtgtatcaacagcaactcctcccaatggtcgcaacggaaggctgctgactccaacctctgatgatggcgagtatgtggagtactcatttgatagcttgtcagatatgcctcacaccgtggaagatgaagatagaatgctaatgcaagcaattcttgaatcactgaaagactatgaacagtcgaatacaaaaaatgtgcaatccactgcatctgatcctgcatctaaagccaatggtactgtaaaagactgcaatggtgttgctgcagcagcattggagcaagatgcatcctcatttgatgctcctgacaagcatacgaatgtccccaacagtggagaaaaagtcagcgaagggcaaagtacagattgcaacgccggaaagagcagtgcttcggtctctgcttctggttcctcagagcccctggcaccaacacagatggtgaatggacaacctgcttcggtagactcccagaaagtgacccagaatgccaatggagaggatggcacaagagcaactttggtagttcagaagagccggacaggcggcctgatagaaaaatggggttccttcttcaagaacaacgactaaggcgaggaaagatagacgatgacacctttgacaatacgtgttccgttgtgttcatagtcatagaatcgccgttggctgatgtccagcttgattggttttacgtgtaaaatggaaaggaaacaggtgatttcaggacgttcgtgtgtatatagaaggaattgtagcgcccccattgatttataccatctctcaacttccactactttcggttgcggtgaattggcaagacctttgttcttactaatgtgctgtagacttgtagcataatttgaaagctgattattttgtagttttttaaatagtaaagggtaatgtgcctcttaacgtagagttgaattcttacacgagcaatagggtcaattttttaaattgtatttaatgtccaaaaaaaa

SEQ ID NO: 92761 - DNA, 2666 bp, Zea Mays
ctcacacacttggaatcgtcgtcgtcgcctcccaactttggggagacactgtgggacgatgtcgtcaccccgatttcgacgtcggtccggaggagagcatgtgggtggtcgaggccgtctgcagtggtggtcttgctgctcccagatcccatcacgggagggggagcggggttgtggatgacgacgaggggagggggcgcgcgacgggggttgacaacgggcgcggggacgacgacgcgtcggaggtagcggcaggcatattgacgagggatgtgaaggagaggaggaagggaaggagtccggtaccgacgatggaggcgaggagagggagggtggagcagaggaaggtgggaggagaacaacaaaagggtcccagacgtgaaaactgtcatccgttttctttgcgcgtctcccttcccgagtcgcaggctcgcagccctgcgctgtcgccgtctgccgagcccgagcccggaaaaggggaaggcggctacgcaaacgcaaggcaccccaccccgttcaccgcagccgaatcaattaaaaagccggcggcgagaaggtgggttggggaatctgaagcgatcagagaaggcaagcttgcttgcttgcttctccaccgaatcccccatctcgcgccctccgtctctcgccgcggagactcgcccccccgctgatggaccagctcgtcaatttcatcatccgcccgcccagagctgactacagtccaaatgatgatctattagagcaggagtttatgctgaagggaagatggttcctgaggaaggatttggaggtaaaaaatggtcagggcaagaagttacaatgtagtcactacatgcctgttgtgattcctgaaggaaaagctcttccttgtgtcatatattgtcatggaaacagtgggtgcagggctgatgctagtgaagccgctattattcttctaccgtcaaacattacagtctttacactggacttttcagggtctggactctctgaaggagagcatgtcactttaggctggaatgaaagagaagatctcaaagctgtggttaactatttgcgaacagatgggaatgtatcttgcattggtttgtggggtcgctcaatgggtgcagtcacaagtctaatgtatggagcggaggatccatcgattgcgggaatggttcttgatagcccattctccaacttggttgacttaatgatggagctagtggacacatacaaatatccactgccaaaattcactgtcaaacttgcaatacagcatatgcgaaaaattgtcaagaggaaagctagtttcgacatcatggatcttgataccattcaggtagcaaaacaatgttttgttcctgctttgtttggacatgcaactgaggatgattttatacttccccatcattcagacaagatatatgaatcatatattggcgacaaaaacattataaaatttgatggggatcacaattcaccacgtcctcaattctactttgactcaatcactatatttttccataatgtgctaaaccctcctgaagtggcagaggatcattatttcatgacaccacatggtagccttggtcagggtcattgggatacagaacaagacatagagtatcggttctctcaatcacctacagccaatgctactacaacagaagatgccattgcacagttgcgctctagaaggctcatgagtagaatggaggtcccatctggtgccaccaccgaagacaggactgatcgaactgagggtttcgatagtgatcttggtccctcttcatctagtgtatcaacagcaactcctcccaatggtcgcaacggaaggctgctgactccaacctctgatgatggcgagtatgtggagtactcatttgatagcttgtcagatatgcctcacaccgtggaagatgaagatagaatgctaatgcaagcaattcttgaatcactgaaagactatgaacagtcgaatacaaaaaatgtgcaatccactgcatctgatcctgcatctaaagccaatggtactgtaaaagactgcaatggtgttgctgcagcagcattggagcaagatgcatcctcatttgatgctcctgacaagcatacgaatgtccccaacagtggagaaaaagtcagcgaagggcaaagtacagattgcaacgccggaaagagcagtgcttcggtctctgcttctggttcctcagagcccctggcaccaacacagatggtgaatggacaacctgcttcggtagactcccagaaagtgacccagaatgccaatggagaggatggcacaagagcaactttggtagttcagaagagccggacaggcggcctgatagaaaaatggggttccttcttcaagaacaacgactaaggcgaggaaagatagacgatgacacctttgacaatacgtgttccgttgtgttcatagtcatagaatcgccgttggctgatgtccagcttgattggttttacgtgtaaaatggaaaggaaacaggtgatttcaggacgttcgtgtgtatatagaaggaattgtagcgcccccattgatttataccatctctcaacttccactactttcggttgcggtgaattggcaagacctttgttcttactaatgtgctgtagacttgtagcataatttgaaagctgattattttgtagttttttaaata

SEQ ID NO: 92762 - DNA, 374 bp, Zea Mays
gtcaccagtctggttggcacctttattctcagctgcaagaaaacatggcatcagagaattgagtgcatacaaaatagattaggcagttttaacggcaacatgtatgactctcaccatcctgtgcagcgatgctcaaatcccagaaagtccgagctcagccaatactacatcaagttctgctagttccttatttttcatctcctttttagacaactgtctttctgtatctttaggtggcgcagccagggccacaactgtcttgatagcaggttcggctggggcatcttccgcatcatgctttaggttcatcctcagctccatcatcaacctcaaaatcaaggtcctcgtcatcactctcaatgtcctgcagcata

SEQ ID NO: 92763 - DNA, 1197 bp, Zea Mays
acatagtaggaagtaggttcggttccttttatttattatttttttgtatacgttcaaattattggataaggtcatgttttgaactatcttcgtcagaagaaagtgtaaaatatttgaactacagaagcagcaattctccacatttctagtagccttactatcttttcgccagtgttctgctcagttgaataagtttgtccattcgatacttctagaactctgctatattactgtatgcttaatgtagtgtttctggttgtgtatgcttactataaagtgctacatttatgcatgaatgtggaaatgcgcagaattggtgcaaataatggaaagttgtggtttactgagacttttctaacatttctcaaatgaaaaataacaggtcatggatcttgtggtgaaagaaaactttgtgttacatgaacgacgcattagtctgtcagaattccatgctgcagatgaggtatggacaaccggaacaatgggtgaaatcacaccggttgtaatgattgatggacgtgaaatcggcgacgggaaaattggtccagtcactagacaaatccagaaggcatacaagatcctgacagcagggcaaggagtaccgataccgggggttgctgaggtgtaattgtctaagatgcatccctttatctagttaggatcagtcccccaaggagctcaatgatatcaggctagcgcaacaataaattaataatctgcattgatcactgatgttcaaagacaccatggtgccgtttggttcacatatttgtaacgtaatgggtaagtgataacgttaaattatgtttgttttagtccaaccgtaatcagatatcatactaaaaattgataccgaactattcaaacttgttacggccagtaatcgagtgtaaaccattaccctttacgttacatttcgcgaaccaaacaacactcagtcattgttattcgaaacaggatactgctggagattataaacgcaataagccattgcgctggcatgcgctcgtatgcgtctaagttggctaatactctaatccccgtgcccgtgcatacgattccagtgcattttgtcgaatctgacttgtttttttttcctgtgaaacaaagagagaatatgtagacgcgaattgcccacctctaataaatttccttgcagcatgcattatatatctttgcagccttacaggaaagcac

SEQ ID NO: 92764 - DNA, 2540 bp, Zea Mays
ctggcagtcgcgtcgacctccccgccgcgcccacggcactcgccactccacccaccaggccaagcacgcggcggcgacgccaaagcatcagggcaccaatggttgtgctccccgcggccccgcggcccctactcctacagtcctaaataatagccttccattccaatctgttcccacagttcagtcgcacactcgggcgggtcaaattcgactcgggaggaaccaaccacccggaaattcccccctcctccagtctccacttgatcggcgaggcgctgcggccgcgggcgaatggcgtcggaggcggagtcgcccgtggtgatccacgcgtggtcggcgccgcgctccctcagcaccagcctcatgtactccttcgcccagagggacgacatggaggtgcttgacgagcctctctacgcaaatttcctgcgtgccacaggcgtcgacaggccctaccggcaggagctcctgtccaaaatggaccctgatggaaataaggttgtcaaggaggtgatttttggcccaggggacaaaaagtatcgttactgcaagcacatctcaaagcaacatctcccaaatctgtcaagcgacctcatgaagaagggaaaacatttcatattgatacggaaccctctagatatactgccatcttttgataaagtcgttccaccatccttcatggagcttggcataggcgaacttgtctcaatatacagtgaattatgtggacttgggagcccaccccctgtgatagatgcagatgatctgcaacaggatcctgaggccgtcctaagtggtctctgtgaggatctgggcattcctttccagccacaaatgttgaaatgggaagctggccccaaggaatttgatggtatatgggcaccctggtggtatgggagtgtgcacaagtcttcaggtttctctaagcctcgccaatatcctctgactttcccattcgtgttttatgacctgcttgagcaaagcttgcctttctacaacatgctgaagcgccaaataaggaagataagaggaccgcagcaaccaccattatcggaccctcctctgcctgtccctgcaaataaaaacattcttgtttgggttggagatgaacttttgccccgtaacagtgcaaaggtttcagtgtttgattcagttgtacaaggaggagatgctgtttgggaaggtttacgtatatatgatggaaaagtattcaaattagatgaacatttggacagattgtttgattctgcaaaagctatggccttcagcaatgtgcctactcgtgattggattaaggatgccatctttaagactctgattgcaaatggaatgttcaacaatgctcatataaggctcacgctcacccgtgggaaaaaggtgacatctggaatgagtccagctttcaatctttatgggtgtgccttgattgtgcttgcagagtggaaaccaccagtttatgataactctcatgggataaaattggttactgccaccacacgtcgaaattctccaaatagtatagattccaagattcatcacaacaatcttatcaacaatattctggcaaagatagaaggtaatcttgcccaggctgaggatgccattatgctagataaggatggctttgtatcagaaacaaacgcaacaaatatttttatggtcaaaaagggaattgtattgacacctcatgctgactattgccttccaggcattacgcgagcaactgtcatggatcttgtggtgaaagaaaactttgtgttacatgaacgacgcattagtctgtcagaattccatgctgcagatgaggtatggacaaccggaacaatgggtgaaatcacaccggttgtaatgattgatggacgtgaaatcggcgacgggaaaattggtccagtcactagacaaatccagaaggcatacaagatcctgacagcagggcaaggagtaccgataccgggggttgctgaggtgtaattgtctaagatgcatccctttatctagttaggatcagtcccccaaggagctcaatgatatcaggctagcgcaacaataaattaataatctgcattgatcactgatgttcaaagacaccatggtgccgtttggttcacatatttgtaacgtaatgggtaagtgataacgttaaattatgtttgttttagtccaaccgtaatcagatatcatactaaaaattgataccgaactattcaaacttgttacggccagtaatcgagtgtaaaccattaccctttacgttacatttcgcgaaccaaacaacactcagtcattgttattcgaaacaggatactgctggagattataaacgcaataagccattgcgctggcatgcgctcgtatgcgtctaagttggctaatactctaatccccgtgcccgtgcatacgattccagtgcattttgtcgaatctgacttgtttttttttcctgtgaaacaaagagagaatatgtagacgcgaattgcccacctctaataaatttccttgcagcatgcattatatatctttgcagccttacaggaaagcac

SEQ ID NO: 92765 - DNA, 1377 bp, Zea Mays
agagggcgtcgcgatcgcaaccgcccgagcccggccggtcccatcatcgacgccagtgtgcattattacgccccgccatcagccggccggcaactcgacagggaaaaggaagacgcaccgctagagctgagatgtccttcttcttccgcatggcgtcgcggctgcggccgtcgacgccggaggaggtggtgcgctccatcaaggactccttcctcgcgctccacacgcgcacccacgccaaggctctggaagaggtcgagaaaaatatgtcatccttgagattgttgatctttggtgatggagaagtcgaaccaaatgaagagcaggtcctgcaaataacccttgagatttgcaaggaggacgtcatttccctgatcgtccaggatctgccttccttgggctggggagtaagaaaagatctggctatctgctggtgcatcttgcttaggcagaaggtcgatgaaacttattgctgtgtgcagtatcttgaaaatcatctggagcttttagatttccttgttggttgctacaagaacttggatattgcattgaactgtggaaatatgttaagagaatgcataaagtaccctacacttgcaaaatacatattggaatctggtagctttgagctgttctttgagtatgttgagcttccaaactttgatattgcttcagatgctctgaacaccttcaaggatctgcttaccaagcacgaagttgtagtcgcagagttcttgagttcccactacgagcagttttttgaactctactcaaggctcttgtcatcaactaattatgtaacaagaaggcaggcaatcaagttcctttcagagttcctgctagagactcataactctcaaataatgaagagatacattgtggaagttcgttttttaaatattatgatcaatctactaaaggattcaagcaaaaatatcagaatatgtgccttccatgtttttaaggtatttgttgccaatccgaacaagcctcgatgtatcgttgtagctttgctagacaatcgtagagaagttctgaagctactccacaatcttccttcaagtaaaggcgacgatgaactcgatgaggagaaagacctaatcattcaggaaatccagaagttggcataacacaaaagcatcaagttatcgtttagcaatgcaagactctccttatagaggacatattgccaaggccagaaccatgtatatcacattgcacatgtagccttcaagagttgtatttttggaggttttttcttttcttttggtctcagaaaaccatagcaaagtattctctttttgaaggaattatatacatgattttggtgaccaaggaccaaaaaaaatcaaactgaaataaagaaaatatgaaaaa

SEQ ID NO: 92766 - DNA, 1673 bp, Zea Mays
agagggcgtcgcgatcgcaaccgcccgagcccggccggtcccatcatcgacgccagtgtgcattattacgccccgccatcagccggccggcaactcgacagggaaaaggaagacgcaccgctagagctgagatgtccttcttcttccgcatggcgtcgcggctgcggccgtcgacgccggaggaggtggtgcgctccatcaaggactccttcctcgcgctccacacgcgcacccacgccaaggctctggaagaggtcgagaaaaatatgtcatccttgagattgttgatctttggtgatggagaagtcgaaccaaatgaagagcaggtcctgcaaataacccttgagatttgcaaggaggacgtcatttccctgatcgtccaggatctgccttccttgggctggggagtaagaaaagatctggctatctgctggtgcatcttgcttaggcagaaggtcgatgaaacttattgctgtgtgcagtatcttgaaaatcatctggagcttttagatttccttgttggttgctacaagaacttggatattgcattgaactgtggaaatatgttaagagaatgcataaagtaccctacacttgcaaaatacatattggaatctggtagctttgagctgttctttgagtatgttgagcttccaaactttgatattgcttcagatgctctgaacaccttcaaggatctgcttaccaagcacgaagttgtagtcgcagagttcttgagttcccactacgagcagttttttgaactctactcaaggctcttgtcatcaactaattatgtaacaagaaggcaggcaatcaagttcctttcagagttcctgctagagactcataactctcaaataatgaagagatacattgtggaagttcgttttttaaatattatgatcaatctactaaaggttattgtgcatgcatcatcacaggtgaaaatcttttgggattcaagcaaaaatatcagaatatgtgccttccatgtttttaaggtatttgttgccaatccgaacaagcctcgatgtatcgttgtagctttgctagacaatcgtagagaagttctgaagctactccacaatcttccttcaagtaaaggcgacgatgaactcgatgaggagaaagacctaatcattcaggaaatccagaagttggcataacacaaaagcatcaagttatcgtttagcaatgcaagactctccttatagaggacatattgccaaggccagaaccatgtatatcacattgcacatgtagccttcaagagttgtatttttggaggttttttcttttcttttggtctcagaaaaccatagcaaagtattctctttttgaaggaattatatacatgattttggtgaccaaggaccgttggattaattgagctagacccataactaatctagcaatgaattaaagaattctaaggaccatgttgaaaatagcaaagcatacttgagaagcttctagatgattggagaagaggatgcatgagtcatggatgccatgatttgtagtgaagtatgtaatctactacttattaagttagcaatagtagcctgcctttttgtgtcctgccattctgcgatctcaggcgtccaattctatcattctacaatctcagctgtccaatcccgcacaccagtttttcgcgcgcagaaaaa

SEQ ID NO: 92767 - DNA, 1343 bp, Zea Mays
agagggcgtcgcgatcgcaaccgcccgagcccggccggtcccatcatcgacgccagtgtgcattattacgccccgccatcagccggccggcaactcgacagggaaaaggaagacgcaccgctagagctgagatgtccttcttcttccgcatggcgtcgcggctgcggccgtcgacgccggaggaggtggtgcgctccatcaaggactccttcctcgcgctccacacgcgcacccacgccaaggctctggaagaggtcgagaaaaatatgtcatccttgagattgttgatctttggtgatggagaagtcgaaccaaatgaagagcaggtcctgcaaataacccttgagatttgcaaggaggacgtcatttccctgatcgtccaggatctgccttccttgggctggggagtaagaaaagatctggctatctgctggtgcatcttgcttaggcagaaggtcgatgaaacttattgctgtgtgcagtatcttgaaaatcatctggagcttttagatttccttgttggttgctacaagaacttggatattgcattgaactgtggaaatatgttaagagaatgcataaagtaccctacacttgcaaaatacatattggaatctggtagctttgagctgttctttgagtatgttgagcttccaaactttgatattgcttcagatgctctgaacaccttcaagattgttgcaggatctgcttaccaagcacgaagttgtagtcgcagagttcttgagttcccactacgagcagttttttgaactctactcaaggctcttgtcatcaactaattatgtaacaagaaggcaggcaatcaagttcctttcagagttcctgctagagactcataactctcaaataatgaagagatacattgtggaagttcgttttttaaatattatgatcaatctactaaaggattcaagcaaaaatatcagaatatgtgccttccatgtttttaaggtatttgttgccaatccgaacaagcctcgatgtatcgttgtagctttgctagacaatcgtagagaagttctgaagctactccacaatcttccttcaagtaaaggcgacgatgaactcgatgaggagaaagacctaatcattcaggaaatccagaagttggcataacacaaaagcatcaagttatcgtttagcaatgcaagactctccttatagaggacatattgccaaggccagaaccatgtatatcacattgcacatgtagccttcaagagttgtatttttggaggttttttcttttcttttggtctcagaaaaccatagcaaagtattctctttttgaaggaattatatacatgattttggtgacc

SEQ ID NO: 92768 - DNA, 1384 bp, Zea Mays
attcccatggtggcccccctcgcctcctaaggcaccatctccgaggaccagggcggccaccacctacccggcttcgcattcggcagccccaatcggccgaccgcctttcggtccttgtgtgtcccctctccagcggcgccatacaacaaacaggaggcgcccgcgttccggaacggccccgactgcggcgcggacggccgggtggacatcgccatgacgctggacgctaactacctccgcggcaccatggccgcggtgctgtccatcctgcagcacacggcgtgccccgagagcgtagcgttccacttcctcaccgccgacgccgacgccgacggccacggcctctccgccgcgctgcgcgcctcgttcccgttcctcgacctgcgggtgtaccgcttcgacccgtcgcgcgtccgcgaccgtatctcgcggtcggtgcgccaggagctggaccagccgctcaactacgcgcgcgtctacctcgccgacacgctgccgcgcgacgtgcgccgcgtcacgtacctcgactccgacgtggtcgtggtggacgacgtccggacgctggcgtccgtggacctcgcgggccacgtggtggcggcgcccgagtactgccacgccaacttcagcaactacttcacggacgccttctggtcgcacccggcgctcaacggcaccttccacgggcgccgcccatgctacttcaacacgggcgtcatggtcatggacgtcgacaagtggcgcgccggcgggtacacgcgccgggtggaggagtggatggccgtgcagaagcggcggcggatctaccacctcggctcgctgccaccgttcctgctcgtcttcgccggccacatccgggcggtggaccaccggtggaaccagcacgggctcggcggcgacaacgtcgagggccgctgccggggtctccatccgggccctatcagcctccttcactggagcggcaagggcaagccgtggctccgcctcgacgcccgccggccgtgctctgtggactacctatgggcgccctacgacctctaccgttactcgtcgccggtgatcgacgagtggtgactggtgagccgtgacgtggtgtgagcatgcaccacctgaggagctactagcaaatggtaggacagttcgatcttgcagaggggaagaggcatcacaatgatgcatgcatgcattgctatctcttgatcttttaatttatataatactgtgcaattcaccctcttaattttgtatatatagatatatagaacctgttgtaaatttgtacagattattattagtatgcatggtggggaggctcatgctgacaaatgtatgtacaattgtaccgtatatctcgagttcatggtaatacaacacatagattctatgc

SEQ ID NO: 92769 - DNA, 1548 bp, Zea Mays
gcctcctttccccaccattcccatggtggcccccctcgcctcctaaggcaccatctccgaggaccagggcggccaccacctacccggcttcgcattcggcagccccaatcggccgaccgcctttcggtccttgtgtgtcccctctccagcggcgccatacaacaaacagtacaatgccttcaaattctgccgtagtagtagttatcgccatctttcttgttgttatcctcggcgccagccacgcggtcaccggcgcccgtgtcggcaccatgatgatccggcagccttcttcgtcctcctccgtcctgatgttcagggaggcgcccgcgttccggaacggccccgactgcggcgcggacggccgggtggacatcgccatgacgctggacgctaactacctccgcggcaccatggccgcggtgctgtccatcctgcagcacacggcgtgccccgagagcgtagcgttccacttcctcaccgccgacgccgacgccgacggccacggcctctccgccgcgctgcgcgcctcgttcccgttcctcgacctgcgggtgtaccgcttcgacccgtcgcgcgtccgcgaccgtatctcgcggtcggtgcgccaggagctggaccagccgctcaactacgcgcgcgtctacctcgccgacacgctgccgcgcgacgtgcgccgcgtcacgtacctcgactccgacgtggtcgtggtggacgacgtccggacgctggcgtccgtggacctcgcgggccacgtggtggcggcgcccgagtactgccacgccaacttcagcaactacttcacggacgccttctggtcgcacccggcgctcaacggcaccttccacgggcgccgcccatgctacttcaacacgggcgtcatggtcatggacgtcgacaagtggcgcgccggcgggtacacgcgccgggtggaggagtggatggccgtgcagaagcggcggcggatctaccacctcggctcgctgccaccgttcctgctcgtcttcgccggccacatccgggcggtggaccaccggtggaaccagcacgggctcggcggcgacaacgtcgagggccgctgccggggtctccatccgggccctatcagcctccttcactggagcggcaagggcaagccgtggctccgcctcgacgcccgccggccgtgctctgtggactacctatgggcgccctacgacctctaccgttactcgtcgccggtgatcgacgagtggtgactggtgagccgtgacgtggtgtgagcatgcaccacctgaggagctactagcaaatggtaggacagttcgatcttgcagaggggaagaggcatcacaatgatgcatgcatgcattgctatctcttgatcttttaatttatataatactgtgcaattcaccctcttaattttgtatatatagatatatagaacctgttgtaaatttgtacagattattattagtatgcatggtggggaggctcatgctgacaaatgtatgtacaattgtaccgtatatctcgagttcatggtaatacaacacatagattctatgc

SEQ ID NO: 92770 - DNA, 348 bp, Zea Mays
atggcgtcgcttgggtcggtggagccttggaagccctgcaggtgtggtcgctcccttgtctctatcagcaggaaccacgttgaaagtaaccggctcaggcgctcagcccacgccgatgtcgtgccggacaacgctagagacactgacctagagtcctcacatcgtcatctcgatgttgaggctaggtatagccaaagacgtcggataggaggtccgagacttcgagagcctgtcgtggaggtctatgatcttgaagagtttctaggtgggcgaccgatgctgatggcctcggcgaagctgaagaggtgcagcgcggcgccattgatggccttggcgaagagggtgtga

SEQ ID NO: 92771 - DNA, 1721 bp, Zea Mays
atgtacagagaaaagatatgtatcttttattacgagacagttgtatgcgcctacaaaaacaaacatagacatgcatcatggcccggcatacaggtgtggtggcagcctgggcacggcgacggcctcgagcgggaccaagcgcggcacggcgagcccgaacttctcctgcatgttcagcttctccggcgccacgctatcaggcagcctccacgagaaggcgtgcagcaggttggccagggtgacctgcaccatcttgagcccgaggacgtagcccgggcacatccggcggccggacccgaacggggagcagctccaggtcgtggcccttcacgtccacggcgctgccgacgaacctctccgggcggaactcctccgcgtcgtggccccacacggcggggtcgcggccgatggcccagacgttgacgaacacgagcgtgccccgcgggatgtcgtagctgcccgtggacgcgtcctcgcggcacagccgcggcgccagcagcggcgtcaccgggtgcaggcggagggtctccttcacgacggcctccaggtacggcaggtccgggatgtcctgctcggtgaccaggcggccgtggccgatgacgccgtccagctcctcggtgaccttggcgaggacctcgggcttccgcaggagctccgacatggcccactcgatggtcaccgccgtggagtccgtgccgccagcgatcaggtccagcgcgaatcccttgacgccatcccgttcgatggggacctcgagtttggggtcgtcggcgagctccagcagcaggtccaccatgtccgcggggacgaacccgccgccctcccgccgccgccgctggtcgtgctcgtccaccacgtgctccaggaagcgatcgaacatcttgcccagcctcttcatcctcccgacgtagccctggaggtccagccagccgagccacgggatgaagtccccgacgcagaacacgccgttgaggaggaagagctcgtcgaccatccagctgaactcggccggcgagatcggcgagcccgcggtgccgccctcgccgacgtacttcccgcccagcgccatgcgcgagatcacgttgaggctgtacatgagcaggtgctccttgagcgcgacggcccgccggccgcgcccggccgcgcccgcggaggacgacgacgacagggcgcgcagcaggacgcgcagctcctcgctgcggacgtgctcctgcgacctgagctgcctgtcgctgaacagatgggccttccagagcttgcgcgcctggcgccagtacgccccgcagggcgaccagacgatgtcggagtagtcgtaggcggtgtacttcccggccgccatcctggggcggtcgatgaacgacgtgtcgctggtcctgaggaagaacctggccgcttccacggaggagccgacgacgacggggacggagccgaagcggagcgacatgaacgcgccgtgccgcgcggagagcgcgtggatggagcggtgcgggagcgcgccgatcaggttgaggttgccgatcaccggccacggcctaggcccgggtggcatcttgtacttgcggctggagccgcgcttccggcggaggacggcgacgaggaggacggcggtggcgagcacgacgcccaggaaagggtctagttccatttccattggaattctacgtcaagtacggagctgatggcattacttatacagttatactttctgcttttaggttgtc

SEQ ID NO: 92772 - DNA, 1723 bp, Zea Mays
gatataaagacccaggatacgatgttctaaacgactaaaccacttaattactaagagaaaaatattaggcagagcaagataggcttgcatgcatcacaggacagcatacaggcgagcaggaagcttgggctcagcgacggcctggagcggaaccaagcgcggcacggtgagcccgaacgtttcttccatgcccagctcctcggccgccacgccgtcggggagccgccaagcgaaggcgtgcagcaggttgcccaggatcgtaggcaccatcctgagggcgaggcccatgccggggcacatgcggcggccggacccgaacggcagcagctcgaagtgctgccctttgacgtccacgccgcttccggcgaaccgctccggccggaactccaggggagcttcccacaccgccgggtcacggccgatggcccaggcgttgacgaagacgcgcgcgcccgccgggatgtcgtagccgcccacggacacgtcctcccgacacagccgcggagtcaggagcggcgcgactgggtgcaggcgcaaggtctccttcacgacggcgtcgaggtacgggaggcttgggatgtccccctctgccacaagacggttgcggccgacgacacggtccagctcctcggtggccttggcgaggacctctgggttcctcaggagctctgacatggcccactccacagtcaccgccgaggtgtcggtgccgccgcccatcaggtcctgggtgaaccccttcacattatcccgcgtgatggggacctcgagctggctggggtcgtcagcgagctccaagagcacgtccatcatgtccatggcgacgaaatcctctccttctcggcgccgccgctcgttgtgctcgtccaccacgtgctccaggaaccggtccagcatcttggccgacctcttcatcctcttgacgtacccttgcgggtccagggggctgagccacgggatcatgtccgcgacgttgagcacgccgttgagaaagaagtgctcgtcgatcagccacctgaactcctcgggcgtcgccggcgagctagacccctcgacgacgtacttcttgcccagcagcatgcgcgagacgacgctgaggttcaccatgtagaggtgctccctgagcgtcaccgcgtcgtggccgccggccggcgccgacgccgccgcacgcaggtcgctcagcatggcgcgcacctcgtcgctgcggacgtgctcgagcgacatgagccgcctcgcgctgaagagctcggcctggcaaagcctgcgcgcctgacgccagtacgcgccgtagggctggtagaagaggccagcgcagttgtaggtggtgtacctgccggccgccgtctgaggacggtcgatgaaggccaggtcgtgggtcttgaggatgagcctcgccgtgtcgatcgacgacgcgacgacgacgggaaaggagccgaaccgcagggacatgagcgggccgtacctcttggagagctcgtggacggagtggtgaggcagcgggccgatcaggttcaggttgccgatcaccggccacggccgcgggcctggtgggagcctgtacttgcgcgtcgagcgcgcgcggagccggagaacggttacgaggaagagagtggcgccagccactacggcgacgaggaagaaggatgcggaggacggtgctggtagctccatggggacttgggagttgggacgtaccagtaggggtgtgcgacgagcccttttt

SEQ ID NO: 92773 - DNA, 564 bp, Zea Mays
agcaacggccggcctccatgactagagcagtcccagaatccaacaacaaccagcatcattccccattggaaggccgaatgcgccacacgcccgcggcagataagcgtctcgacgggccaaagaacctaccccctctcgccatgcagcgcagatctgacgggaagggaacgcgggtgaatcgcagatgccgtcggtcttcttgtgcccgtagtgcttcacctttcttcacgttctacaggggagcaaaagattgagaagttcagagatacacttgcgaagcacagacttctgacaccaacgacaccattggcaaggcagggatctgatgatatgtccttggtgtcatccgtgatataaaccacttcctttagtcatgtgttattcttcattgttattcatgtgtacaatttgttcctttccattgtcacagagttcaggttttcagatttttttgcctgtgaagtctacccacgctgcctcgctcttgttctttataatgagatgaaattgtatggtggctttcgagtgagatgaaatgtatggtggctttgggagtgactcatt

SEQ ID NO: 92774 - DNA, 362 bp, Zea Mays
ttaaaactctagcctcccccaatttacttgagacaaaaaaaactgttgttgattaaaagaactagcatttctctgatagtacagatgaaataggcatacgactttaggcacgcagcaaaaattcaagtactaggaccgcaatcaaatgataagtctgggaccaacaaaatcaactgaaatgctcttgcctgctaacaattttctatatatacaaaaaaaacaccacagacttctgaacacaccaagcttgactaaaagaatcaaggacgtgttcagaactgaagcttgcactgagtatttccctcaagatgttccattttccaccttaacctaagagcattgttcacttctcaattttacct

SEQ ID NO: 92775 - DNA, 1676 bp, Zea Mays
atgggtataatgcgagtcgcggacgatgtggaggccaggttggtggtcggggcaggtggcggcggcgggaccgccaccaccacgacggagccgcttctccgccactgccacggcggccgcaaggaggaggacgaccaggggtctaagatccgggacagcccggaggcggagggggcgtccgactgcgggaggacggacggaggctcgctgcggatggtccttgtctccaccgccgtcgccgtctgcggctccttcgagttcggcacctgcgtcggctactctgcgccgacgcagtcagggattgtagaggaagtcgggctatctatctccgagtttgcaatttttggatctgtactgacagtcggagcaatggttggtgccgttactagtgggcgcttggctgattttctcggacgaaaaatgaccatgcggatatcagctactatttgtatattcggttggctctccatacatctggccaagagcgctatcatgctctactttgggagaaccttgctgggtttcagcactggagttctttcttatgtggtgcctgtgttcatagctgaaatagcgccaaagaatctccgcgggggtctcgcaacgtcaaaccagctcttgatctgttccggaagctcagctacctacatcataggagccctggttgcatggcgcaatttggtacttgttggtttagtgccttgtgtcctcttgctagctgggcttttcttcattccagagtcgccaagatggctggccaatgtcggaagggaaaaggaattccacgcctcattgcaaaagctgcgtggagaggatgctgacgagtatattgaatcactctatagccttccaaaggccaggcttcgagacttatttctgagcaaaaatatatatgcagtcattgtgggcgttggcttgatggtttttcagcaactcggagggataaatggtgttggcttctatgcaagttatatcttcagttctgctggattttctggaaaacttggaaccatcttgattggcattattcagattccaatcacattgtttggggccatactcatggataggagtggaagaagggttctcctgatggtctctgcatctggaacatttttgggctgcttcctcacaggagtatcattctatctgaaggcacaaggactgttctcagaatgggttcccacactggctctttccggcatactggtttacatcggggcatactcaattggaatgggtcctgtcccttgggttgtcatgtctgagatattctcaatcaacatgaaagcaactggtgggagcttggtgacccttgttagctggctgggctccttcgcgatttcttactcgttcagcttccttatggactggagctctgcaggtaccttcttcatgttctcttcagccagcttgatcactgtactcttcgtggcgaagctggtccctgaaaccaaaggaaggacactagaggagatccaggactcactaaacaccagaagatagtaatgaatttacttcacactacagaataattaattctaagatggaaaaatgggaatttacaggacacagcagaataattccaagatggaaaacgaatgtaccgtcagacctctgctcatcgatagatatgtatacaagaaacaatatatataattctcacgtcctcccgc

SEQ ID NO: 92776 - DNA, 1641 bp, Zea Mays
atgcccccgcctcgactccgtttcgccaggcacttatgctccgccacggcatccgatcccgccggcgctccgacttcgtccacgatctcaaacgctgctgccctcgccgcggccgccgccctccgcacgccgcggctcgagccccgcctcctctccttggtcccccgcgccgtcctcctccatccagactttgctcgcctcacgctctcctgccttcttccggccgtggctccatcgctccgcttcctacgcgctctgtctccacacctccccggccccgcccctgacaccgccccggtgaacgtctcccctccgctgcccggggtcgacaagttcctcctccgcctcccaccgcacctcgccgcagacgtcgccgagctcctcagctcttacctccgcatccacctttccctccgtgccttcaatgtcgcgtcctgttccgcactccgcgcggcccgcccagacctcgtcttccgcttcttctccgccttctcttcctcgccagaattccccggcaatgccactaccgtcggctgcctcgcccgggcctacgccgccgagggccgccccctcgacggcctcggcctcctccgcgacgccgcgcgccgtgggtcccctccgcccgccgacgcagttgctgacctcatcggcgccttcgcagccgagggcaacttcggcaaggtctccgacacgctgcacctcatgattgccaccgggtgcaccccggacaaggtgatctaccagcgggtcatacacgggctcttcaggcggaggatgggtggagaggccctgcgtgtgttcagagagatcaagcagcgtggctatgacattgacggagttacatataccacggtgatccatgggttatgcgaaatgcggctgattggagttgcacagcagatgtgggatgagatggtgggcaggggcatcgcccccaatgagtatgcctactgctcccttgtcacttactattgcagagttggtgatctcgacaaggcccgcaaggtatatgatgaaatgcttgagaaggggttcaagcagactactgttagctgtaacattctcatcaaaggattctgtgttcatgggagggtgtacgacgcacttgaggtgttcgaggaaatgtccatcaagggaatcaagcatgatgtgatcacgtacgacacattgatcaatggcctattcaaagctgggaagttggacttggcgatgcggatgtacgagtggttgctatcatctggtttggagccaacatcgtcaaccttcggtcgtcttatatgtgccatgtgtgagaacggacaggtgcatgctgcagtagacctgatcaagtcgatgcggaccaagggcttggagccaccggtgtggacaaacgatcacatcatcagtggcttttgtaagatcaatctgtctgatgagggcatggcatggttggcaggtatgttgaaggacaacataagaccccaaagacagacatttgattacttggtggagtcgttgagcacctctgggcgattggacgatgtgttgctggtcctgaatataatgttcaaggttggatttgaaataggcacatttgcttgcaccgtacttgccgagaagccgtgcacaagcaatgtatctttactcccaccaactggataa

SEQ ID NO: 92777 - DNA, 462 bp, Zea Mays
gccgactccctgggatatttgctgcgcactcatctccctcagctagctcgaccgcctctctctggtctctagcgctgtggagctccttcctacgtgcgctagccgccaggtcgtcttcaacctccatccgtggagctcgcctctgccatggccgccctctgccctcctccctcaagccctagctgagtttttccatggtgccctggatgccagcccctttactcgatgcccctgctaggttcctggcatgttcgcccagaccgatgcctagctcccatggccgccctggatctccatggttgagttttctccctgcaggatccccccaaatagcgcctggtctttttcccttggtcgaaaacacctctgcacttaacccccctctgttgatggtcgacgtctcttcatccatggtacctaggtctccatccccatgcccctgcagcttgttctcaagccgcc

SEQ ID NO: 92778 - DNA, 1241 bp, Zea Mays
ccagccgcggccaaggcgcgcgcattgcgagggttagttacctctaggatattttatagatgacgaaggcagcaactctttatgggagcaagacacagagcgatgccctacggccagggccattgcgcccagcaaatattatcagaaataaattccccacatacaagaatggttcaaatggtatagtgatcaagctggctgatggtccagaaatgccacctctcaaggagatcgttgcaaaggaaactgcagatctacttgatcgtcgtcagcgtctctctgttcgtgaacttgcgatgaagtttgagaagggtctcaacactgccacgctgttgtcgaatgaggttaaatggagacaagtagctttgctggagcgggatatccttttgaaaaatctaaagtgtgtattagaatcattgagaggccgggtgacaggcaaaactaaggatgaaatcgaggagtctatatctatggtggagatccttgcggttcagctctccaaaagagaagccgagttgcttcaacaaaaagaagaggtcacaaaattagcaaaatcattaaagcaggcttctgaagatgcaaagagaattgttgaagaagaaagagctaatgctcatacagaaatagaaactgctaagagttctgtccaaagagttcagcaagcagttcaggagcatgagaagatgtcccaaaataccgggaagcaagacatggaagaactaaagaaagaagttagagaagcccggaggatcaaaatgttgcatcagcccagcaaggcaatggatctggaaaatgaaatacgaattttacgtaacacattcgctgagaagtccaaggattgtgttaatcttttgaaagagttggaaatgcataaaaggttaaaagaaaatggcgccacaagaccagtatatgctctggagccacatgatgttgggcgctatttgcaagctgaaatcgatgtcggcggtgaaattgcagttgcaaagacagctgggccagtagaccctgatgctggattggttgattatgtggagacactcgtaaggaaacctgaaactgaattcaatgttgttgtgcttcaattgaatggcattgacctgccaaaagagtcagttcatgttctcaatgtcggaaggctgcggatgagacttactaaagggaattcagtagttgccaaggaattctattcctcatcaatgcagatcatccttgctgggccaggcgacaaaactccctggtga

SEQ ID NO: 92779 - DNA, 950 bp, Zea Mays
aaacaccccataccttttcccttcctacccttggccgcagtcaaaccctaaaccctggcgagccgcggctacggtatagccaccgcaacaccgcatctcaagcgcaagacctcctcgcggctatggcgaagcgtctgatcccgtcgctgaaccgggttctggtggagaagctgctgaagcccagcaagagcgccggtggcatcctcctcccggagaccaccaagcagctgaacgccgctaaagtcgttgctgttggccctggtgatcgtgatagggatggcaagctgatccctgtatctctgagcgaaggcgacactgttctgcttccggagtacggtgggacagaagtgaagcttgcagaaaaagagtaccttcttttcagagagcacgacatactggggaagctggaggagtagctctggtctctggaccgttaaaatggagttgtttgaaagtaggtatgcaagagttttgccacggcttatctttctttttttgtgtgcgggggaacaaatgagaaacccaaccattgtgagaattcaataacactgcctcattcttgacatcatcatttgggatgtcaccatgcttcatctgattataatgtcttgaagtaattacggtcgtaagatggttgtgctggcctggacctacagctgactgtccacaatggcgggccttggtgttgcatgaggtccgcgaaggctggcagggccaatacgagttctatctatagtaatcagcaattcagtctgcactgaaatctgcagcgaactcctctaagccttgcccttggcggcctggcttgaactattgttgtgtccagcagatagatatatggccgtgtaaaacactattttgcattgtaaatagcgctgctgtgctcagatagcctaaacccaggtggcgccctctgcttgacaagaggaagcagaggttttttgttggca

SEQ ID NO: 92780 - DNA, 972 bp, Zea Mays
atggcggcattcctcgtggagaggagaggtgcggcgcgcggcggtggctgtggtgatacgacgacggggcgcggtggtgtccgatccatggacgccgacatgggcatgagctcgcacgctgcagctaataagccggcgccggggccggcccccttcctcaccaagaccttccagctcgtggaggaccaccgcaccgaccacgtcgtgtcgtggggggaggacggcgccaccttcgtggtgtggcggccgccggagttcgcccgggacctcctccccagctacttcaagcacaacaacttctccagcttcgtcaggcagctcaacacctacggtttcaggaagatcgtggcagacaggtgggagttcgccaacgagttcttcaggaagggcgctaagcacctcctctcggagatccaccggaggaagtcctcgtcgtgctcgcaaccgccgcagaagctgcagccaccgccgctccctcagcaccagcggccttacgacctcagcctcttctttccgccgccgcagccgcctcggcatcctacgtcgggctaccacgtcgtccaggaggaagaccacggccacggcgggaataaggacttcctggcgaccctgtcggaggacaaccgggagctccggcggcgcaactcgctgctgctgtcggagctggcccacatgaggcggctctacaacgacatcatatacttcctgcagaaccacgtggagccggtgccgccgccaccgccggggacgacgacgaccgccgccagctgcaggctggtggagctcggctctgccgacgacgcctcggcggcacagacgtggaggccacgccgcggcgacgacgatgaggcgccggtgaagctgtttggcgtgcgcctgaacgacggcaagaagaggagggcacaacaggtcgtgccgctggaagaaaaaggtggtggtaatgatcaaggtgaaggccttgccgatggtgac

SEQ ID NO: 92781 - DNA, 674 bp, Zea Mays
gggccagggaaaaggtgttgtcttgaaacgaatggaaaagggggcggttgctttggtaaaaacttgatgattatcttatctaaagatatgatatatcgatctcctcgtggtaattaagctaggctttcgaagacatgcatggtaactagctgctagtgtctgccttcaatcccttgggttgcagctgacagtgagcaaaatgcttttccacgacacggtcacatccagcttttcactggatttggttttcaaatccttgttcctggctggaatcgatatgaaacatacatgtggttgatgtctttgataggtagctagtctggctttgttcatcggatattatgctctacaaatctctacctgcgctgagatgagtgtggggttgattggctgcagcgtacgtggcagcactactggttcacctgcacgtctcctctcctcacccataagatgatgtcgtcctttgttttatcaatgcagaaacatctaaatctagtgccagcagcggccttcctgttcctctctgtatttgtctatctcctacagcagcagctagcctcttgttggcagcatgagatagagagaggtcatgcagcacaggcgacatgcggtgcgtgtgtaaacagtttggaaaaaaaagagtggtagcggtaaattcgaatctttattacacc

SEQ ID NO: 92782 - DNA, 1393 bp, Zea Mays
tataaaagaactgaacttatatattcaactttatttgataatccaaatatagaaacacaaaccaaagaataataacagatacaaacctctccaggttttcaacaaatcaaaggcaaatggaaagataataacaacagttgccatatcatacaacaaaccacacgcttgcaggtcatgaacaaattaaacaccaacacaactgaaccgattgatccttcaccatccatcacccgtactgtgcagtttttctttttctgaaggtcttccacattgcagtggtgcaagctgatcaacaaccagctgtttgctagtagtgattgatcgccctgcagttcttcctgacctgtccttggtgcccagtcttgacttcgaggctggccatcttgaccatggccttctcgaacttgtcctcccaccacccggggatcttggcgttgtccagcaccaacttggccgtctccggcgacgtgaggagcgcggcgtcggaggtgaagagcacggtgtgcgagagcacgttcttgtagtactggttgtccatggcgttgggcgtgaccacgtcctgcatcacggtggggtcgtcgctggtcgtcgtgttggccgggcagcgggtcctgaggaaggcggccagcgcagggttgatgtcggaggggacgtcgaggcggtcggagacgaaggaggagcagtgggagcggccgacggtgtgcgcgccggagaggacgaccaggtcctccagcgacatgcccttgacggcgaagctggaggcgaggtcgctgaggttggacgtgggcgggacgaggaacttgaccgactcggaggcgttggagaaggtgccgtcgaggcggcccgacggcatgtcgaaggagaccttgccctggctcaggaagcaggacgcgtcgcgcgccgcgaaggcgatgatgtcggcgcaggagacgacccctgggcacgcggcctcgagggcgtccttgatggcgtcgatcagctcgaacccgcgcaggctcgggttgttgggcgcggccagcttctccggcgtcgggctgaacggggtcgggtcgagaagcacggaagctaaatacctcgacgaagcagtcatggaagagcatgcggatgacggcggcgccattgccagggttctgggcgatggccttctccatgctggccttgacgatagcctcggcctggggacaagtgtaacggtagtaccctagctccagagggtagtaagggctggcctggcacgccgccgcggctaggagcagcagtgcggcggcgaaaacggacgacggcatcgtctttggtgcagtagctgccgccatgtctagcctgcttgcttccactcaagatcgaataatgtgttgagtaagaaggactaggaagtgatgggagatgatcgagt

SEQ ID NO: 92783 - DNA, 1451 bp, Zea Mays
ttccattctaaaccccagctaatacgccagccagcccaggagccaagccctaggccctactcactgtggaccccaaatccccaactgctcctcttcctcgtcgtcttcctctccgtccccgtccccgtccccctctcggcctccccctccactagccccaaatcctccgtctcctcctgtccctctccgcatccaccggaccccaccgggaatggcggtttgagtaagttcccgtaccagggttcttcggtctgggaggccgaggggacaccgggtcggagtgaggggccgccatggcgagcgacgtgcccatgaccccggagctcgagcagatcgacggagagatccacgatatcttccgcgccctccaaaatggattccaaaagatggataagattaaagattcaaataggcaagctaagcaattggaagatcttactgtgaaaatgaaggagtgcaagcgcttgatcaaagagtttgatcgcattctcaaagatgaggagtcaaataatccacctgagatcaacaagcagctaaatgacagaaaacagttcatgatcaaagagttgaattcctatgtcaccttgaggaaaacataccaaagtagccttggtaacaacaataagagggttgagctctttgatatgggtgctggaagtagtgagcctgctgctgaggacaatattcaaatggcatcagccatgacaaatcaacaactcattgatacgggaaggaaccaaatggaccaaacagatcaagctattgaacgttcaaaaatggtcgtagcacaaactgttgagactggagctcaaactgctgcgacattaacacagcaaacagagcaaatgaagagaattggtaatgagctagatactgtccacttctcactgaagaaagctagccaactagtgaaggagattggtcgccaggttgcgactgacaaatgtatcatggcattcctcttcctgatcgttttgggtgtgattgctatcattgttgtcaagatcgtccatccgaataacaaaaacattcgagacattccagggctggccccgcctgctcaaaactatcagattcacaacaggagattgttgtgggcagaagcttccataggcatgtgatggctctgaatgtaggcttcatgtggacgcactgcctgcgaagcagcagctatccatagggcgaaagatacatagtaacaattctttgtgcctgtatatctattttgtcttgttaactccgagccctaggtctgtattcctgcgtctggtgtttgtacaccgctggccgtttggctgtgtatatggtacagagatgagatcttaaaaccaaaccagtaattatgacaaatacttgaaagagctacagtaccgaaatactccagttggtactcgctgcacttcatgggcgaatatataaagggtgccggttgggccgtgtaacacattctg

SEQ ID NO: 92784 - DNA, 1517 bp, Zea Mays
ttccattctaaaccccagctaatacgccagccagcccaggagccaagccctaggccctactcactgtggaccccaaatccccaactgctcctcttcctcgtcgtcttcctctccgtccccgtccccgtccccctctcggcctccccctccactagccccaaatcctccgtctcctcctgtccctctccgcatccaccggaccccaccgggaatggcggtttgagtaagttcccgtaccagggttcttcggtctgggaggccgaggggacaccgggtcggagtgaggggccgccatggcgagcgacgtgcccatgaccccggagctcgagcagatcgacggagagatccacgatatcttccgcgccctccaaaatggattccaaaagatggataagattaaagattcaaataggcaagctaagcaattggaagatcttactgtgaaaatgaaggagtgcaagcgcttgatcaaagagtttgatcgcattctcaaagatgaggagtcaaataatccacctgagatcaacaagcagctaaatgacagaaaacagttcatgatcaaagagttgaattcctatgtcaccttgaggaaaacataccaaagtagccttggtaacaacaataagagggttgagctctttgatatgggtgctggaagtagtgagcctgctgctgaggacaatattcaaatggcatcagccatgacaaatcaacaactcattgatacgggaaggaaccaaatggaccaaacagatcaagctattgaacgttcaaaaatggttacttcccttactatacacccttgtcctgtttgccatggcaaaatttacaagacattcttgtaggtcgtagcacaaactgttgagactggagctcaaactgctgcgacattaacacagcaaacagagcaaatgaagagaattggtaatgagctagatactgtccacttctcactgaagaaagctagccaactagtgaaggagattggtcgccaggttgcgactgacaaatgtatcatggcattcctcttcctgatcgttttgggtgtgattgctatcattgttgtcaagatcgtccatccgaataacaaaaacattcgagacattccagggctggccccgcctgctcaaaactatcagattcacaacaggagattgttgtgggcagaagcttccataggcatgtgatggctctgaatgtaggcttcatgtggacgcactgcctgcgaagcagcagctatccatagggcgaaagatacatagtaacaattctttgtgcctgtatatctattttgtcttgttaactccgagccctaggtctgtattcctgcgtctggtgtttgtacaccgctggccgtttggctgtgtatatggtacagagatgagatcttaaaaccaaaccagtaattatgacaaatacttgaaagagctacagtaccgaaatactccagttggtactcgctgcacttcatgggcgaatatataaagggtgccggttgggccgtgtaacacattctg

SEQ ID NO: 92785 - DNA, 760 bp, Zea Mays
gccccagcccgtggccatcggcctcttcttcgccgcatgctctccttgctcgagctcgcccacttcctggtgcatcttcctcctcgcctcccatctcagggccaggctgctcggccacgcccagcagctccttgaacgcgtgcccctccgagcatcttgtccctttgttggttgccatctttcccagctccccagcgcaggtggctggctgtgcgttccccttgccggcgtcctcgttctccctgctcgtcggtccccgggaaaaaaaaacatctccctcacggctgctcccatggctgtctgcagccctagccgagctcgctctccccgcccagcagcaagcagctcctttcccctcgccatgaacgccgtcgatcccctactgcagttcctccacgtggtctggtcgtcgaccgcgcgcgtcacctgctcgtggttatgggaaaccagcgagcctctcctcacggcgtagtttccttgcatcatcgttcagcccgagatttagatgagaagaaagctttagcgaggcgcttgccaagtgcttggtgaatcacctcaaccggatgtggttgtcgatcttgcggagtcgagtcgagtttagtcgtggtaagtcgatccattgttttcgttagtcggatgaatgattagttgtgtggatatataaggcttgtgctattaaattgatttgtgttgtgtgaatgaaattattttcatgagtatgtatgtcttgtattatgaaactaattagagatatgcatgg

SEQ ID NO: 92786 - DNA, 936 bp, Zea Mays
ttctcgctaccttcaacatctagcattttctaatagagttttattatctgatttgtagctgtagcctacaagatgagcggtggaggccccttttctaccaggccaccttggattccgccagttgccgagggtgcataaaatctgaggcattgcagattttgtacatgtacaaatccacgtatgtgtatgcagaagttctagttcacagtaaacaatttagattgcagtctgatgtggaccatcttcacaccggggaagcaaccaagtgcaagatcttgatttatgattgagtaggatacagatatagtggcaatactgaaaaaatataaaatggaaaatacataccagtactcatattctgaatctggaccctagtgccacctaatgcatatagaactacagaaaccacaaagcgcagccacctcgccccgctcgcctctccacctcgtcttcgtgccattcctcgagcgcagccacttcgccccgctcgcggccaaagcggcctcctccgcagccgccggtacagagcacgaggtcgccgccaccaccacggccgccatcgtcaccacggcacacttcgcggccctcgcaccggcgtccgtgccagtccacgcggcgccgctccgctgccccggcgggtacgaggacttctccctcctcccggacgacgcctccgccgcgccgaccttcttcgccgccgccgaggccgcccttgcgccggcgctcaccgccgccatccgcgcccaccacgggatggaggcagggctgcgagttcttggccagggttgggagcagccgaagaccggtggacgcgaccgaggttcaaaagcgagttggagaaaggcctcgagtccgaaacaccgcgcacgcgtcggcgcgcacgcgccaccgtacgcgggaagcgcggagagggcttcaaaacgggtcaggttttaa

SEQ ID NO: 92787 - DNA, 996 bp, Zea Mays
gcaacagctcgtggcctgaataaattatcgttacaaataatcacatataacaatcatttgtttggcaacagcccgtggcctgaacaaatactaataacaatgtcgcacaaggtgtaaactgagtacctaataataaaaaggagtactgaaataaaaatacagtggcttacagatgtaagtttatgctctagcggatcatccggtgtgatcgagagttcgtccgtcaatacatgctatgcacaggtcaaggagccacttgtagagctttctagccccccaagttatcccagctgtccaactcacagaagtaatgcaggcaccagaacatgccctcccactcattctctcgctctcaggttctctctctacttcatcactctccctgtatatactctctcgaccaagataagcatggttttgttcttcactgtggttttcaatttgatacaatgagtagatttagtccccgccaaggcattaagggagggttggcaaaagtcttcactgagtatctttgctacagccatctcattcaggagacctctgcatggcgttgctcaaacttctccccacaatggaaatagagattgttggccttaaaatactctctggattgctcgtccctccacaagttaccatacagttttttttatcatgtctgaattgtggcggttcttgtgtggcaggatttctgtgttatttgagtttgcttctgtctaagaccctttgttggattttagcaacgacaaatgctctgtccactgtacaaggcacttcaggttcggctgttgccctgatttcatctttgaggccactgacatacttcgaagcaaataagaggtcgttatagtggcaagctggcagctgtgcatggtaaaatcatattgcaaggactggagttgagatatgtattcttccactgtccctatttttcttctcctgatctccgagattcctctcgattctacatggctttgtgctttgagggacgggaag

SEQ ID NO: 92788 - DNA, 134 bp, Zea Mays
tatatactgatacaaattatactacacggtgtaggtatttatgcaattcggtacactgcgtaaaaaatctggcatattgttcactggtggacgcatcttcgggttggagcgtaaaaaccttaagttttgagcat

SEQ ID NO: 92789 - DNA, 1622 bp, Zea Mays
ccccggtccaaccataccgctagtccgccgcgtaggctaaccaaaccaaccaaggttgtagtcccaaaccccacccgggccgccgggcgcaagcggtcgagctcgagctcgagcccaatccatcggaaacccccaaccctagcctccgactcgagccgatcgaccccgatccgatctaatgttccccaccgtcgacgacccctccgccgccggcgccatggtgtcggcctccttccctgacgccgacgcctacggcaacggcgactccgacgacctcgacttccccgtggacccaaaccctaaccccgtgttctcctctcccgccgcccccgcgtccgccggcgcggccggggagcggcgcccactgttccagcgcctgtggacggacgaggacgagatcgtgatcctgcgcgccttcgccgagttcacggcgcagcggggcaccgccttcgcgtcgcaccaatacgacaccacccccttctacgaggacatgcgccgccgcctcaacaccggcttcaccaagaaccagctcgtggagaagatccgccgcctcaagcgcaagtaccgcaactgcgtcgagcgcctccgcgtcgccggcgccggcttcaacttccgctccccgcacgagcaggccatcttcgagatcgcccgcaccatctggcgccccgcctccgacaagcacggccgcgactccgacgacgagggcggcggcggcggcaacaacgcccacgacgccaccttcgccatggacgctgccaccttcgccatcgacgccgccctcgccgccgccaacggggggtccgccaagtcccctacctcgaggccacgacgtggccgccgccgccgcacgggcgacttccccgccgacgcggtcccggagacgacgctcgcgctgccgccggcgcccatgccggtgatgaccgaggacgtgctcccctcgttcccgcaggtgactgcggcagcggtcatggacggcggctgcggcgtcagcgtggacccagcctctgggctgccggccgcgctgtcaacagctgcggcggcagcggccgtctccggcagcagcaccgcggagaaccccatcctggcggcgctgttcaaggagatggtgcacgcgatgctgagcgtcggcgtcggcggcagcacggcgcttctggggctggagccgccgccccccatcgctggggtgccgatggaaggggagaagtggcggcagcagcggatccaggagctggaggtgtacctgcgtcggatcgacctgctgcaagaccaggcgagggcggcgctggacgaactcaggtccgccccgcacgccggaggaatgaacacctgatgatcagcagctccagagtcgcgtcgtcttgcagatagcgcatcgtccataaccatgagaaaagatcatttttaccggtagatttctctaggctcgagcagcagcagcagaaggggagtttcgtctgtaattctcattttctgtctgcgctgcagactaagccgcctggtcttctcttattttatatataataacttatataaagattgtcctatcgtgcgtgcctaatgtatcctatttaaaatttacaaaagaacgtgacctgagctactaatgccagtcttttcactgc

SEQ ID NO: 92790 - DNA, 225 bp, Zea Mays
atgaaggacggcaagccagggaaggtggcaatggttcaatacctcgtgtcccgctcgcgaccgtgtcaaggaaaggctgcggcagcggagcggacggtgacgtgcagacggtggagcatcccttgcatcgtctccctttgcccgtggggaaggttgcgcgagggctgttattaccagatagctagtcagatagatggtcctgaaaacaagggtacacataactag

SEQ ID NO: 92791 - DNA, 1600 bp, Zea Mays
gctggctgctggtgcatgctggcatccttttctctctctttctctttctctttctcctggcctctcttcaattcggctcctagtagcctgccgccatcacatctcgccttccatataacgagcgatcatcgtcaaggatcggtcggcgcgcgcgcgaggccaacggccggctggggttttagcttgctagctcctggcgccaggctatcccggcatggcgaagcagtcgtgctgccacaagaagaagcttaggagagggctctggtcccccgaggaggacgagaagctcatgaaccacattgccaagtacggccacggctgctggagctccgtacccaagcttgcaggcctcgacaggtgtggcaagagctgcaggctgaggtggataaactacctgaggccagacctcaagaggggcacattctcgcaagaggaggaggacctcatcatacacctccactccttgctgggaaacaagtggtctcagattgcggcccagctgcctggccggacggacaacgaggtcaagaacttctggaactcgtacatcaagaagaggctcagggagcgcggcatcgaccccgccacccaccagccgctcgccgagcctgccgccgcagccactgccaccaccaccaccacggtctcccgccgcgcggtgtttggggacgtcgacctcatcccgactactactactactacaatccaggtgccgccgccgtcgttcgagggcggcccaatgctggagagcgtgaagctagcggtggagctggactggcccgtcgctggcgacggggtaacgtcaaggccatgctacctgcaggggggctgcttcgacatggacgcgctgcagcagcactgcggctccatcccgccggtgccggtcgtcccgtcggcctccgccagctccagcacgctgacctcgatggcggaagcggaacactgcagcaccaacaacgtcgccgccggcggcaacctcccatggctggagctcggggcaaacgcggtggctgacgccggcggccacgtcgtcggcagctgctacgccggcgcgctggacgagctcaggtggtcggagtacttcgacagtgccttccaggccgccgagagccagcaaggcgccctgcagccggggcagtgtgtctacggcggcaaggatgacgtcccggtgcacttcgacgtccatggcgggctaagcaactggtgctagtccagtaatccatcacgtactcaatgcaaagaaaccacggaacaagaaacagtccatcagtgtgaattaattactgtctatatatagtctgcagatgcaaattcttacgggcatttcatctggtgttacccctccccctttctattctcatgttgctgtgttgattagcagcggataaaagttcatgtgatgagtacatttgaagtgtttaacacacatgtaaagtaatacatacgctgttgttaattagtaaatactgcagagagagagagagagggacagagatatgatgagtgggccatgcggttaaataaaaatgtgaattattatgtcattatctcagcatattaattatagcatgcatgcatgcacggattaatttgactttat

SEQ ID NO: 92792 - DNA, 101 bp, Zea Mays
atgaatgaaagaactatagatcgtttggagttaactagcgctgaacaaattgtatgttgcataagtgatcatgtgaaccaaaagccattttccagttgttt

SEQ ID NO: 92793 - DNA, 105 bp, Zea Mays
atggcgccttatcgccttggtgtcaaggcacaccaagctctcgcctggacgcctagtaacctttgcaaccatgagtggcagctgggttcaggactccagggctag

SEQ ID NO: 92794 - DNA, 606 bp, Zea Mays
agaattttaagaacctctaatattttcaagctcactgcaagctctgcatcaactattatcgggttgcagcgcaaaaaataatcatgatattgaaatagagctaacaagtcatcaaaccagtgtaccactacaatggttgatggagcaaagagcttcttcaagtcgactatttcagacattggtgataaaaacttccatgctctccccagctccgaaaacttatttttagctgcaagtaatctattcgatagaaaaaggagtgcacatattcatgggtgcaatcatttgaggtggagcagttctcttctgtaacagttcatgtagcacctcctgacccctacactttggtttaatttgtttgggcgttgttgtgtccctcgtcaacgtttgatacgacacgaacaatattatacacagtagatcatacaaaaacagcaccaacctgcagcaagctagtcacattattgttagtgactgagtcttgcaagtgattacagtcataagcaggcttaccagaactaaaagttatactaaatactcaagcagcaattgacttacatccattaagagtgaaggatatgctagtccaatattcttacagccatt

SEQ ID NO: 92795 - DNA, 104 bp, Zea Mays
cattatatgtgttcttcttcttcggcgcacatatgagatgcacccggctttacctcttaaatccaggtatgacaacttagccttcgaaataccctcgagctacc

SEQ ID NO: 92796 - DNA, 500 bp, Zea Mays
acacgtctccgtagtctttataaccttcttcttcttcccattggcgtacgcggtggatcgattgctcctctaccgccatgccggactccaagaagattgtgctgaaggtggacgtcgtcggcgacgggtgcaaggccagagccatgagcatcatcgccaagttcaagggcgtgaagtcgatggcggtggacggggaggggacgctgacggtggtgggggaggtggacgtggtgcgcgtggccaaggcgctgcgcaaggccaagttcgagccgcgcgtgctcagcgtcggcccggagaagcagcccgaggccgccaagaagcccgccgccggcgaggaggccaagaagccgctgccgtgctgcaccggctgcagcgcatgccgtccaccagctccggtcccggcgcatcctttccccggtgccgccgtggtgtgctacgaggagcaggccgcgggcaacggatgcgtcatcctctgaggatcgagtgcttcttggtttgtt

SEQ ID NO: 92797 - DNA, 1795 bp, Zea Mays
atagtatagaagcatagatttgtgaactttgagattatctattggatttggtttttcttttttgataaactgaaataaactgcgcttggaactcagcgtaaaacggggaaggacggacgggcccacatgactgttactgtaacttaatccggttcatggtctgtggtttgtccaacaaagcctgggcctggccgcctggacctgaaaaagtcgttcgggattcaaacccttcgatcccaaatctgccctgcacgcctcgccgccggccacacccccggcggtcgtcgccctacccgcccttctccttacctctaaccccgccggagcccaacacctccccaccatgccgcgaaacttccgcaagcggggcatcgagcaggacactgacgaccgctccgacgacgaggacactcgccgcatcgccctcgaggagatcaagtacatgcagaagctccgggagaggaagctgggtatccccgccgacctcgccgccgcatccactaacgggtcctccgcccgtggtctattgggcaccggggcagcggtcgccggtgaggccgagaaggaggacctcgtcctccaggacaccttcgctcaggagaccgccgtcactatcgaggaccccaacatgttgaggtacgtggagaccgagctggcgaagaagaggggtaagatggttgatgtgggacacaaggaagagatggaccatgtggacgagctctataccgtgccagaccacctcaaggtaaagaagaagaactcagaggagagctcgacacaatggacaactggcattgctgaagttcagctgcctattgagtacaaattaagaaacatcgaagaaaccgaggcggctaaaaagttgctgcaagagaaaaggcttgcaagaaaaccaaaaccagatgcaaacattccatcaagttatagtgctgattatttccaccgtggcaaagaatatgatgaaaaactgcgaagagagaatcctgggttgtacaaagataatgattctcggccaagtggaaatccaggaggcaaagcaacagatactaaaaatccagatggtgttggtgcaggacggagagaagctgcgagtgatgaactcatgcttcagcgtttccgcaaacgagaaaaattccgcgcccttcgaagataagccagagctgacaggttgctagattgtgccagttgcctttgaagctcaaaaatatagttgtggctgcataaagtcccaacatatcatgtccttttagtgagaaacttactgtaaaatgcatccttggttattgagtctgcttctgcagctgctaagggcaaggagcagattaaccttattacagaggcgatttggggcaatatatttgagctgagggatatctgaattttgtgtcagctctgaggctcatatattaagaggggccgcagtggttcaggacataggagctcataactttccagatgctcagatcgtgccatgttcatctgcaatggaagaaaggaaggtgtgttctccgtacaaatataaatgaactgcttcgacatcttgagcaaactccaaggggtagtgcgaatgtctgatctcattttctttggagtgaatggcaaagcctgcaaattcatctttctagtctagaatgtattgtttctctgaattatttgcagtttgctgcagtagcatcagttatctagatttctagggacgagcaatctgtgagttgtttttgttgcactattgctgcttgctttgcctttactagttcaagtatcaattctttataagagttttgagtttcatatc

SEQ ID NO: 92798 - DNA, 1053 bp, Zea Mays
gttgtagtttaaattttattctagtactagtctttcttttcaaaggcagatgcacaattacatgcaattccatgttatcattatttttatctccacaggtacaaattaagaaacatcgaagaaaccgaggcggctaaaaagttgctgcaagagaaaaggcttgcaagaaaaccaaaaccagatgcaaacattccatcaagttatagtgctgattatttccaccgtggcaaagaatatgatgaaaaactgcgaagagagaatcctgggttgtacaaagataatgattctcggccaagtggaaatccaggaggcaaagcaacagatactaaaaatccagatggtgttggtgcaggacggagagaagctgcgagtgatgaactcatgcttcagcgtttccgcaaacgagaaaaattccgcgcccttcgaagataagccagagctgacaggttgctagattgtgccagttgcctttgaagctcaaaaatatagttgtggctgcataaagtcccaacatatcatgtccttttagtgagaaacttactgtaaaatgcatccttggttattgagtctgcttctgcagctgctaagggcaaggagcagattaaccttattacagaggcgatttggggcaatatatttgagctgagggatatctgaattttgtgtcagctctgaggctcatatattaagaggggccgcagtggttcaggacataggagctcataactttccagatgctcagatcgtgccatgttcatctgcaatggaagaaaggaaggtgtgttctccgtacaaatataaatgaactgcttcgacatcttgagcaaactccaaggggtagtgcgaatgtctgatctcattttctttggagtgaatggcaaagcctgcaaattcatctttctagtctagaatgtattgtttctctgaattatttgcagtttgctgcagtagcatcagttatctagatttctagggacgagcaatctgtgagttgtttttgttgcactattgctgcttgctttgcctttactagttcaagtatcaattctttat

SEQ ID NO: 92799 - DNA, 180 bp, Zea Mays
atggaggtgctcacggggatggcgtcggcgaggctaggcctagcgtcgcggggagccggggcgatgggggagatgctcccaagaccagtgatcgaacagtttgtgcagaatcaatctaagagaggaattgtaagcaaaggacacagtgttactcaaggaaaacgagtattgtgtgcatga

SEQ ID NO: 92800 - DNA, 1596 bp, Zea Mays
attttaggcatggcccctacctcactaggacagattctggttcagcacaagagatggacagaaggctttctccagatctccctctaaaagtacaacctgtttctgctaggtcacaggaagatcagcctgggccttcaaatgggttactccatctgcgggtgctgggctgctaacagcttccccaccctttactatgtcactatcccttcactttgcttcctcaatggcatctcgttgttccctgagataaccaatccctggtttgtaccgtttgcatatgttgttgtggctgcatactcctgcagcttggtggaatccctgcaatgtggcgacactgctgtcgagtggtggaacacgcaaaggatgtggcttttcagaagaatcacctcatacctcttggcaaccatcgacacaatctgcagaatgcttggcgtcaccgagtcgggattcaccctgacggcgaaggtgaccgatccgcaggccctagagaggtacaagaaggggattatgttgtttgggtccttctccacgatgtttgtgatcattacaactgttgcactgcttaacctggcgtgcatgatgctcggggtggcaaaggttttgttgtgtaaaggagcggtgagtctgggagctatgtttgtgcagaccgttctatgtgctctgatagtagcgatcaatttcccagtgtatgaagcaatgtttgtccgcaaggacagtggcagattaccagcttctgtcagtgtagtttcgctctgcattgtattaccattttgtatactacttccaaccaagttgtagatgtggagctgctgaaagatgatatatatatttgaaactcgatggtgaccgggcataaaatctaggtgtacaaagtacaatctggaatgataatagttacaatcgagttaaataagttgtgatttgtacttgaccgatcagagtgtgcattcagctatgattcttctgtctcaattaacaataatcattttttttcaacaacattaccggtcagcactcagcagcgactgtcaacctgtcactggctaattgagagaaaatttatcttgagagaaaatttatctcaagctaaacgaaaaattccatctctaaacgttatcacaatcacaataaatagtttccaagcatagactatccggctaccaaactacacctggcctgactaaatcagagcgaactagaactatatatggtgcacaacttatatttcattccaagttgattcttccacaaaactgtgcaagcttacaataaatgtatgcgcccaacataaggatacttgttgagtggctccccacagccgacaaagcagccagtatttccacgggtggtgaagaatggggattcaaagaggtttagaagcttttgaatcgattgcctaaccagcgaagatgcagttaccctgcttctcctgccccaaccagtgacaatgtcaattgtttcaggtccagtgcccaatgtcaaaacctgcctatggaaccaggcaagtgtcgtggagagtgcagtcactgttgtgccttcatgcatcaggtgaaggttgattagccaattagacgagctcttctcccttacagaatc

SEQ ID NO: 92801 - DNA, 2329 bp, Zea Mays
ggactcagcaagacgatgaacgggcacacttgctccactctctagagtctagacccctagcttacattaatctcagttctcaccatggagcagcaaaaccaagtaatcgaggcgccgctcctgcaacaacaacgagaagatggcacgtccgtgcaaggcggcggcgaggcggacagccacggtcaccgccgcgggagcaacaagctcacgttccttccgctcgttttcctcatctacttcgaggtcgccggcggggcgtacggggcggagctcgcggtgaaggcggccggcccgctcttcacgctcctgggcttcctcgtcttcccgttcgcgtggggcgtcccggagtcgctggtgaccgcggagctcgcggccgcgctcccgggcaacggtggcttcgtcctgtgggccgaccgcgccttcggcccgctagccggctcgctcctcggcacgtggaagtacttgagctgcgtcgtcaacgtcgcggcgtacccggcgctcatcgccgactacctcggccatgccgtgcccaccggcggcgcggcgcgcacgggcgcggtggccggcctgacggtgctgctgtcgctggtgaacttcaccgggctgagcgtcgtcgggtggggcgccgtggcgctggggctcgtgtccctcgcgccgtccgtgcttatgacggggatggcggtgccccaggtgcgcccgcggcggtggacggtgacggtggagggcgggagcagggactggcggctcttcatgaacacggtattctggaacctcaactactgggacagcgccagcacgatggccggcgaggtggagcggccggagcggacgttcccgcgggcgttggccgtggcggtggtcctgatcgccgccagctacctgctgccgctcatggccgcgaccggcgccacggacgcgacgccggacgcctggacgaacggctacttggccgatgctgcaggcgtcatcggaggcccatggctcaagttctggacccaggccggcgcggtgctgtcgtccgtcggcatgttcgaggcccagctgagcagcggcgcgttccagctgctgggcatggcggacctgggcctcctcccggccgtcttcgcgcgcctccgcaccccgtgggtcgccgtcgccgtctcctccgccgtgaccctggccgtgtccttcctggcgttcgacgaggtcgtggccaccgccaacttcctctacagcctgggcacgctgctggagttcgccgccttcctctggctccgcgccaggcagccggacctgaagcggccgtaccgcgtgccgctgtcgtcgctgcccgcgctggccgccatgtgcgccgtgccgtccgcgttcctggcgtacgtgtgcgccgtggccgggtggagggtgttcgcgctcgccggcgcgctcacggcgctcggcgtcggcttgcacggctccatgaggctgtgcagggccaagaggtggctcaagttcgaaggccagcagcgaggacaggggggtcatgctgctgcacctgcacacacggtttgagtcctaagtttgaagattgaactatcacgacgcaggcagaccaatcgatacgaaaaaaacaggatgttgcgtcctacatttctgattccaaacatgtaaaagtgtaattcatcatgtaatacatgcatacgctcatcagaactgtcccagatcacgtgcagatacatattcgcttcgtagttacgactcctatacgtatatgatacagatccgacctgagatctatctacatgaccagtagctcaataaagaacatgatgtgggctcgagaaggaatgtctagtactagaggtaatccacatatatatatatatatatgatatctgcatcgacaattcacatggcatccacggacacgagaagaacggcgaccgcagcggcggacagagccgtgaacaagcccgcgcgcggcaacccacgggacacgccgttgtaagggttgagcgtgccgctgggcccgaacgacccggtgccattgaaggagcccggcggggtgccgaatccaggtccaaggccgcctccagccggcggggtggtgccggccgctggggggccgaactccgacgacgacggggggctggagccgactggaggtgtgaagcccgtcggaggggagaggctggtcggcgggctcgctcccaccggcacgctcgagttggagctgcaagcaaccgcagcgcgcgccgagaaaacgaggtcacgtcgtcaggttgtgttaaacgctaagagacgtgcagaaattgcagagcttgaaatagacagtgctcaccttcccgcgaaaacgcaagatcctgagcctgga

SEQ ID NO: 92802 - DNA, 1573 bp, Zea Mays
atgtgcaccaatctttcatgtgcaccaaatatattctccatacaaaaaaccaagctgccgtcgcaacgccaacagcaacaagaactgccaccagaagatggcgtcatcgtgcaagctctcacgtcgcaagacgagcagcaacaggcggcgcaaggtcgccatggcaccgtgcaaggcgatcagcaccaccggagcagcagcaagctgacggtcctcccgctcatcttcctcatctacttcgaggtggctggcggtccgtacggctccgagcaggcggtccgtgcggcgggccctctcttcacgctcctcggcttcctcgtcttccccttcgcgtggggcgtcccggagtcgcttgtcacggctgagctctccgctgcgatccccggcaacggcggcttcgtccggtgggccgacctcgccttcggcccgctcgccggctcgctgctcggcacgtggaagtacctcagctgcgtcatcaacatcgccgcgtacccggccctcgtcgccgactacctgggccgcgtcatccccgccgtggccggcacgggcaggacgcgcacgtgcacggtggttggcatgaccgtgttcctgtccttcgtcaactacaccggcctgagcatcgtcgggtggggcgccgtggctctggggctggtgtccctggcgccgttcgtgctgatgaccgggatagcggtgcccaagatgcggccgcggcggtggacggttccggtggaggggaggaaggactggcggctcttcttcaacacgctgttctggaacctcaactactgggacagcgccagcaccatggccggcgaggtggagcggccggagcgtacgtttccccgggcgctggcgctggcggtcgtgctcatcgctgctagctagctacctgctgccgctcatggcagcgaccggcgccacggacgcgccgccggacacgtgggcgaacggctacctggtcgatgctgccggcgtcattggaggcccatggctcaagttctggatcgaggccggcgtggtgctgtcgtccatcggcatgttcgaggcccagctgagcagcggcgcgttccagctgctgggtatggcggacctgggactcctcccggcggtcttcgcccgccgcgccgcccgcttccgcaccccgtgggtcgccgtcgccgcctcctccgccgtcaccctggccgtctccttcctggcgttcgacgatgtcgtcgccacggccaacttcctctacagcctcggcacgctgctggaattcgccgccttcctctggctccgcgtcaggcagccgtatctgaagcggccgtaccgcgtgccgctatcgctgcccgcgctggccgccatgtgcgccgtgccgtcaacgttcctggcgtacgtgtgcgttgtggccgggtggagagtgttcgcgctcgccggcgcgctcacggtattcggcgttggcttgcacggcaccatgaggctgtgtagagccaagaggtggctcaggttcaaaaccggcttggttgccgcggcggaagatcgccgaggggatgtcgccgtttctgctggagatcgagtttgaatgaatgaactg

SEQ ID NO: 92803 - DNA, 90 bp, Zea Mays
tgcccgcatgaacggtcggcacacttgctccgctatccagagtaccaagactctttgccctcacgagtcacgatgaaccagcacatacaa

SEQ ID NO: 92804 - DNA, 1635 bp, Zea Mays
tttggactgtacaccatgtggtgcacggcgcggtcacttttctattcgttctgccatcggcacagcacagggaagagactgctcggcttcggctgccccatcgtgaatctccaacgacgatgaagcagggaatccatggaagcgacaacatctcaccactccactccaaggcgtctcctgaagccctgcccggcggcgacgcgacccagttcccaatcacgggcgtggctggcactggcagcggcaccggccatgcaaggggtcggaacaagctgacgcttttccccctcattttcctcatcttcttcgaggtcgccggcgggccatacggcgccgagccggcggtgcaggccggcgggcccctcctggcactcatcggattcaccgtgttcccattcgtctgggccgtcccggagtctctcgtgaccgccgagctgtcgacggcgatgcctggcaacggcgggtacgtggtgtgggtggaccgcgcgttcgggccgttcgcggggtccctgatgggcacgtggaagtacgtctgcagcgccatcggcgccgcggccttcccggcgctgtgctccgactacctgacgcgcgtggcccccgccgtgtcccgcggcggcgccagggtcgcgacggtcgtcacgttcaacgtcgccctgacgctgctgaactgcacgggactgagcgtcgtcggctggacggccgtggcgctgggcctcgcggcgctgtcgccgttcgtgctgatggtcggcgccgcgctgccgaaggtccgcccgcggcggtggggcgcgaccaccgccgcaggcggcaaggactggaagctgttgcttaacacactgttctggaacctgaacggctgggacagcgtgagcacgatggccggcgaggtggagcggcccggaaggacgttcccggcggccctggtgtcggcagtctgcatagggtctctcggctacgtgctgcctctcttggcggccaccggcgccgtcgatgcaccgccggaggcctggggagacggctacttcgccgacgctgcaggtctgatcggcgggaagtggctcaagtactggacggaggtgggcgccgtgctctcctccatcggcctctactcctcgtcgatgagcagcgcggcgtacctcctggcgggcatggcggatctggggcacctcccgtccctgttcgccgcgcgcgcccccgcgttcggcaccccctgggccagcatcagcgtgacgggcgccatcgcgctgggcatgtccttcctgagcttcgacagcatcgtggcggtcaccaacttcctgtacagcctcgggatgctgctcgagttcgcggccttcgtctggctccgcgccaggcgcccggacctgccgcggccctaccgcgtgcccctgggcaccgcgggcgtggtggccatgtgcgccgtgccgtcgtcgttcctggtgctcgtcatggccgtcgccgggtggaaggtgtgcgtggccagcgccgccttcacggccgccggcgtcgtggtgtactatgtcatggcgttctgcaaggatcggggatgtttaaagtttggcgcccgtgcagagggagagtacgaaggttgctaacagtatgaactgtgttgtgtgatagcagaaacccactccctcgcag

SEQ ID NO: 92805 - DNA, 1846 bp, Zea Mays
gcagaagtcgaccggcatcacagttcacatccgacaactaatcagtccatcgcgttcgcgtccacggtcagttgccggcgccatccctgcccctgctcacccctccccgcctggcgtccacgatcggcgacggcatgtctcgcgacgcccatctcggagtcggagtcgagggagacgcagccgaggaaaagaacgccgccgctgacggcggcgaaggagtcgggttcaggtcaggcggcggcggcgggcacaagctgtccctggtgccgctcatcttcctcatcttcttcgaggtggcggggggtccctacggcgcggagccggcggtgcaggccgcgggcccgctgtacgcgctgctgggcttcctcatcttccccttcatctgggccatcccggaggcgctggtcaccgcggagctctccacggcgatgccgggcaacggcggcttcgtgctgtgggccgaccgcgccttcggcccgttctcgggctccctcatgggcacctggaagtacgtgtccagcgccatcaacggcgccgcgttcccggcgctgtgcgccgactacctggcccgcgtcgcgcccgccgtgtccgggggcggggcccgcgtcgccaccatcgtcgccttcaacgtggcgctcacgttcgtcaactacacggggctcaccgtcgtgggctggtccgcggtggggctcggcgtcgcctcgctctcgccgttcctggtcatgtccggcgccgcgctgcccaagatccgcccgcggcggtggcgcgtcgtcgccgccgagagggactggaagctcttcttcaacacgctcttctggaacctcaactactgggacagcgtcagcaccatggccggcgaggtggagcggcccgggaagacgctccccaaggcgctcgtgtccgccgtctccatgacgtcgctcggctacctgctgccgctcatggcggccaccggcgccatcgacgtcgcgcctgaaagctgggggaacggcttcttcgcagatgccgcaggcatgatcggtgggcgttggctcaagtactggatagaggtgggcgcggtgctgtcctccatcggcctctactcggcgacgctgagcagcgcggcgttccagctgctggggatggcggacctgggcctgctcccgcgcgcattcgcggcgcgcgcccccgtcttccgcacgccctgggtcagcatcttggccaccagcgccatcatcctcggcatgtccttcctcagcttcaacagcatcgtggcggccgccaacttcctctacagcctgggcatgctcctcgagttcgccgccttcgtctggctccgcgtcaagcggcccgcaatggcccgcccgtaccgcgtccccgcgcgcctgcccgccgccgtcgcgctctgcctcgtcccctccgcgttcctcgtcttcgtcatggccatcgccggctggaaggtgtacgccatcagcgccgcgttcaccgccgcgggggtggccgtgtactacctcatgcgcttctgcaaggccagggggtgcctcaggttcagcgacggcggcgaccaagggaccacggcggtgtaccaggacggcagcaacgcgggcgatgtctgaatgatagatagactctttgtgccaaaagcactatacgaatttgtattgtaggctagtgttttgtgattaggaattagtggttccggggaaaaggattcatgctccctccagtttctgctcgtgacatcttgcttacgtgtgtgctccaactctccatacttgttggcaacatcaaagacgactccctcaagtctgacgtaactgtttggttgaacgttgaaatggtgtgataaccatttcgcggtcgcata

SEQ ID NO: 92806 - DNA, 889 bp, Zea Mays
gtctcctccgatgctgcccatgccatgtggtccgcaatcctgatggcgtcgtctatagagattttatatgcggtaagattgaatagtcggtaacctgttgcagaaagagtcaaatcaaatcagatcgaatgataaacaactactagtagcaagcgtcgcccaccacgtaaaaatatgcccccaatattttttttttatttttttttggagggataccttgactggaaagtggaaactggcctaaagccctaaactactgtacatgcaactacgctcaccacgtacgcaggcatgatcggtgggcgttggctcaagtactggatagaggtgggcgcggtgctgtcctccatcggcctctactcggcgacgctgagcagcgcggcgttccagctgctggggatggcggacctgggcctgctcccgcgcgcattcgcggcgcgcgcccccgtcttccgcacgccctgggtcagcatcttggccaccagcgccatcatcctcggcatgtccttcctcagcttcaacagcatcgtggcggccgccaacttcctctacagcctgggcatgctcctcgagttcgccgccttcgtctggctccgcgtcaagcggcccgcaatggcccgcccgtaccgcgtccccgcgcgcctgcccgccgccgtcgcgctctgcctcgtcccctccgcgttcctcgtcttcgtcatggccatcgccggctggaaggtgtacgccatcagcgccgcgttcaccgccgcgggggtggccgtgtactacctcatgcgcttctgcaaggccagggggtgcctcaggttcagcgacggcggcgaccaagggaccacggcggtgtaccaggacggcagcaacgcgggcgatgtctgaatgatagatagactct

SEQ ID NO: 92807 - DNA, 1664 bp, Zea Mays
acaaataggccgcaccgcatttcgaaaggccacgcgaccgccacctccacctcctcgaagccgccgcgaccgaacgagcgaagcgtcccttcccgcgccgacgccgaaaccctagctcctcttacgccatggccaccgtgtcgctcactccgcaggcggtcttctccaccgagtccggcggcgccctggcctctgccaccatcctccgcttcccgccaaacttcgtccgccagctcagcaccaaggcacgacgcaactgcagcaacatcggcgtcgcgcagatcgtcgccgccgcgtggtccgactgcctcgctgctcgcccccaatcaggcggcggcggatgtcagcgcaattcctaacgctaaggttgcgcagccgtccgccgtcgtattggccgagcgtaacctgctcggctccgacgccagcctcgccgtccacgcgggggagaggctgggaagaaggatagccacggatgctatcaccacgccggtagtgaacacgtcggcctactggttcaacaactcgcaagagctaatcgactttaaggaggggaggcatgctagcttcgagtatgggaggtatgggaacccgaccacggaggcattagagaagaagatgagcgcactggagaaagcagagtccaccgtgtttgtggcgtcagggatgtatgcagctgtggctatgctcagcgcacttgtccctgctggtgggcacattgtgaccaccacggattgctaccgcaagacaaggatttacatggaaaatgagctccctaagaggggaatttcggttattggaggatgcgtcagtggcagagatgagttagtttccaaagttcgtatttaccaccatgtagttggtggtgttctaaacccgaatgctgcgtaccttatccttcgaggtatgaagacactgcatctccgtgtgcaatgtcagaacgacactgctcttcggatggcccagtttttagaggagcatccaaagattgctcgtgtctactatcctggcttgccaagtcaccctgaacatcacattgccaagagtcaaatgactggctttggcggtgttgttagttttgaggttgctggagactttgatgctacgaggaaattcattgattctgttaaaataccctatcatgcgccttcttttggaggctgtgagagcataattgatcagcctgccatcatgtcctactgggattcaaaggagcagcgggacatctacgggatcaaggacaacctgatcaggttcagcattggtgtggaggatttcgaggatcttaagaacgatctcgtgcaggccctcgagaagatctaagcactctaatcagtttgtattgacaaaatcatgaggtgatggctgtcttggatcttgtcaagatctgtgacaatgatatgagctgatgactgcgaataagttctcttttgcttattttatccgtcaaattcaataagctgtgattgctgcatgatctagtgttgggcttagttacacttgtcaagttaaattggtctggaaccatgtatacttgtagttttgctttagagtggtgacctggctatgtgggatgaggtcacgcttcccttcaattactgtgagattcacacatttaataatcttgataataaaaatgaaaatcctcacaaggaattaacataata

SEQ ID NO: 92808 - DNA, 1657 bp, Zea Mays
acgcgaccgccacctccacctcctcgaagccgccgcgaccgaacgagcgaagcgtcccttcccgcggcggcggatgtcagcgcaattcctaacgctaaggttgcgcagccgtccgccgtcgtattggccgagcgtaacctgctcggctccgacgccagcctcgccgtccacgcgggggagaggctgggaagaaggatagccacggatgctatcaccacgccggtagtgaacacgtcggcctactggttcaacaactcgcaagagctaatcgactttaaggaggggaggcatgctagcttcgagtatgggaggtatgggaacccgaccacggaggcattagagaagaagatgagcgcactggagaaagcagagtccaccgtgtttgtggcgtcagggatgtatgcagctgtggctatgctcagcgcacttgtccctgctggtgggcacattgtgaccaccacggattgctaccgcaagacaaggatttacatggaaaatgagctccctaagaggggaatttcgatgactgtcattaggcctgctgacatggatgctctccaaaatgcgttggacaacaataatgtatctcttttcttcacggagactcctacaaatccatttctcagatgcattgatattgaacatgtatcaaatatgtgccatagcaagggagcgttgctttgtattgacagtactttcgcgtcacctatcaatcagaaggcattaactttaggtgctgacctagttattcattctgcaacgaagtacattgctggacacaatgatgttattggaggatgcgtcagtggcagagatgagttagtttccaaagttcgtatttaccaccatgtagttggtggtgttctaaacccgaatgctgcgtaccttatccttcgaggtatgaagacactgcatctccgtgtgcaatgtcagaacgacactgctcttcggatggcccagtttttagaggagcatccaaagattgctcgtgtctactatcctggcttgccaagtcaccctgaacatcacattgccaagagtcaaatgactggctttggcggtgttgttagttttgaggttgctggagactttgatgctacgaggaaattcattgattctgttaaaataccctatcatgcgccttcttttggaggctgtgagagcataattgatcagcctgccatcatgtcctactgggattcaaaggagcagcgggacatctacgggatcaaggacaacctgatcaggttcagcattggtgtggaggatttcgaggatcttaagaacgatctcgtgcaggccctcgagaagatctaagcactctaatcagtttgtattgacaaaatcatgaggtgatggctgtcttggatcttgtcaagatctgtgacaatgatatgagctgatgactgcgaataagttctcttttgcttattttatccgtcaaattcaataagctgtgattgctgcatgatctagtgttgggcttagttacacttgtcaagttaaattggtctggaaccatgtatacttgtagttttgctttagagtggtgacctggctatgtgggatgaggtcacgcttcccttcaattactgtgagattcacacatttaataatcttgataataaaaatgaaaatcctcacaaggaattaacat

SEQ ID NO: 92809 - DNA, 1522 bp, Zea Mays
acgcgaccgccacctccacctcctcgaagccgccgcgaccgaacgagcgaagcgtcccttcccgcggcggcggatgtcagcgcaattcctaacgctaaggttgcgcagccgtccgccgtcgtattggccgagcgtaacctgctcggctccgacgccagcctcgccgtccacgcgggggagaggctgggaagaaggatagccacggatgctatcaccacgccggtagtgaacacgtcggcctactggttcaacaactcgcaagagctaatcgactttaaggaggggaggcatgctagcttcgagtatgggaggtatgggaacccgaccacggaggcattagagaagaagatgagcgcactggagaaagcagagtccaccgtgtttgtggcgtcagggatgtatgcagctgtggctatgctcagcgcacttgtccctgctggtgggcacattgtgaccaccacggattgctaccgcaagacaaggatttacatggaaaatgagctccctaagaggggaatttcgatgactgtcattaggcctgctgacatggatgctctccaaaatgcgttggacaacaataataaggcattaactttaggtgctgacctagttattcattctgcaacgaagtacattgctggacacaatgatgttattggaggatgcgtcagtggcagagatgagttagtttccaaagttcgtatttaccaccatgtagttggtggtgttctaaacccgaatgctgcgtaccttatccttcgaggtatgaagacactgcatctccgtgtgcaatgtcagaacgacactgctcttcggatggcccagtttttagaggagcatccaaagattgctcgtgtctactatcctggcttgccaagtcaccctgaacatcacattgccaagagtcaaatgactggctttggcggtgttgttagttttgaggttgctggagactttgatgctacgaggaaattcattgattctgttaaaataccctatcatgcgccttcttttggaggctgtgagagcataattgatcagcctgccatcatgtcctactgggattcaaaggagcagcgggacatctacgggatcaaggacaacctgatcaggttcagcattggtgtggaggatttcgaggatcttaagaacgatctcgtgcaggccctcgagaagatctaagcactctaatcagtttgtattgacaaaatcatgaggtgatggctgtcttggatcttgtcaagatctgtgacaatgatatgagctgatgactgcgaataagttctcttttgcttattttatccgtcaaattcaataagctgtgattgctgcatgatctagtgttgggcttagttacacttgtcaagttaaattggtctggaaccatgtatacttgtagttttgctttagagtggtgacctggctatgtgggatgaggtcacgcttcccttcaattactgtgagattcacacatttaataatcttgataataaaaatgaaaatcctcacaaggaattaacat

SEQ ID NO: 92810 - DNA, 1924 bp, Zea Mays
acaaataggccgcaccgcatttcgaaaggccacgcgaccgccacctccacctcctcgaagccgccgcgaccgaacgagcgaagcgtcccttcccgcgccgacgccgaaaccctagctcctcttacgccatggccaccgtgtcgctcactccgcaggcggtcttctccaccgagtccggcggcgccctggcctctgccaccatcctccgcttcccgccaaacttcgtccgccagctcagcaccaaggcacgacgcaactgcagcaacatcggcgtcgcgcagatcgtcgccgccgcgtggtccgactgcctcgctgctcgcccccaatcaggcggcggcggatgtcagcgcaattcctaacgctaaggttgcgcagccgtccgccgtcgtattggccgagcgtaacctgctcggctccgacgccagcctcgccgtccacgcgggggagaggctgggaagaaggatagccacggatgctatcaccacgccggtagtgaacacgtcggcctactggttcaacaactcgcaagagctaatcgactttaaggaggggaggcatgctagcttcgagtatgggaggtatgggaacccgaccacggaggcattagagaagaagatgagcgcactggagaaagcagagtccaccgtgtttgtggcgtcagggatgtatgcagctgtggctatgctcagcgcacttgtccctgctggtgggcacattgtgaccaccacggattgctaccgcaagacaaggatttacatggaaaatgagctccctaagaggggaatttcgatgactgtcattaggcctgctgacatggatgctctccaaaatgcgttggacaacaataatgtatctcttttcttcacggagactcctacaaatccatttctcagatgcattgatattgaacatgtatcaaatatgtgccatagcaagggagcgttgctttgtattgacagtactttcgcgtcacctatcaatcagaaggcattaactttaggtgctgacctagttattcattctgcaacgaagtacattgctggacacaatgatgttattggaggatgcgtcagtggcagagatgagttagtttccaaagttcgtatttaccaccatgtagttggtggtgttctaaacccgaatgctgcgtaccttatccttcgaggtatgaagacactgcatctccgtgtgcaatgtcagaacgacactgctcttcggatggcccagtttttagaggagcatccaaagattgctcgtgtctactatcctggcttgccaagtcaccctgaacatcacattgccaagagtcaaatgactggctttggcggtgttgttagttttgaggttgctggagactttgatgctacgaggaaattcattgattctgttaaaataccctatcatgcgccttcttttggaggctgtgagagcataattgatcagcctgccatcatgtcctactgggattcaaaggagcagcgggacatctacgggatcaaggacaacctgatcaggttcagcattggtgtggaggatttcgaggatcttaagaacgatctcgtgcaggccctcgagaagatctaagcactctaatcagtttgtattgacaaaatcatgaggtgatggctgtcttggatcttgtcaagatctgtgacaatgatatgagctgatgactgcgaataagttctcttttgcttattttatccgtcaaattcaataagctgtgattgctgcatgatctagtgttgggcttagttacacttgtcaagttaaattggtctggaaccatgtatacttgtagttttgctttagagtggtgacctggctatgtgggatgaggtcacgcttcccttcaattactgtgagattcacacatttaataatcttgataataaaaatgaaaatcctcacaaggaattaacat

SEQ ID NO: 92811 - DNA, 1765 bp, Zea Mays
cctccacctcctcgaagccgccgcgaccgaacgagcgaagcgtcccttcccgcgccgacgccgaaaccctagctcctcttacgccatggccaccgtgtcgctcactccgcaggcggtcttctccaccgagtccggcggcgccctggcctctgccaccatcctccgcttcccgccaaacttcgtccgcggcggcggatgtcagcgcaattcctaacgctaaggttgcgcagccgtccgccgtcgtattggccgagcgtaacctgctcggctccgacgccagcctcgccgtccacgcgggggagaggctgggaagaaggatagccacggatgctatcaccacgccggtagtgaacacgtcggcctactggttcaacaactcgcaagagctaatcgactttaaggaggggaggcatgctagcttcgagtatgggaggtatgggaacccgaccacggaggcattagagaagaagatgagcgcactggagaaagcagagtccaccgtgtttgtggcgtcagggatgtatgcagctgtggctatgctcagcgcacttgtccctgctggtgggcacattgtgaccaccacggattgctaccgcaagacaaggatttacatggaaaatgagctccctaagaggggaatttcgatgactgtcattaggcctgctgacatggatgctctccaaaatgcgttggacaacaataatgtatctcttttcttcacggagactcctacaaatccatttctcagatgcattgatattgaacatgtatcaaatatgtgccatagcaagggagcgttgctttgtattgacagtactttcgcgtcacctatcaatcagaaggcattaactttaggtgctgacctagttattcattctgcaacgaagtacattgctggacacaatgatgttattggaggatgcgtcagtggcagagatgagttagtttccaaagttcgtatttaccaccatgtagttggtggtgttctaaacccgaatgctgcgtaccttatccttcgaggtatgaagacactgcatctccgtgtgcaatgtcagaacgacactgctcttcggatggcccagtttttagaggagcatccaaagattgctcgtgtctactatcctggcttgccaagtcaccctgaacatcacattgccaagagtcaaatgactggctttggcggtgttgttagttttgaggttgctggagactttgatgctacgaggaaattcattgattctgttaaaataccctatcatgcgccttcttttggaggctgtgagagcataattgatcagcctgccatcatgtcctactgggattcaaaggagcagcgggacatctacgggatcaaggacaacctgatcaggttcagcattggtgtggaggatttcgaggatcttaagaacgatctcgtgcaggccctcgagaagatctaagcactctaatcagtttgtattgacaaaatcatgaggtgatggctgtcttggatcttgtcaagatctgtgacaatgatatgagctgatgactgcgaataagttctcttttgcttattttatccgtcaaattcaataagctgtgattgctgcatgatctagtgttgggcttagttacacttgtcaagttaaattggtctggaaccatgtatacttgtagttttgctttagagtggtgacctggctatgtgggatgaggtcacgcttcccttcaattactgtgagattcacacatttaataatcttgataataaaaatgaaaatcctca

SEQ ID NO: 92812 - DNA, 1200 bp, Zea Mays
cccacccggtgtcccttgctccctcttctgtccagtcctctgtcctcaccttatccccaaaaccctatcagcccaaaaccgaacccacacctctgcggctctgcccttcccatggcggccacgctattctccacctccctcttgccccagttcctctccctctccgctaagcccgccgccgccgccccgtccgccgccgccttcccatcggggctgccgcagctccacgcgctgtccgccgcggcggtgggctttaggccgctcgagcccgtgcgagcggccgcgaccgcggccgtgacggaggagctcgaggcggaggggcgttcgggcggggacgagttttcagatgatctcagggtcttcgtcggtaaccttccgttcagcgtcgacagcgcccagctcgcgggacttttcgagcaggccggctccgtcgagatggtcgaggttatctatgacaaattgacgggaagaagccgtggattcgggtttgtgaccatgtcttcggtcgaagaggttgaggtggctgttgaccaatttaatggctatgtgcttgatggaagaagtttgagggtgaactctgggccgccaccacccagagatcggtcatcaccgtcaccgcaaagacccaggggtgatgccaacagggtctacgtgggtaacctttcctggggagttgacaattcagctctcgcaaacctgttcagtgagcaaggtgaggtactggaagcaaggatcatctatgacagggagagtggaaggtcaagggggtttggttttgtcacgtacggttccgccgaagaggttgagaatgcaatatctaatctcgatggcgctgacttggacggcagacagatccgtgttacggtagcagagtcgaagccacctaggcagcaatactgaaattcctcttgagatttttgtaggtgtaccggtagcccaaactctggattatagtgacgccagtcctggatttggtctcgagattcattgaagttaaaaagccctcatgtatatggctcactatttatatacatgtaatattggattcccgtgttcagtgtccttttgtatcaatttggctgcatagtgtcttgtggcacttcaaaggacatagattgttgacgggcaaccaaacctcaagaaagtatcttgtattgtttcttgtctcgtgtggtttgttcactatatttacttttgcaa

SEQ ID NO: 92813 - DNA, 187 bp, Zea Mays
atgtataggtttatgaccaatccagttcaaagcaattggagtacagaagaaataaggagaaacaggaaagctctgtacatcttgtattttgctgtttttttgttgaagtttcaatgtctgtcgtgtgacaaaatatagttgtaatttatattttggcacacacgaaacaggtgtatttattcatttt

SEQ ID NO: 92814 - DNA, 3601 bp, Zea Mays
aaccctcttcgtcgatcggtgtccctagcctccccctgcccggctgtcctcctcgatttcgcaagctcctggttacggcggcatctatcgttccgccgcaagggccgcatcgtctctctcgcgacgctgccccagaccgccgagataatggctggccaccgaaacagtcatggaaagcgccagtctgattttactgaaaatggaggcagtaagagaagaaatcctggcgatgatacatatgcacctggtcctgatgacactgtgtatcgctacctctgtgcctctagaaaaattgggagtatcattggcaggggtggagaaattgcaaagcagttgaggactgagacccaagctaagatcaggattggcgagagtgtccctggatgtgatgagcgagttgttaccatatttagcacaagcaggaaaactaataccatcgatggtgctgaagatgaggtttgccctgctcaggatgccctctttagagttcatgagaggcttgccagtgatgagggtcttgggaacgaagacagcgaagaaatttcacctcaagttactgttcgcttgcttgtgccatcagaccagattggatgcattattggaaaaggtgggcagatcatccaaggaatccgcagtgagactggtgcacaaatacgtgtccttagtaatgatcatatccccgcatgtgccattagtggagacgaacttctccagatatctggggacacggtagttgtcagaaaggctcttcatcaagtgtcatctcgcctccataacaacccatccaagtcacagcatcttcttgcatccagcttgacccaaccttatccagggagcacccaccttggtggttcctctactgcacctgttgtagggatcactccagtaattcctccttatggtggctacaaaggtgatgtagcaggagattggccctctttataccaaccacgaagggatgagagctctgcaaaggagtttagcttgcgtttactttgtgctgctgcaaatgtggggggtgtaattgggaagggtggtggaattatcaaacagattaggcaggagtctggggctttaatcaaagtggctagctccaattcagaccctgatgatgactgcataattacagtttctgcgaaagagttctttgaagatcctgtatctccaacaattgatgctgcagttcgtttgcagcctagatgcagcgagaaaagtgatttagaatcagctgagcagtcatacacaacacgcttgctggtgtcaacatcacgtattgggtgcctaattggcaaaggtggttcaatcattactgagatacggagaacatccagagcaaatgtacgtattctttcaaaagaaaatgttccaaaggtagcagcagaagatgatgagatggttcagatcactggaggccttgatgttgcaagaaatgctcttgtgcaaatagctacaaggctgaaagccaatttctttgaaagagagggctctttatctgcatttccacctgttatcccttaccatcctttgcctgctggtgtttcggatgaaccaaaatatctaggcagagacaccaagcctgttgggcactatctatattcaagtggttttcgtacatcggatgacacgattccttctgacagctatgcaagttatggcggctcccaggcacctggaagaggatatggggcttacagcgggtacagtgctcgctcctctaatagtgggttatctggtcatagttctcttcactatggaaagcgtcatggttattaggatttagattgcttgataaagcagctcagctatctgatggacctgttattttcacctttgccacccctgctcccctcacgtactataaaaacagccaagacattgaagtttggagcctgcttattggagtcccttcccaaaccagatgaccaagagagcccaacctggaagctttgcttaagaggacccgtgtggatgccatagaccaccttatattcctcactacattactttgtcttcctgtgggcctatgtttttagccctgccgcaaatgttctgaacctatgtattgaaaggtcgcatttgagactgcatgtatttgcttgtttgaaacctgattcagtttagtgattttgttgaaacacttgtttcctatatgccacccaaaaagccaggaatatgttactaaaaaaccctagggagctgttacttgcctttccatggaagatgtgggttactttcttctcagtgatgtgtgactgacatcctaaattaaagtaacaccagaaatggcctttttgcatccgacactagatataccaaacttcgctcctccctgccaacatttcactgaattgcacattttgctttattcatctacccctgccatcgaacacactcagtttcacctgcctgcctcaatcttcagggcctgtttggttttagttcagacagctttgcatggctctccttgcaatccaaggctttagattttctgttcctggggtggcaggctttgaaccaaacaggccccaagagcattgttgaactgacgttagctagctgaacacacatctgtacttgttcgattgcaatgctgttgcaacttgctacacatgggcaagtttatgtttaaacattgaagtcatttttttgaacgagaacattaagccaatttgaagtacgttggtgttttaagtataagctttctaacttaatcggttataaatatatactttggtgtgagtagctaatatccgaaactttgggtagctggaactttttttagtcgtattgatttatcacaatgacccaaaaaatgggttagtcatgatcttactgaactctttaacctgatgcatatgttataatgctttattgactaaatgagtattggtgattgaagtcccgataacgtacttgccaacatgctatgatggggaaactatatgccaacggttgaaccatgtgcatgaggctgcagtacgcaaagttttttttgcaggttcactgttcatttcatgtagatttagcaggttgtaagttccactgggcttgattcaagattgattcttcttcatgcccgtgagtcttgttaactaggaatgtgcaggaacatgcaaagggtaaaccatatgcaggtattgtttatggatgagaatggattagcctacggagttgcacaacattgttaaccttcgaaatgttgttagcggaatggttactattcgttcattgaatcttctgccaatctgttttatgtaaatgctgtatcggattttgatgagcaaattctattgcagtgcctggaacgattgtggttttggcatagtaagtttcataagatttgattctgagatgtcctgaacactattctattgcagtgcctggaacagtgctctctctttctgacctaggacaggtagtgttgctgatccgggtagtgtaccgtagcactgcactgtccgtcatccatctatctatcgagtcaaactgcagctgaacctgacctgaacttgtgcagggttcagggtgctccgatgaaagtatcctgaatctttacaggtttcagggcgctctgatgaaaaatatatgcattatcattaac

SEQ ID NO: 92815 - DNA, 2142 bp, Zea Mays
aaccctcttcgtcgatcggtgtccctagcctccccctgcccggctgtcctcctcgatttcgcaagctcctggttacggcggcatctatcgttccgccgcaagggccgcatcgtctctctcgcgacgctgccccagaccgccgagataatggctggccaccgaaacagtcatggaaagcgccagtctgattttactgaaaatggaggcagtaagagaagaaatcctggcgatgatacatatgcacctggtcctgatgacactgtgtatcgctacctctgtgcctctagaaaaattgggagtatcattggcaggggtggagaaattgcaaagcagttgaggactgagacccaagctaagatcaggattggcgagagtgtccctggatgtgatgagcgagttgttaccatatttagcacaagcaggaaaactaataccatcgatggtgctgaagatgaggtttgccctgctcaggatgccctctttagagttcatgagaggcttgccagtgatgagggtcttgggaacgaagacagcgaagaaatttcacctcaagttactgttcgcttgcttgtgccatcagaccagattggatgcattattggaaaaggtgggcagatcatccaaggaatccgcagtgagactggtgcacaaatacgtgtccttagtaatgatcatatccccgcatgtgccattagtggagacgaacttctccagatatctggggacacggtagttgtcagaaaggctcttcatcaagtgtcatctcgcctccataacaacccatccaagtcacagcatcttcttgcatccagcttgacccaaccttatccagggagcacccaccttggtggttcctctactgcacctgttgtagggatcactccagtaattcctccttatggtggctacaaaggtgatgtagcaggagattggccctctttataccaaccacgaagggatgagagctctgcaaaggagtttagcttgcgtttactttgtgctgctgcaaatgtggggggtgtaattgggaagggtggtggaattatcaaacagattaggcaggagtctggggctttaatcaaagtggctagctccaattcagaccctgatgatgactgcataattacagtttctgcgaaagagttctttgaagatcctgtatctccaacaattgatgctgcagttcgtttgcagcctagatgcagcgagaaaagtgatttagaatcagctgagcagtcatacacaacacgcttgctggtgtcaacatcacgtattgggtgcctaattggcaaaggtggttcaatcattactgagatacggagaacatccagagcaaatgtacgtattctttcaaaagaaaatgttccaaaggtagcagcagaagatgatgagatggttcagatcactggaggccttgatgttgcaagaaatgctcttgtgcaaatagctacaaggctgaaagccaatttctttgaaagagagggctctttatctgcatttccacctgttatcccttaccatcctttgcctgctggtgtttcggatgaaccaaaatatctaggcagagacaccaagcctgttgggcactatctatattcaagtggttttcgtacatcggatgacacgattccttctgacagctatgcaagttatggcggctcccaggcacctggaagaggatatggggcttacagcgggtacagtgctcgctcctctaatagtgggttatctggtcatagttctcttcactatggaaagcgtcatggttattaggatttagattgcttgataaagcagccaagacattgaagtttggagcctgcttattggagtcccttcccaaaccagatgaccaagagagcccaacctggaagctttgcttaagaggacccgtgtggatgccatagaccaccttatattcctcactacattactttgtcttcctgtgggcctatgtttttagccctgccgcaaatgttctgaacctatgtattgaaaggtcgcatttgagactgcatgtatttgcttgtttgaaacctgattcagtttagtgattttgttgaaacacttgtttcctatatgccacccaaaaagccaggaatatgttactaaaaaaccctagggagctgttacttgcctttc

SEQ ID NO: 92816 - DNA, 2204 bp, Zea Mays
aaccctcttcgtcgatcggtgtccctagcctccccctgcccggctgtcctcctcgatttcgcaagctcctggttacggcggcatctatcgttccgccgcaagggccgcatcgtctctctcgcgacgctgccccagaccgccgagataatggctggccaccgaaacagtcatggaaagcgccagtctgattttactgaaaatggaggcagtaagagaagaaatcctggcgatgatacatatgcacctggtcctgatgacactgtgtatcgctacctctgtgcctctagaaaaattgggagtatcattggcaggggtggagaaattgcaaagcagttgaggactgagacccaagctaagatcaggattggcgagagtgtccctggatgtgatgagcgagttgttaccatatttagcacaagcaggaaaactaataccatcgatggtgctgaagatgaggtttgccctgctcaggatgccctctttagagttcatgagaggcttgccagtgatgagggtcttgggaacgaagacagcgaagaaatttcacctcaagttactgttcgcttgcttgtgccatcagaccagattggatgcattattggaaaaggtgggcagatcatccaaggaatccgcagtgagactggtgcacaaatacgtgtccttagtaatgatcatatccccgcatgtgccattagtggagacgaacttctccagatatctggggacacggtagttgtcagaaaggctcttcatcaagtgtcatctcgcctccataacaacccatccaagtcacagcatcttcttgcatccagcttgacccaaccttatccagggagcacccaccttggtggttcctctactgcacctgttgtagggatcactccagtaattcctccttatggtggctacaaaggtgatgtagcaggagattggccctctttataccaaccacgaagggatgagagctctgcaaaggagtttagcttgcgtttactttgtgctgctgcaaatgtggggggtgtaattgggaagggtggtggaattatcaaacagattaggcaggagtctggggctttaatcaaagtggctagctccaattcagaccctgatgatgactgcataattacagtttctgcgaaagagttctttgaagatcctgtatctccaacaattgatgctgcagttcgtttgcagcctagatgcagcgagaaaagtgatttagaatcagctgagcagtcatacacaacacgcttgctggtgtcaacatcacgtattgggtgcctaattggcaaaggtggttcaatcattactgagatacggagaacatccagagcaaatgtacgtattctttcaaaagaaaatgttccaaaggtagcagcagaagatgatgagatggttcagatcactggaggccttgatgttgcaagaaatgctcttgtgcaaatagctacaaggctgaaagccaatttctttgaaagagagggctctttatctgcatttccacctgttatcccttaccatcctttgcctgctggtgtttcggatgaaccaaaatatctaggcagagacaccaagcctgttgggcactatctatattcaagtggttttcgtacatcggatgacacgattccttctgacagctatgcaagttatggcggctcccaggcacctggaagaggatatggggcttacagcgggtacagtgctcgctcctctaatagtgggttatctggtcatagttctcttcactatggaaagcgtcatggttattaggatttagattgcttgataaagcagctatctgatggacctgttattttcacctttgccacccctgctcccctcacgtactataaaaacagccaagacattgaagtttggagcctgcttattggagtcccttcccaaaccagatgaccaagagagcccaacctggaagctttgcttaagaggacccgtgtggatgccatagaccaccttatattcctcactacattactttgtcttcctgtgggcctatgtttttagccctgccgcaaatgttctgaacctatgtattgaaaggtcgcatttgagactgcatgtatttgcttgtttgaaacctgattcagtttagtgattttgttgaaacacttgtttcctatatgccacccaaaaagccaggaatatgttactaaaaaaccctagggagctgttacttgcct

SEQ ID NO: 92817 - DNA, 292 bp, Zea Mays
ctcgatatgtcgtgtggattttcaaattgtcgaatcactccccccaatgtatctatttcgatgaagccgaatgtgtcgtgtttcataatgacaaaaatctcgatatgttaagccccaacgaaacagaatcagtggaaaaaaaacaaaacaaagtcaccaaaaccctgttgcccgcccccatatcctctgatgttggcgctattcttcactattggcttcaccaaaatcctcttgccccacctggatcgtgctgttctgcagtcttgtccggcttcaccgaagttcctgcagc

SEQ ID NO: 92818 - DNA, 1512 bp, Zea Mays
ccactttctgagaactaccaatgcctatgcaccaaaagagaaatgaagtcaaagccctaactcaatgtgcttcgcatacagaaaaattagcaggagatttgaatgggttaccggcacgacggtggagagcgccgcgatctccagcagggaagaccccgtcaagttgctgacgaatctgcatcaccaaggcaggaaaaggttaattagagtcgtaagggcaagaaggggagcgactgaaaccacagcctcgattcatgggctagggaccctggacttactgttccttcaaaagcttattcgggttcagggacttatcgaagaggcggtcctccatcgagactcagaggtgcgggagttgaggcgtgagggacgaggagaactgcaggtaaggcgtcacatatgaccgcaggaacggcagccggaggacgacggcgaggtgagtgcttcgctggcagcggcgaaccggcaacctgcgacgacgccttgccagcccagtttggtaaggctcccgctcccgctttcaacaactttcactccggccgctctctagtcagagtcagtggcttctccgtctgctccctcccacatctgggagaaattttccattataaaacacagcagaggtggattcgacgaacgggagggcttcgacaatttggaaaaataaagaaaggccaaactctggaatggaaaagatttctctattacccgctaccgacacagattaatttcctgatgctcacgccgtcagctacctctcctccgtctgagatgtagatgaacagaggtcgccacggttggtgccctcgccgcgttctacgcccttgctgctcgtcctttgcctggtcaacagaggcggtggagagggcgaggccctggggacggtgacggtgttcctggcgctgcaatgcgcggtgcacctggccgccgtggccgttgtcgcgcacgagaagccgttccgctcagcggcgctggccctgcgccacgacgttggagctgtcggacgtgccgacgctggcaccgtcccacccggagtgtatgcacgagcacaagctcttcaccctgcactgcccgtcgtcgtgggcgtccaaggacaataacccgcacacgctgttccgcgccttctgggcgcagttcctactgaacgcgttgctggcgctgctccgactggccgtcatgtacgttggcccgacgctgatccagagcttcgtggacttcacgtcggcgggcgagcagcgactgttcgaggagggcgcgcggctggtggtgacgctgctggcggccaagtgcgcggagacgctgtgcaaccactagtacaacttccacagccatcaactggggacgaagatccggagtgccctcatcgtggcgttgtattcatgtgatgaattagtgtgtggctgtttaactgaaaccatgttgtttatcagaaaccatgttgtttatctgaacacggtttatcagaatgttgtattgattatttgaatacaagttcagaatgctatgttgttt

SEQ ID NO: 92819 - DNA, 532 bp, Zea Mays
caaattggaatgctataactccttttacactgtattcagcctattcataagcattaaagtttcctgactaaaaaattgcttaagcctaaataattgtcattccatgttacgaccacaatattctgctccacgaaccataaaattgcaatagcaacttttaaaaacattctccaagatggcttctgataggattgcggatcctaccggggatgtggcgaagggaatagcgatgaggtgctggagcccgacagcgatcacggcgctggagcgccatggctcggtgtggccggcagaaagcgagagaacaggggcgctacaatactcatgctacagcacccgcgctacagtaccggcgagtactgttcacggttagggctgcaagcgaggggaggaagaagggggtggcggctgcgttgtcgccggcagtgtgcacgacggagggcaccgtggctaatcgagagagagagagagagagagagagagctggtggctagggttcgccctgctccctgagggaagcgggcaatagtaa

SEQ ID NO: 92820 - DNA, 405 bp, Zea Mays
caaagaacagcaggcagcacaagttgcatgtctccagctgagcagcagcgacatggcgagtgcaagaagctggtcgaggctgttcgccgtctcggccttcctttgcctcctggcggtgcaccctgctgccacggtgaggagggaggacatggtcctcggccgtgaccgggcgccggtgccagcggaggcgcccgccacgggcgccgtcggcagcggcaactcgtggacagcgaagccgttcgcgacggccaaggccgtcggcgcggcgcagatgagcaagtggagggtccggcggggctcggaccccatacacaacaggagctgacgtgacgcccttcttcgcttagttgtagcctgtaggaggaggaggataacaggcagaggcaggtggatcaatgtaatgca

SEQ ID NO: 92821 - DNA, 80 bp, Zea Mays
cacacagctaagaacagccgcatcaagacaagcctctcccgtgcatgcgttgctggctgcatctccatccatgcatgacc

SEQ ID NO: 92822 - DNA, 1357 bp, Zea Mays
agacagatagatagagtagtagtaggttgttagctgaggggaggcatcgatggctggagccaagagaggaatcctgctcgtcctgtgcctggccgtcgtcttggtggcgctcgggagtggcggcgtggaggcgaggaagcgagggaagcagtccctggggttctacgagctgcgtcggggcgagttctccatggtcgtcaccaactggggcgccaccatcctctccgtcaggctccccgataagaacgggcacatcgacgacgtcgttcttggctacaagaacatcggatcgtacgtgaacgacacgacctacttcggcgcgctggtggggcgcgtggcgaaccgcatcgccggcgggcggttcaccatcagggaccacgcctaccacacgtatcggaacgacggcaacaacacgctccacggcggccaccgcgggttcaaccaggtgttctggtccgtccgggagcgcgtcacgggggagttcccgcacatcaccttcgcctaccgcagctacgacggcgagcaagggttcccgggcaacctggacgtgctggtcacctacaagatcgacggcgactgctcgtacagcgtcaccatgtacgcgcggccgctggacaagcccacccccgtgaacctggcgcagcacacgtactggaacctccgcggccacggcaacggcaccgtcctgcgccacgccgtccagatcttcgcgtccgcggtcacgcccgtgggccgcggcctcatcccgacgggcgcggtcacccccgtcgccggcactcccttcgacttccgcgccccggcggcgcccggcgcgcacatcgccgaggtcgagggtgggtacgacatcaactacgtgctggacggcgagacggacgggcaaggcgtgcgcaaggtggccgtggtcagcgaggcggactccgggcgcgtcatggagctgtgggccgaccagccgggcctgcagttctacactggcaacatgcttaagggcgacgagggcaagggcggcgccgtctaccccaaatacgctgggatgtgcctggagacgcaagactacccggacgccgtgcacgagccggccttcccggccgaggtgtaccgccctggccaactctacaagcactacatgctctacaagttctcaatcagcaagtaggaacttctagtacctctcgtgcctgatgcctcatagtttcggtaggtttgcaacctgttgcgactagtaataagggttctgagtctttttttttagaaaaaattgcaacagaaatgtatggttcgagttcgtccaaactttgtctagtcaacattttctgccatttgaatgccatcttaatagtctaataccacttgtccactt

SEQ ID NO: 92823 - DNA, 1993 bp, Zea Mays
agacggatcgagactacgacgccgatcctagctagctctcccgtttctgctcgcaagtcacacacagctccggtagatccgcccctcgcctctgggctccaggaagagattagcttcagacggcagggatcgatactagcaagcaagcatggcgcacgacttgtgcgaggacttggagctcgtcgccgacgacggcggcttcgatgactactactgggacgacgacttccatttccacgacgacgacggcttctccgcctcccctacgacccccgccagcgttggtgcgccccgccagcagcagcagcagcagcagatgggtgatatttcagcctcggactacaaagaaggcgaagacatgcaggggataccctgggaaaggctcaactacaccagggaccagtatcgtcggatgaggctcaaagagtacaagagctaccagaacctcacgaggtcgcacagcggcctacaacaacaggtggagaggaaggacacattctacgatttccatctgaacacgagagccgtcaagtcaacgatagtgcatttccaggtcaacaacaagcagtggcaggacgtttgggtgtgcgctatctgcagttagtcttgagtgatactagctgcaatttaatcagatcgatcaggtggatgggcatcctcagcagccgggaggagtgactccagcagggggttggaaagcttgcaatatgctgaggaacctcctgtggcctacatcgaagcacgacgtgtacctggtgcagagctactccgtgacgcactggtctgccctgctccggagaggaagagaggttctcaacgtggccggccggttggctccgacccagaacgtgaagggggctggaccgttgtcgagggttcagatcagcgccatggctgtgaaggacaacctcatggtggccggtggcttccagggagaactcatatgcaagtacgttgatagacccggggtggcattctgcaccagcctgaccggtggcagcagttccatcacgaacgccgtcgacatccaccaggcacccagcggcgccacgcgagtgatggcggcgaacaacgactgcgtcgtcaggacgttcgacgccgagagatacagccttctcacgcagctcaccttcccgtggtccgtcaacagcacgtcggtgagccccgacggcaagctgctggcggtcctgggcgacagcacggagtgcgtggtcgccgacccgcagtcgggcaaggcggtggcgacgctgcgcgggcacctggactactccttcgcgtcggcgtggcaccccgacggccgcgtcctggcgacggggaaccaggacgcgacgtgccggctgtgggacgcgcgcagcctgtcggagccgttcgccgtgctcggggcccggatcggcgccgtccggggcctccgcttctcccccgacggcaggttcctggccgcggccgaggccgccgacttcgtgcacgtgtacgacgccgcggccgggtacgccggcgccgcgcaggaggtggacgtgttcggggaggtcgccggcgccgcgttcagccccgacggcgaggcgctgttcgtgagcgtcgccgaccgcacctacggcggcctgctcgagttccgacgccggcgggcggaccgctacctcgacgcgtgtttcttctgagggagaggcgcgcgcgcgcgccgtctgttgtgtactgtgcatgtgcctgccggcgggcggcacgtatacatgtggtgtgttgtgtagtgtaaaacgcagagttttggtgcgtatcggacagcgtaccggctggagacaacctggccagggtgctttcaggagctagtatcgctttcttgtttgttttggacttcgggggaaaaacacttcagaatggtgcactcgggttgcctttaggtactacaagcttgctatagagatgctgtgtatcaattcgttaatgtaagaactgtaaaatacttctaatacttcttctgtcctaaattatattttatctc

SEQ ID NO: 92824 - DNA, 1683 bp, Zea Mays
gaggcaagacggatcgagactacgacgccgatcctagctagctctcccgtttctgctcgcaagtcacacacagctccggtagatccgcccctcgcctctgggctccaggaagagattagcttcagacggcagggatcgatactagcaagcaagcatggcgcacgacttgtgcgaggacttggagctcgtcgccgacgacggcggcttcgatgactactactgggacgacgacttccatttccacgacgacgacggcttctccgcctcccctacgacccccgccagcgttggtgcgccccgccagcagcagcagcagcagcagatgggtgatatttcagcctcggactacaaagaaggcgaagacatgcaggggataccctgggaaaggctcaactacaccagggaccagtatcgtcggatgaggctcaaagagtacaagagctaccagaacctcacgaggtcgcacagcggcctacaacaacaggaacgcaaacaggtggagaggaaggacacattctacgatttccatctgaacacgagagccgtcaagtcaacgatagtgcatttccagctgaggaacctcctgtggcctacatcgaagcacgacgtgtacctggtgcagagctactccgtgacgcactggtctgccctgctccggagaggaagagaggttctcaacgtggccggccggttggctccgacccagaacgtgaagggggctggaccgttgtcgagggttcagatcagcgccatggctgtgaaggacaacctcatggtggccggtggcttccagggagaactcatatgcaagtacgttgatagacccggggtggcattctgcaccagcctgaccggtggcagcagttccatcacgaacgccgtcgacatccaccaggcacccagcggcgccacgcgagtgatggcggcgaacaacgactgcgtcgtcaggacgttcgacgccgagagatacagccttctcacgcagctcaccttcccgtggtccgtcaacagcacgtcggtgagccccgacggcaagctgctggcggtcctgggcgacagcacggagtgcgtggtcgccgacccgcagtcgggcaaggcggtggcgacgctgcgcgggcacctggactactccttcgcgtcggcgtggcaccccgacggccgcgtcctggcgacggggaaccaggacgcgacgtgccggctgtgggacgcgcgcagcctgtcggagccgttcgccgtgctcggggcccggatcggcgccgtccggggcctccgcttctcccccgacggcaggttcctggccgcggccgaggccgccgacttcgtgcacgtgtacgacgccgcggccgggtacgccggcgccgcgcaggaggtggacgtgttcggggaggtcgccggcgccgcgttcagccccgacggcgaggcgctgttcgtgagcgtcgccgaccgcacctacggcggcctgctcgagttccgacgccggcgggcggaccgctacctcgacgcgtgtttcttctgagggagaggcgcgcgcgcgcgccgtctgttgtgtactgtgcatgtgcctgccggcgggcggcacgtatacatgtggtgtgttgtgtagtgtaaaacgcagagttttggtgcgtatcggacagcgtaccggctggagacaacctggccagggtgctttcaggagctagt

SEQ ID NO: 92825 - DNA, 1671 bp, Zea Mays
gaggcaagacggatcgagactacgacgccgatcctagctagctctcccgtttctgctcgcaagtcacacacagctccggtagatccgcccctcgcctctgggctccaggaagagattagcttcagacggcagggatcgatactagcaagcaagcatggcgcacgacttgtgcgaggacttggagctcgtcgccgacgacggcggcttcgatgactactactgggacgacgacttccatttccacgacgacgacggcttctccgcctcccctacgacccccgccagcgttggtgcgccccgccagcagcagcagcagcagcagatgggtgatatttcagcctcggactacaaagaaggcgaagacatgcaggggataccctgggaaaggctcaactacaccagggaccagtatcgtcggatgaggctcaaagagtacaagagctaccagaacctcacgaggtcgcacagcggcctacaacaacaggtggagaggaaggacacattctacgatttccatctgaacacgagagccgtcaagtcaacgatagtgcatttccagctgaggaacctcctgtggcctacatcgaagcacgacgtgtacctggtgcagagctactccgtgacgcactggtctgccctgctccggagaggaagagaggttctcaacgtggccggccggttggctccgacccagaacgtgaagggggctggaccgttgtcgagggttcagatcagcgccatggctgtgaaggacaacctcatggtggccggtggcttccagggagaactcatatgcaagtacgttgatagacccggggtggcattctgcaccagcctgaccggtggcagcagttccatcacgaacgccgtcgacatccaccaggcacccagcggcgccacgcgagtgatggcggcgaacaacgactgcgtcgtcaggacgttcgacgccgagagatacagccttctcacgcagctcaccttcccgtggtccgtcaacagcacgtcggtgagccccgacggcaagctgctggcggtcctgggcgacagcacggagtgcgtggtcgccgacccgcagtcgggcaaggcggtggcgacgctgcgcgggcacctggactactccttcgcgtcggcgtggcaccccgacggccgcgtcctggcgacggggaaccaggacgcgacgtgccggctgtgggacgcgcgcagcctgtcggagccgttcgccgtgctcggggcccggatcggcgccgtccggggcctccgcttctcccccgacggcaggttcctggccgcggccgaggccgccgacttcgtgcacgtgtacgacgccgcggccgggtacgccggcgccgcgcaggaggtggacgtgttcggggaggtcgccggcgccgcgttcagccccgacggcgaggcgctgttcgtgagcgtcgccgaccgcacctacggcggcctgctcgagttccgacgccggcgggcggaccgctacctcgacgcgtgtttcttctgagggagaggcgcgcgcgcgcgccgtctgttgtgtactgtgcatgtgcctgccggcgggcggcacgtatacatgtggtgtgttgtgtagtgtaaaacgcagagttttggtgcgtatcggacagcgtaccggctggagacaacctggccagggtgctttcaggagctagt

SEQ ID NO: 92826 - DNA, 813 bp, Zea Mays
gatcgagactacgacgccgatcctagctagctctcccgtttctgctcgcaagtcacacacagctccggtagatccgcccctcgcctctgggctccaggaagagattagcttcagacggcagggatcgatactagcaagcaagcatggcgcacgacttgtgcgaggacttggagctcgtcgccgacgacggcggcttcgatgactactactgggacgacgacttccatttccacgacgacgacggcttctccgcctcccctacgacccccgccagcgttggtgcgccccgccagcagcagcagcagcagcagatgggtgatatttcagcctcggactacaaagaaggcgaagacatgcaggggataccctgggaaaggctcaactacaccagggaccagtatcgtcggatgaggctcaaagagtacaagagctaccagaacctcacgaggtcgcacagcggcctacaacaacaggtcaacaacaagcagtggcaggacgtttgggtgtgcgctatctgcagttagtcttgagtgatactagctgcaatttaatcagatcgatcaggtggatgggcatcctcagcagccgggaggagtgactccagcagggggttggaaagcttgcaatatggtatggcaggacgtttcgagatggacgaatctgttgaaacgggtcaccttgagttcctcattttttttgcaggttcatttgctgcatgttcatttgtggcacgccttttcgtgttaatggaaattgtgctcaaaccaatgctgtccgttgaaagttttttatggggtttatattatcgtccaa

SEQ ID NO: 92827 - DNA, 867 bp, Zea Mays
gaggcaagacggatcgagactacgacgccgatcctagctagctctcccgtttctgctcgcaagtcacacacagctccggtagatccgcccctcgcctctgggctccaggaagagattagcttcagacggcagggatcgatactagcaagcaagcatggcgcacgacttgtgcgaggacttggagctcgtcgccgacgacggcggcttcgatgactactactgggacgacgacttccatttccacgacgacgacggcttctccgcctcccctacgacccccgccagcgttggtgcgccccgccagcagcagcagcagcagcagatgggtgatatttcagcctcggactacaaagaaggcgaagacatgcaggggataccctgggaaaggctcaactacaccagggaccagtatcgtcggatgaggctcaaagagtacaagagctaccagaacctcacgaggtcgcacagcggcctacaacaacaggaacgcaaacaggtggagaggaaggacacattctacgatttccatctgaacacgagagccgtcaagtcaacgatagtgcatttccaggtcaacaacaagcagtggcaggacgtttgggtgtgcgctatctgcagttagtcttgagtgatactagctgcaatttaatcagatcgatcaggtggatgggcatcctcagcagccgggaggagtgactccagcagggggttggaaagcttgcaatatggtatggcaggacgtttcgagatggacgaatctgttgaaacgggtcaccttgagttcctcattttttttgcaggttcatttgctgcatgttcatttgtggcacgccttttcgtgttaatggaaattgtgctcaaaccaat

SEQ ID NO: 92828 - DNA, 1213 bp, Zea Mays
atgattccagttcatgccaacctcgccgccgtggaccgttgccatctgtgcatctggattccataaaggcacgcgtgccctgacctctccacaccccgcgtcccaccaacttccattccctaccgcccgcccaccccactccactccgctcctcccactcgagccatcatggccctcgcctcccgcgccgccgcagccgccgtggcgtgcgtcctcctggcgctcgccgcctccgccgcgggggcgggctccaactcccctgcaccggcgccggcggtggactgtatctcccaggccgccagcctgatcgactgcatcgactacgtccagaaggggagcagcgcgcgccgtccgtccgctgcctgctgcggcgaggtcaagaccgcagtggccagccccgtcatcgtgggctgcctctgctccctcgccggctccaactccagtaacctgggctttcccatcgacatgaagcgcgtgctggcgctccccggcgcgtgcggcgcgtccaacgccgccttcagcaagtgcaacatttccgcgcttcccccaaccgaagcacctgcaccgtccgccgccggggggtcatcgagcggtggcgcggcggcatcttcaccgcgcgccgcggcggcgagctctcctccgatgacggcgaccgccctgttggctgccgtggcggctcccctgctcgcctactactgctgctacctcttctgagggtttccttctgctgctgctgccgtctaggctgagtgacctatttctatgtatgtgacgattcaagttaacttgtggagcgcggctgcgcgtgcgtttgtgcttgtgcagtcgccactgttgctgtgttcttgcgatactcttgtcacttgagaggtggtgttgtatggactggtttagctggctcccccgtgcttccatcgacccgcttcgcgcttcatgtttactacttgcgatactgttgttacttgtgattgatgatgataaaagccacggcctgtgttactactgctgtaacaagtccgacagaagaaccatccaatgcaggcccacgaaggggatccaggctgcgccggcctagtactcggcttagggagtttgtgtgagttgtaattgagatataagggaatattgattagggaaaaggcatcagacttgtaataagaattctggacagactgtcgctctgcctatctactctgccatctgctcttcttcc

SEQ ID NO: 92829 - DNA, 1963 bp, Zea Mays
ggcccagctcatctcggcgcctatataaacacaaacacccggctctagcataacataagcatgcaagtaatatatcacgcattcagctcctctgcttacggtgccagaccgaccgagcaagatccattgatcgatatggagctgcttcctctgctcacgtggctcctccttgcgcacgccatggcctacctggcctggatggccgccgcgcgccgccggcagtcgcggtgctacctcctggactacgtgtgccacaagccccgcgaagaccgcaagctgtccacggaggcggccggcgccgtgatccagcgcaacgcgcggctggggctgacagactaccgcttcctcctccgcgtcatcgtccgctccggcatcggcgaggagacctacgccccgcgcaacatcctggagggccgcgaggactcgcccacgttgcgggacgcggtggacgagatggacgccttcttcgacgaggccatcgccgagctcttcgcccggaccgacgtcgcgccccgcgacgttgacgtgctcgtcttcaacgtctccatgctctccccggcgccgtccctgtcgtccaggatcgcgcgccgctacggcctgcgcgaggacgtggcggcgtacaacctcacggggatggggtgcagcgcggggctgatcgcgctggacctggcccggaacgcgctgcggacgcgcccccgcgcgctggcgctcgtggtgtcgtccgagtccatcgcgcccaactggtactccggcaccgacaagtccatgatgctggccaactgcctgttccgcagcggcggctccgcggtgctggtcactaacgacccggcccgccgcgggcgcgccaagatggagctcagctgcctcgtgcgcgccaacatcggcgccagcgacgacgcgcacacgtgcgcgcagcagcgcgaggacgccgagggccgcgtcgggatcagcctcagcaaggcgctccccaaggccgccgtgcgcgccttcgccgtcaacttgcgccgcctcgcgccgcgcgtgctccccgtcgccgagctcgcgcggttcgccgcgcgcctcctcgcccggaggctcttcccgcacctgcagcagcactcgtcgtccggcaagcacaagggcgacactgcggccccgcccaagatcaacttcaaggccggggtggaccacttctgcctccaccccggcggcacggccgtcatcgaggcggtgaagcagagcctgggcctggaggacgaggacgtggaggcggcgcggatgacgctgcaccggtggggtaacacgtcggcgagcagcctgtggtacgtgctgtcgtacatggaggccaagcgccggctcaaggtcggggacagggtgctcatggtcacgttcgggtccgggttcaagtgcaacagctgcgtctgggaggtcaccggcgacatggccgacgacaggggagcatgggccgactgcatccacgcctatccgccggagaggctcgccaacccctacatggacaagttcggatggatcaacaacgtcgacggcgacaccctcatgttctaacggtacagtacgctcacgatcgagcactatttcgtacagtcgtacaagtgatggtacatatacatgctactgcatggcggaaccggtcaaccggacatgacgacaacggaagcagcaggttgttcagaacgacagacaggtgatgcatacgtgttagctaatgcgtactgtacgtacgtgtatctatttaccccccgaacaatcgaacatattctttcttttgattattttctaccgcaaatgaaaaatatagttttactttttttctagaacagaggaaccatgtattttatattgtctttgaccttatcttgtctgcctgttaaatgatgttgacatgttgtccctgtccattcataaatgtttgcaaaaaaatcaagtgtaatcccccctaactttaaggaagatgatattatca

SEQ ID NO: 92830 - DNA, 840 bp, Zea Mays
catgcgggaatgcctgtggtggtctatggaagctgcatataattagcacaaaaaaatcccaggtggcgctaaagcaccctataattagcacaaaaaaatcccattttgcgagacaattttataagaaaaatgcctttatgtgtgtacagggctactgtaggctacactaatgcatctagaattctagatccacggtgcaactttcctaaacctctttcagttggtgtactcctcctccgaacattctgcagagatactatagcagtacgccgcctttaccttttcatactactacagaatacagtatgcaggtagtaagtagtacggcgctggcgggagtgcggcggccggcaggaagaggaagggcgcggcagtggtccgacctgcgtccgcgaacctctgcagcaaagaagaaaatggcagaagccaagccaacctctgcagttggctcatctcgttctcgcatggcgccgctactacaataggaaaatggcagagcagcaacgcaaagaagaagaggcggcaagccggccaagtagtagctaccgaaacccccagaaccagattcaggcgacatcattcatggcgagggcgagcgggagcgggaggggaacgaatcgaagcgacaaggagaggagacgagcgcgaggcggtgtgaccttgagaggcacgaatacgatggggcgctccccggcgccgcgcgccaccccgatcagcctgacgccgcccgcggcctcggaggcgggacgcggaggagccgccacgacgcgccggcggatcttagagtaggccagcacgccgccgcggatcttggagtagataggtagtgtctagtgtctg

SEQ ID NO: 92831 - DNA, 105 bp, Zea Mays
gcttcaaatgaaagaaataatttgaatatattaatagtgtctatatattacatcacactttgcaaatttgtaagtcagaattcctttgatctatatagttaaata

SEQ ID NO: 92832 - DNA, 275 bp, Zea Mays
aaaagtttagtgtctgtagttccatactttgagactgttgtttatcagctggttccatacagaaacctaaaattcggaaaaccaaacacaaaatcttaccataggttattgctatcccatttaaataaaatcacgtatatgatatatagaatatgtggtgacgcacgggggcctaattaggatttaacagaacacagttaggttttaataaaacagaacatcatttctgccaacatgttcagaaattgcatacctcactgaagaagatcaagtaa

SEQ ID NO: 92833 - DNA, 230 bp, Zea Mays
tatatcatcattcatgggtggcaacatctagagggattcataatctctctcaaaccagagaccctagcaaaggtaaaaatagaaaagatgaaccaatgcaatccttctccaatgaaggatttagactcgtttttatatttttattatatagttgaaaaaataaaagttgatccaatgcaattcacatgtatgatcatctacaagtcaatgcactcataagccatccacta

SEQ ID NO: 92834 - DNA, 111 bp, Zea Mays
gggttgcagagccggtcgatttatcctgtgcgtaatcagtggcggtcggctttgagttatcgtcggtttcatattctgaatttaagaaactttataaagttaacatttcgg

SEQ ID NO: 92835 - DNA, 788 bp, Zea Mays
cgtccaagctgtgaagtatcgaagctttgtccccaaggtttactgattttgtttctctcatcctttgcatcatttggaataggttttagggttcttgttcattcaaattagggtttagttcttcaaaaaaatggtaacttagttgtccacctgagtaacaactagttttatttgtacaggataatgttgatttgaagtatcacgttagcgtcaagaactcactgcgatatgccattcaagagatgaggaggcaatcttcattgttacataacatgaataggatgtgttctaatatcccagaagttgaagggggtaaggttgggaagcttgctggccatttgaaggaggtttgcaagaacctcgagaagacttgtattatctgtgaagaagatctggagaataaatctcctggttgggaccttgatcatcccccttcggattttgaagaccctgacctttgtgatggtgaggaccaagtggatggatatgtgtcagaagatccggagctgtgggaaatggtgtttgaagacatgaagtgggaggagaataaagtggttgtttctttgtatgagcattgtcgtattatgggctacgactatgaccagatctttgatcgtactatttaagttgccaagactactaggtttaagggttgtcttttgtggtcattagttgaacttgtgatgtcaagactatgtactggtaacatccatctctgtgatgtggttgtgtaattgtgtttatgtaagacaatctatgtattgaagactatctatgcagtcagtgtg

SEQ ID NO: 92836 - DNA, 1170 bp, Zea Mays
atgtctaaactcggcttaacgcgtatcgggtgcccattggccactggcccctagccctcgccctcccttttctattgctccgaagcccgagttgcgagctgtctcctccactcttctccttcactgtcgcagccgccccttgtagaagcttcgaggctgctgctgctgcgcccatggccgcggaaggcaagacgccgtccctcgccgaggagtattcacttccaccacaggaagttccagtggaaaaggcagctgaggagaagccctctagtggtactgagtctgaagctgctccctcaaccaatgatgaaactcctccatctgtagaagacaagaatggaacttctgaagtacaagatgctgctgaaaatccagaggcagaagaaactaacactgctgcagaggaaacacctgctgtagaggaagcaagtgagactaccgaggaggaagaggctgagaaacctgagatcaagatcgaaacagctccagcagattttcgtttcccaacaacaaaccaaacaaggcattgtttcacacgctatgttgaatatcacaggtgtgtggctgcaaaaggtgaggatgcacctgagtgtgataagttcgccaagtactatcgatccctgtgcccaggtgaatgggttgatcgctggaacgagcaacgcgaaaacggcaccttccctggacctctgtaatcctacaatgcaaaagaagtatgaactcacgatgttgtgccggcttctcttccttggtaactggcgccaagttaccttttttggagctctctacagaataagaaatcccttttggcttgaagaatgccctgttgctcttcctaacggtcatgttgtgcgctgctgagaaactagcgtcacagttaacaattttctttatacagttcagaaaatgattcgtgattccccatatttgcactgtgacgcaactcgattaggcttacgatgcaaatttgatgcactgggatcttcaaagtagtgagcgccttccgtggcgatatacatggatgatactcctcttaagggctctttggtttggtgacaatgaattgaaggaggggattaagaggaaggactagtttggaagctacaaaactggaggggattggagataagggatttggaggggatccgtgagagaagggattttgggcgccac

SEQ ID NO: 92837 - DNA, 1012 bp, Zea Mays
atgtctaaactcggcttaacgcgtatcgggtgcccattggccactggcccctagccctcgccctcccttttctattgctccgaagcccgagttgcgagctgtctcctccactcttctccttcactgtcgcagccgccccttgtagaagcttcgaggctgctgctgctgcgcccatggccgcggaaggcaagacgccgtccctcgccgaggagtattcacttccaccacaggaagttccagtggaaaaggcagctgaggagaagccctctagtggtactgagtctgaagctgctccctcaaccaatgatgaaactcctccatctgtagaagacaagaatggaacttctgaagtacaagatgctgctgaaaatccagaggcagaagaaactaacactgctgcagaggaaacacctgctgtagaggaagcaagtgagactaccgaggaggaagaggctgagaaacctgagatcaagatcgaaacagctccagcagattttcgtttcccaacaacaaaccaaacaaggcattgtttcacacgctatgttgaatatcacaggtgtgtggctgcaaaaggtgaggatgcacctgagtgtgataagttcgccaagtactatcgatccctgtgcccaggttgatcgctggaacgagcaacgcgaaaacggcaccttccctggacctctgtaatcctacaatgcaaaagaagtatgaactcacgatgttgtgccggcttctcttccttggtaactggcgccaagttaccttttttggagctctctacagaataagaaatcccttttggcttgaagaatgccctgttgctcttcctaacggtcatgttgtgcgctgctgagaaactagcgtcacagttaacaattttctttatacagttcagaaaatgattcgtgattccccatatttgcactgtgacgcaactcgattaggcttacgatgcaaatttgatgcactgggatcttcaaagtagtgagcgccttccgtggcgatatacatggat

SEQ ID NO: 92838 - DNA, 2942 bp, Zea Mays
cagtgtcatgtacatactttgtaatgaagaacctctctggatgagcaaatgtctttcaatcgggggtcctcttgaatacaaagtttcctggaagaagacggcactatgtaggcttggtctatgttcagaaaataaggagatttggcagaagcctcgtcagttcgatggctttaattctttgtatctataccggagatggtatagatgttttactactttgaatagtttttcgtttgacgatggacatgtggaaaggaaagatgactttttattggatcagtttcgttctcagtatgatggaaaatgcccagttttggttacgaagttggccgaaacctggcctgcgaggacaaaatggacactgcagcaactgacaaaggattttggggaagttccattcaggatatcacaaagaagccctcagaagataacaatgaaactaaaggattatgtttcttacatggaactccagcatgatgaagatcctctatacatatttgatgataagtttggagaatcagcaccaacattacttgaagattatagtgtccctcatttattccaagaagacttttttgatatcttggattatgaccaacgaccagcattcagatggcttattattggaccagagagatcaggtgcttcttggcatgttgatcctggactgacaagtgcatggaatactcttctttgtggccgaaaaagatgggcattgtaccctccaggaagagtgcctggtggtgtcacagtacatgtaaatgatgaagacggtgatgttgacattgaaactccgacatcattgcaatggtggcttgatatatatccacaccttcctgaacatgagaagccattggaatgcacacaattgccaggagagaccatttttgttcctagtgggtggtggcattgcgttctgaatctcgagacaacaattgcagttacacagaactttgtaaaccagtctaattttcagcatgtatgtttggatatggcacctggtcacagacacaaaggagtttgccgtgctggcttacttgctgttccaggaaaattcgttaaagataataaaaaccatcaatctgtcacaatgagtggatggaaccaccctgatatgagtcgtaaggaaaaaaggcttaaaggttctgaagcactaagaatctcaaatagcataaatcattgttctgcatttgagttctcaggtgttcaagagagtttggagaatcaagatttctcatatgatattgattttttgtcacaattcattgagaaagaaagggaccattattcttctctctggagtccaactaattcaattgggcagagagaagcaagagaatggctgcgaaggctttgggttctgaaacctgatctgagagaactaatatggaagggtgcatgccttgcaataaatgttgacaaatggtattcatgcttagaggagatatgtgcatgccatagtttaccaccacctacagaggatgagaagcttcctgttggcactggtagcaacccagtcttcattgtctcgggcaatgtgattaaaatatatgctgaaggaggattggtttattctgtccatggtttgggcacagagcttgagttctatgatctcctgcaaaaaagtggttcacctttgatcaatcacattcctgagataattgctagtggcttccttgagtataaggatgatatctacagcacggttccgtggaatggaaaaggaataccagaaattttggttaagtactactcattggaggtttcttgtgcgaacagctgctttcctcttgggctttggagcaagcaacgatttgggatgtgtagttcggctgatgtttcagacagaccaatttggccttacatggtaacaagaaagtgcaaaggagatatttttgctcgcatccgcgatatgctgtcgaagactgatattcttcatcttgcatcatccttgggagttcaaatgcgaaacatacatttattacccctgccacccgtggagcatgtacctgaatctgggaacaatgatgtgaaagaagtggtaggaacatgtgatgataccacggttctacctgaatggcagcaacttgtctctactctaaataggaggaagcagaatgtaaaaaagcacctagctaactggggggactctgttccacaagttctagtagaaaaggctgaagaatatctccctccgaatatgggcttcctcatcaagtttgttaaggatgatggtgagttgctgtacccatgcccctcttggatacattcagatataatggacgataacattcttatcgaggggatcataaaactgagttcttctggtgagagggaaagagtttatgactcagatcgggacaaaataaatgcaattcacatcattgatttcagtgatctgtccattggggatcctatatgtgacataattccgctgcacttggatattttccggggtgatagtgaccttctcaaggaatttctacggagctatcaacttccccttctgaggggggaatcaaccaccgatgtctacagatcagtgcgaaactcgaagttcagcagggcatcatatcgcgcgatgtgctactgtatattacacgaggacaacgtcttgggagctatattcagcctgtggaaggagatgagggctgcaacgtcctgggaggacgttgagaacctggtctggggagagctgaaccggtaccaggactctgcagttcgctcagcataactaaacaccagcaaaaaaaaaaaaaactttctgaacatacgtgtatgttgttgttcctccgacgaatgtaacttccaaatataaaaaaaaagtgtagggaaaataacgaaggctcgacacggcatgcccgtattttcctatggctggtgataatattgagatccctgaaatggttctatgaaatgaaccgcagaccgttgaaatcgtt

SEQ ID NO: 92839 - DNA, 2474 bp, Zea Mays
ctgcaacggcagccatctcagagaagaaccatcaccactcaccactctcctgcttcgccgtcaccagcggagagaattggctatttatagaacgtttgaaatggtaaataggcgcttcatccaaccacccggcggctcgtctctcgtctcgctctcaccaactccggctccaggcgcctataagtaccctcgcccccgctctcgttcgtcccaggacaaacaccgcgcacgcaccgccttctccactacttacccgaatcctaacgctattccactgcattctgctccgaaatggccctcgccaccaacgccgccgccgcagccgccatctccggagggtccgcctcacagccccgccgcgcgtcgccgtcgctgctcctgctcaggcgccgctgcgccgtcggcgccgtacacgccgcggagccgtcgaagaaccccggcgtcgtcccggccgccgcgaaggcctcgacgccgacggtcgtgcccgagaacgacaccgtcccggccccgtcccttggcccgaacgcgtcgttgcgcgcgaggtgggcggtggacagctggaggacgaagaaggccctgcagcagccagaatacccgaaccagacagagctcgaggaggcggtcaacacgatcgagaagtctccgccgatcgtctttgccggggaggcgcgtcacctggaggagcgcctcgccgacgccgccgtcggccgcgcattcctcctccagggcggcgactgcgccgaaagttttaaagagttcaccagtgctaatatccgcgacaccttccgcgtcatcctgcagatggccgtcgtgctgacgttcggcggccaaatgcccgttgtcaaggtaacctacctacccatctacgccgcacgccacacaaaaccacgtgaatcgaaattccctttgccttggaaggaactgggcggatggcttttatgtgttcgactgttcgtgcgccctaggtcggtaggatggccggccaattcgcgaagccgaggtcggacgcgttcgaggagaggggcggcgtgaagctgcccagctaccggggcgacatcatcaacggcgaggctttcgacgagaagagccgcgtccccgacccacagaggatgctcaaggcgtactaccaatccgcttccaagctcaacctgctccgcgccttcgccaccggtggctacgcggacatccaacgcgtgacacagtggaaccttgacttcactaaacacagcgagcagggcgacaggtgaaataaaatcttgcacgcactcactcactgattgcagttatattatatgtcatgggtgactgagtttcattattcagttatgttatatgtcccaaaatttcatcctttttttatgacatgcatgactgagtttgtaggtaccgtgaattggcacatcgggttgatgatgcccttggattcatgggtgcagctgggctaacagtggaccagcctttgacgacgatgatcgagttctggacctcacatgagtgcctcctcctaccttacgagcaagccttaacccggcaagactccaccaccggtcttttctacgactgctccgcccacatgctctgggtcggcgagcgcacccggcagcttgatggcgcccatgtggagttcctgagggggatcgccaacccccttggcatcaaggtgagcgacaagatggagcccggcgagctggtgaagctgatcgacatactgaacccgacgaacaagcccgggaggatcaccgtcatcacaaggatgggggcagagaacatcagggtcaagttacctcaccttatccgcgcggtccgccaggctggacagagtgtcacctggatcactgacccgatgcacgggaacaccatcaagactccttgcggacgaaagactcggccatttgactccattctggccgaggtacgggccttcttcgatgtgcacgaccaagagggaagccagcctggaggtgtccaccttgagatgaccggtcagaacgtgaccgaatgcacgggcgggtcaagcaacgtcaccttcgacaacctgagagaccgctaccacacgcaatgcgaccccaggctgaacgcgtcccagtccctggagctcgccttcatactcgccgagaagcttaggaagcggaggatgcggcggtcgtcggtggcgtctgggctcggcggcagcatcttgcccttgccgccctttggcttttgatgtcttgcacgctggctgtgtgcatgcagggtgcagtgcaggggtgtggtaggagaatcttacgttgtcgtttgccttgctatgtagtatgtaatgctttaatttactgcattctacgtcgttttttcccttcttcttctatttgtttctttttgtacgtagctgcagctcataagagattgaataatactattgctgccacatatatagacggagttggctttgtgaattaataaagtccattgctgctgtcgtcaactgtttccttcaa

SEQ ID NO: 92840 - DNA, 2175 bp, Zea Mays
ctgcaacggcagccatctcagagaagaaccatcaccactcaccactctcctgcttcgccgtcaccagcggagagaattggctatttatagaacgtttgaaatggtaaataggcgcttcatccaaccacccggcggctcgtctctcgtctcgctctcaccaactccggctccaggcgcctataagtaccctcgcccccgctctcgttcgtcccaggacaaacaccgcgcacgcaccgccttctccactacttacccgaatcctaacgctattccactgcattctgctccgaaatggccctcgccaccaacgccgccgccgcagccgccatctccggagggtccgcctcacagccccgccgcgcgtcgccgtcgctgctcctgctcaggcgccgctgcgccgtcggcgccgtacacgccgcggagccgtcgaagaaccccggcgtcgtcccggccgccgcgaaggcctcgacgccgacggtcgtgcccgagaacgacaccgtcccggccccgtcccttggcccgaacgcgtcgttgcgcgcgaggtgggcggtggacagctggaggacgaagaaggccctgcagcagccagaatacccgaaccagacagagctcgaggaggcggtcaacacgatcgagaagtctccgccgatcgtctttgccggggaggcgcgtcacctggaggagcgcctcgccgacgccgccgtcggccgcgcattcctcctccagggcggcgactgcgccgaaagttttaaagagttcaccagtgctaatatccgcgacaccttccgcgtcatcctgcagatggccgtcgtgctgacgttcggcggccaaatgcccgttgtcaaggtcggtaggatggccggccaattcgcgaagccgaggtcggacgcgttcgaggagaggggcggcgtgaagctgcccagctaccggggcgacatcatcaacggcgaggctttcgacgagaagagccgcgtccccgacccacagaggatgctcaaggcgtactaccaatccgcttccaagctcaacctgctccgcgccttcgccaccggtggctacgcggacatccaacgcgtgacacagtggaaccttgacttcactaaacacagcgagcagggcgacaggtaccgtgaattggcacatcgggttgatgatgcccttggattcatgggtgcagctgggctaacagtggaccagcctttgacgacgatgatcgagttctggacctcacatgagtgcctcctcctaccttacgagcaagccttaacccggcaagactccaccaccggtcttttctacgactgctccgcccacatgctctgggtcggcgagcgcacccggcagcttgatggcgcccatgtggagttcctgagggggatcgccaacccccttggcatcaaggtgagcgacaagatggagcccggcgagctggtgaagctgatcgacatactgaacccgacgaacaagcccgggaggatcaccgtcatcacaaggatgggggcagagaacatcagggtcaagttacctcaccttatccgcgcggtccgccaggctggacagagtgtcacctggatcactgacccgatgcacgggaacaccatcaagactccttgcggacgaaagactcggccatttgactccattctggccgaggtacgggccttcttcgatgtgcacgaccaagagggaagccagcctggaggtgtccaccttgagatgaccggtcagaacgtgaccgaatgcacgggcgggtcaagcaacgtcaccttcgacaacctgagagaccgctaccacacgcaatgcgaccccaggctgaacgcgtcccagtccctggagctcgccttcatactcgccgagaagcttaggaagcggaggatgcggcggtcgtcggtggcgtctgggctcggcggcagcatcttgcccttgccgccctttggcttttgatgtcttgcacgctggctgtgtgcatgcagggtgcagtgcaggggtgtggtaggagaatcttacgttgtcgtttgccttgctatgtagtatgtaatgctttaatttactgcattctacgtcgttttttcccttcttcttctatttgtttctttttgtacgtagctgcagctcataagagattgaataatactattgctgccacatatatagacggagttggctttgtgaatt

SEQ ID NO: 92841 - DNA, 2383 bp, Zea Mays
gcgcttcatccaaccacccggcggctcgtctctcgtctcgctctcaccaactccggctccaggcgcctataagtaccctcgcccccgctctcgttcgtcccaggacaaacaccgcgcacgcaccgccttctccactacttacccgaatcctaacgctattccactgcattctgctccgaaatggccctcgccaccaacgccgccgccgcagccgccatctccggagggtccgcctcacagccccgccgcgcgtcgccgtcgctgctcctgctcaggcgccgctgcgccgtcggcgccgtacacgccgcggagccgtcgaagaaccccggcgtcgtcccggccgccgcgaaggcctcgacgccgacggtcgtgcccgagaacgacaccgtcccggccccgtcccttggcccgaacgcgtcgttgcgcgcgaggtgggcggtggacagctggaggacgaagaaggccctgcagcagccagaatacccgaaccagacagagctcgaggaggcggtcaacacgatcgagaagtctccgccgatcgtctttgccggggaggcgcgtcacctggaggagcgcctcgccgacgccgccgtcggccgcgcattcctcctccagggcggcgactgcgccgaaagttttaaagagttcaccagtgctaatatccgcgacaccttccgcgtcatcctgcagatggccgtcgtgctgacgttcggcggccaaatgcccgttgtcaaggtaacctacctacccatctacgccgcacgccacacaaaaccacgtgaatcgaaattccctttgccttggaaggaactgggcggatggcttttatgtgttcgactgttcgtgcgccctaggtcggtaggatggccggccaattcgcgaagccgaggtcggacgcgttcgaggagaggggcggcgtgaagctgcccagctaccggggcgacatcatcaacggcgaggctttcgacgagaagagccgcgtccccgacccacagaggatgctcaaggcgtactaccaatccgcttccaagctcaacctgctccgcgccttcgccaccggtggctacgcggacatccaacgcgtgacacagtggaaccttgacttcactaaacacagcgagcagggcgacaggtgaaataaaatcttgcacgcactcactcactgattgcagttatattatatgtcatgggtgactgagtttcattattcagttatgttatatgtcccaaaatttcatcctttttttatgacatgcatgactgagtttgtaggtaccgtgaattggcacatcgggttgatgatgcccttggattcatgggtgcagctgggctaacagtggaccagcctttgacgacgatgatcgagttctggacctcacatgagtgcctcctcctaccttacgagcaagccttaacccggcaagactccaccaccggtcttttctacgactgctccgcccacatgctctgggtcggcgagcgcacccggcagcttgatggcgcccatgtggagttcctgagggggatcgccaacccccttggcatcaaggtgagcgacaagatggagcccggcgagctggtgaagctgatcgacatactgaacccgacgaacaagcccgggaggatcaccgtcatcacaaggatgggggcagagaacatcagggtcaagttacctcaccttatccgcgcggtccgccaggctggacagagtgtcacctggatcactgacccgatgcacgggaacaccatcaagactccttgcggacgaaagactcggccatttgactccattctggttcttcttctttcttcttctgtcgacgtcgtactcctcaaaccaatatgaatgtgatacaccatgcatgcatatatatatttacaggccgaggtacgggccttcttcgatgtgcacgaccaagagggaagccagcctggaggtgtccaccttgagatgaccggtcagaacgtgaccgaatgcacgggcgggtcaagcaacgtcaccttcgacaacctgagagaccgctaccacacgcaatgcgaccccaggctgaacgcgtcccagtccctggagctcgccttcatactcgccgagaagcttaggaagcggaggatgcggcggtcgtcggtggcgtctgggctcggcggcagcatcttgcccttgccgccctttggcttttgatgtcttgcacgctggctgtgtgcatgcagggtgcagtgcaggggtgtggtaggagaatcttacgttgtcgtttgccttgctatgtagtatgtaatgctttaatttactgcattctacgtcgttttttcccttcttcttctatttgtttctttttgtacgtagctgcagctcataagagattgaataatactattgctgccacat

SEQ ID NO: 92842 - DNA, 447 bp, Zea Mays
atgccaacgcgaagatacttatttcagacattaacagggccgagtgcctatctgaattgtaaggttatacataacaatggcatcaatgatgggacacccatcgtgtcaagatcatattgctctgagcttaagctgcgcaccgtgcataggatgcaaggttatcacggtatgcggcgcatgagcgtaggatggcgcgagcccgaactcgaaccgctggaggatcatgcagagcgccatcttggcctccagcagcgcgaagttctggccgatgcagatgcgcgggccccagccgaacgggaggaacgcgccggggtccttggaggccctggacacgccctcggagaacctgtcgggcctgaactcgcgcgcgtcgcctccccagatgtccgggtcgtggtggatgagcagcacaggcagctccaggatcacgtcgcgcggggtaggtga

SEQ ID NO: 92843 - DNA, 1637 bp, Zea Mays
atggcaatcccatttaaaccagccccggctccgccacccatcctcgccttacccgccagcgccccagcccagcgatcgccggagcccgggcctccccaccgctcgcgccggcggtcgccgatcatggccaccacccccgccgaggatccggagcctgggctacctcctcccaaagcgctctgcgagcagccgcggcggcggcgcccgtgcgtcctcctcagcttctcggcagcgcgcgaccgcttcctccggggtcggttcctctcggcgggcctgcgccccttctccgtccgcctcccctcgccggccggcaccagcaccgtcgtccacctctgggcgccgccgcggcccgcgcggcggcccgtgctcctcctccacgggttcggcgcgtcggcgacgtggcagtgggccccgtacctccgcagcctcctcgcggccggcctcgaccccatcgtcccggacctcctcttcttcggcgcctcctcgtccacggtccccgaccgctccgacaccttccaggccaggaccgtgaaggccgccatggacggcatgggcgtgcgccgcttcgccgtggtcggcgtcagctacggcggcttcgtcgcgtaccggctggcggccatgtacccggaggccgtggagcgggtggtcctcgtgtcgtcgggcgtgtgcctggaggagggggacctcgccgcgggcctgttccccgtcgccgacgtcggggaggcggccgagctgctcgtcccccgccggccggcggaggtgcgccggctcgtcaagctcaccttcgtccggccgccgcccatcatgccctcctgcttcctcaaggattacatcaatgtgatgggctcagaccaccttgaggagaaggccgagcttctacacgctctcatcaacgataggaaactgtcagatcttccaaagataaaccagccaacgctgatcatttggggggagcaggatcaggtcttcccaatggagctggcgcataggttggagaggcatcttggggagagttctagattagtagtcgtaaaaaacgctgggcacgcggccaatctagagaagtccaaggaggtgtgcaagagcatcattgactattttcaggaaccgggttcaagtgattgagttggggggaaaggaggtgaagccacaatgtgacggttggaaattctgagctaggacatcgtcctgtgcttggcccgcagttttgccgtttccttggcaccttgtaattgtaacaaaagaacctttgtaatcacacggaccatacaagtctcctgtaaattgtctgagggctttctgcgctcaaagaaacacactcctcagctgtgaaattgaagaaggtagaaggctgaggtcctgttcccttgtccagccaatgccaaatgccactggaaaacggcctccaccgcaccaatctcgtcggtttttaatgccattttgatcatatcaatttatgatcattctatgctcaatgtaggattcagtaccatcatatataacacttagtttatctgtaaaatagaaacaacagccttattattgtaatgcccccataaggtacagtaggctcacgggctatgaacgatatggttgaaggatgaaacgggctatgaacaaatggtggttgcaggttt

SEQ ID NO: 92844 - DNA, 346 bp, Zea Mays
tcttcacctccacctatacctacatcaccatctaccgaacatcagacccctccagctaccttgtcgacgcatgaacaagacgacgggttagactttgtcgaaaccctcttcaacagtggaggtatcgaccatcactcttcattgtaacccgatggtgatcggcgaccgtgagcttccatgttattgtgttctgatacttgagactttttattatgactatgtatgagatattgtctcttattagtactggatgatgaaatgtgtcttattatgactatggatgagatttttgtgatgtaattgatgagactatggatttaaatattgttatgtgattgtgtgtgag

SEQ ID NO: 92845 - DNA, 384 bp, Zea Mays
tttgatgttttgttgtgttcttcctttttatgtgtgtgtcttcatcctcgcaaaaaatttggttcgtaccattaatcagattcctcaacgtcttggagtccaattctctgctagccatggaggatcattgactggcaccacagtatactttcatgaaagggcatctatgttatctgttaatactactactactacagaaaaacagactgcaaatggaacatctgaaggcacaattttcagaaaaggactttccagtatttacgaaagatcatatgtcaggtcttcctatcttttacatggcttcatgctggtacgaagattggcattcagtgtgcgagatctatggaatctattttcaagtgaagcacatgccaaactaaccag

SEQ ID NO: 92846 - DNA, 3079 bp, Zea Mays
aaacaatttctttcctttttctctctctcccttcttccacttatctgcaaaaaaaaaaaaaatcgttctgctaatttcggagctcaagacgctcgccccatctctcctctcgtcgtctctctcatccatcctgccaaacaaaaaacgaaaaaaaaaaatactcctgctgtttgctagagcgagtgaaaaaaaaagaatagtctcagaaccatctagagacagcggcccgtggagcggacagctgagcgagcaagcctgcgcccttccgaagtagaagctgttctgatccacagctctcgattccggaaggagttggtcaagaactggggatcctgagttgaatatgatatcaaatccggtggactggtatagtttcggacccggatagaattggtagggatgccagattggagggtgcgtgagtttgaaggtaaattcactgatgagtttgcccacagtaacaacaacaaacatgaaagtggagttgaggctcctggtgtcactagtagtaagaagttgaagcatacagttgccggtgagaaaattcaaggtgtcatccctggaataaatagctcagatccacagaaatgtaattcagagaacatccaacatgagaacaggatagtatcccagaatataaacagtgctggtgactgcattggagactgcaaagacagctccaacgccttctcttcaagggaagaaaatacaatcgctgaaaccagatgtccaacggatgactggaactcctgtcagtttgcactgagcaatggttcatccattctcaataaccacagtgctccacaggatagcctcacttatggagataatgatctaaactacattgattggcctggcattgacaattttgaggatgttgacacattattcaggagatctgatttcacatatgatccgcagcagctggagaatacagatgggttatcttggcttccttcttcagatgctgtttactcttctgatgttgctttgcagcaagggtttgactcgtcttattccgattatgatattctggatgatctctcagcattccaatgtgcagaagataaatcactaccctcagttggtccttcatcggatttatgtgataatcaattcaatgatacctatctgttcagtgagcagaagaatgcgaatgcatatggtgaacagatataccaagaggatgtgatggagttgttgcccactgaccagatatgcagtggacatgaaaacattgatatgttgcagggtggaaaccagtattcatctgaacatacaattcaaggtattgaagacaagaaattttctatagcatcaacttctcagctgagctcctctcagaatttactgaagcaaaggcaccacttagattccaattcaccaagcaacattacttatgaggcctatgaagaaaagttcggtccatctagtggttcttttgcacaaaggaatttaaaagtgcagaagaaaactatgaacatgcaaccaacacagccgataaatgataatgtcatgaacagacatcctcaaacattgacaagaagtgcttcttatccttgtgagaacaatgaatctgaaagaagaggattagggaaaagaactctgggggatcctcaagttacaatgggtacttcaatggtagtggatggctcatttgtatcatccatgtcctctgatatctctgttgaagaaagcagctttcgacaactgcagaatgctgttagtcagctggatgtgcaaaccaaattgtgcattagagatggtttataccgattggcacgaagtgcgcagcacaggcaagttattccaaatatgatgagcagcaatgaagacaacccggatataaaggatctgcagaatgcagaaactttgcgcaaattcgtcgatcctcggagcatcgagacacagacaaacccgatcgaccggtctatcgctctgctacttttccaccagtcatcggaccatgcggctgtggctgtcgacgatgcctcatcacttaaaccccctgctggtagcaaacaccaccagggccctgctgctaaccaaaaccaaggcctgataccagattcatcggtgtattcccctggagatggggcccccaaggatgtacagtccctggacaagttctgaatttatgtccctgctctccatgggcacgttcggttcccggggaatggtcgtctggaacgaatcctggtcggattgcttctctaattgatataagctttgatcggttggaacgattcttggtggaatttcgggataaatgaacaggccctaatgcgtctccgtgacctggttaaggcggcataatacggctttcacatgatgtttctaggcagatgtaaaaaacaagtatattgtgtacccaatagtctgtagcctgttccaatcacattggttttgacatgcgtgtatcctatgggtaggcggccgttgtgctctctagtggcgttgactcacatctgtgtaatctaaaaaaaattctttctttccgtggatctctaactatacctttgaactgatatacgggagtggatggattcggccaacgatcattatgccatgttgctaagaaatgattgcgtgagcctgctgcttctacatgtcaagcctttaatcaatcagcctgggcgttggaaagggacagatggctcttgagcaaaacctttgcttgattaacatgagcaagcaaactgtgggtccgacaatgcattaacggttgacatgtgtttgattagatggtagactgtgggcccaacgatgcattagcgcttgacattttcttgacgggctagttagcaaaagatggtaggcatatcaatccgacgactggtacctcgttccgcaacactaatcgctgtcctgcttattcaaaacgtagatacttcttattcaaaaggtaaatacaaaatgctacttccaagtgaaacgagctgatgtttcttttaccacctatgcctcacaattgtgtcaacatggagcgtgtgctaacatggatattggatcatgctatcgagtttttaatattaaaagagttgaaaagtatttgacacgacaaataataaaaaaataa

SEQ ID NO: 92847 - DNA, 1222 bp, Zea Mays
ggatggtagatcactatgcaattgaatcttatggtcttcattaatttaaggtcatggtctcagttgcagggtggaaaccagtattcatctgaacatacaattcaaggtattgaagacaagaaattttctatagcatcaacttctcagctgagctcctctcagaatttactgaagcaaaggcaccacttagattccaattcaccaagcaacattacttatgaggcctatgaagaaaagttcggtccatctagtggttcttttgcacaaaggaatttaaaagtgcagaagaaaactatgaacatgcaaccaacacagccgataaatgataatgtcatgaacagacatcctcaaacattgacaagaagtgcttcttatccttgtgagaacaatgaatctgaaagaagaggattagggaaaagaactctgggggatcctcaagttacaatgggtacttcaatggtagtggatggctcatttgtatcatccatgtcctctgatatctctgttgaagaaagcagctttcgacaactgcagaatgctgttagtcagattcgtcgatcctcggagcatcgagacacagacaaacccgatcgaccggtctatcgctctgctacttttccaccagtcatcggaccatgcggctgtggctgtcgacgatgcctcatcacttaaaccccctgctggtagcaaacaccaccagggccctgctgctaaccaaaaccaaggcctgataccagattcatcggtgtattcccctggagatggggcccccaaggatgtacagtccctggacaagttctgaatttatgtccctgctctccatgggcacgttcggttcccggggaatggtcgtctggaacgaatcctggtcggattgcttctctaattgatataagctttgatcggttggaacgattcttggtggaatttcgggataaatgaacaggccctaatgcgtctccgtgacctggttaaggcggcataatacggctttcacatgatgtttctaggcagatgtaaaaaacaagtatattgtgtacccaatagtctgtagcctgttccaatcacattggttttgacatgcgtgtatcctatgggtaggcggccgttgtgctctctagtggcgttgactcacatctgtgtaatctaaaaaaaattctttctttccgtggatctctaactatacctttgaactgatatacgggagtggatggattcggcc

SEQ ID NO: 92848 - DNA, 2550 bp, Zea Mays
gtgggggctgggattcttccccccctctgttgggtcctagagccgtttcctttttccctttcttctctggcggttctgtgcgcgctacctagtgtttgattggcctttggtgttcttgtgattcctcttcattctctctggtcatgaaaggagagagaaaaaaaaagatttgtggatcttcggtgaagtggcttctacagcttgctgacttttcttcctactgatgatttatccttgctcctgcaggttctgatccacagctctcgattccggaaggagttggtcaagaactggggatcctgagttgaatatgatatcaaatccggtggactggtatagtttcggacccggatagaattggtagggatgccagattggagggtgcgtgagtttgaaggtaaattcactgatgagtttgcccacagtaacaacaacaaacatgaaagtggagttgaggctcctggtgtcactagtagtaagaagttgaagcatacagttgccggtgagaaaattcaaggtgtcatccctggaataaatagctcagatccacagaaatgtaattcagagaacatccaacatgagaacaggatagtatcccagaatataaacagtgctggtgactgcattggagactgcaaagacagctccaacgccttctcttcaagggaagaaaatacaatcgctgaaaccagatgtccaacggatgactggaactcctgtcagtttgcactgagcaatggttcatccattctcaataaccacagtgctccacaggatagcctcacttatggagataatgatctaaactacattgattggcctggcattgacaattttgaggatgttgacacattattcaggagatctgatttcacatatgatccgcagcagctggagaatacagatgggttatcttggcttccttcttcagatgctgtttactcttctgatgttgctttgcagcaagggtttgactcgtcttattccgattatgatattctggatgatctctcagcattccaatgtgcagaagataaatcactaccctcagttggtccttcatcggatttatgtgataatcaattcaatgatacctatctgttcagtgagcagaagaatgcgaatgcatatggtgaacagatataccaagaggatgtgatggagttgttgcccactgaccagatatgcagtggacatgaaaacattgatatgttgcagggtggaaaccagtattcatctgaacatacaattcaaggtattgaagacaagaaattttctatagcatcaacttctcagctgagctcctctcagaatttactgaagcaaaggcaccacttagattccaattcaccaagcaacattacttatgaggcctatgaagaaaagttcggtccatctagtggttcttttgcacaaaggaatttaaaagctgatgtgacacttaactccacgaatgcagtgcagaagaaaactatgaacatgcaaccaacacagccgataaatgataatgtcatgaacagacatcctcaaacattgacaagaagtgcttcttatccttgtgagaacaatgaatctgaaagaagaggattagggaaaagaactctgggggatcctcaagttacaatgggtacttcaatggtagtggatggctcatttgtatcatccatgtcctctgatatctctgttgaagaaagcagctttcgacaactgcagaatgctgttagtcagctggatgtgcaaaccaaattgtgcattagagatggtttataccgattggcacgaagtgcgcagcacaggcaagttattccaaatatgatgagcagcaatgaagacaacccggatataaaggatctgcagaatgcagaaactttgcgcaaattcgtcgatcctcggagcatcgagacacagacaaacccgatcgaccggtctatcgctctgctacttttccaccagtcatcggaccatgcggctgtggctgtcgacgatgcctcatcacttaaaccccctgctggtagcaaacaccaccagggccctgctgctaaccaaaaccaaggcctgataccagattcatcggtgtattcccctggagatggggcccccaaggatgtacagtccctggacaagttctgaatttatgtccctgctctccatgggcacgttcggttcccggggaatggtcgtctggaacgaatcctggtcggattgcttctctaattgatataagctttgatcggttggaacgattcttggtggaatttcgggataaatgaacaggccctaatgcgtctccgtgacctggttaaggcggcataatacggctttcacatgatgtttctaggcagatgtaaaaaacaagtatattgtgtacccaatagtctgtagcctgttccaatcacattggttttgacatgcgtgtatcctatgggtaggcggccgttgtgctctctagtggcgttgactcacatctgtgtaatctaaaaaaaattctttctttccgtggatctctaactatacctttgaactgatatacgggagtggatggattcggcc

SEQ ID NO: 92849 - DNA, 2297 bp, Zea Mays
tttctttcctttttctctctctcccttcttccacttatctgcaaaaaaaaaaaaaatcgttctgctaatttcggagctcaagacgctcgccccatctctcctctcgtcgtctctctcatccatcctgccaaacaaaaaacgaaaaaaaaaaatactcctgctgtttgctagagcgagtgaaaaaaaaagaatagtctcagaaccatctagagacagcggcccgtggagcggacagctgagcgagcaagcctgcgcccttccgaagtagaagctgttctgatccacagctctcgattccggaaggagttggtcaagaactggggatcctgagttgaatatgatatcaaatccggtggactggtatagtttcggacccggatagaattggtagggatgccagattggagggtgcgtgagtttgaaggtaaattcactgatgagtttgcccacagtaacaacaacaaacatgaaagtggagttgaggctcctggtgtcactagtagtaagaagttgaagcatacagttgccggtgagaaaattcaaggtgtcatccctggaataaatagctcagatccacagaaatgtaattcagagaacatccaacatgagaacaggatagtatcccagaatataaacagtgctggtgactgcattggagactgcaaagacagctccaacgccttctcttcaagggaagaaaatacaatcgctgaaaccagatgtccaacggatgactggaactcctgtcagtttgcactgagcaatggttcatccattctcaataaccacagtgctccacaggatagcctcacttatggagataatgatctaaactacattgattggcctggcattgacaattttgaggatgttgacacattattcaggagatctgatttcacatatgatccgcagcagctggagaatacagatgggttatcttggcttccttcttcagatgctgtttactcttctgatgttgctttgcagcaagggtttgactcgtcttattccgattatgatattctggatgatctctcagcattccaatgtgcagaagataaatcactaccctcagttggtccttcatcggatttatgtgataatcaattcaatgatacctatctgttcagtgagcagaagaatgcgaatgcatatggtgaacagatataccaagaggatgtgatggagttgttgcccactgaccagatatgcagtggacatgaaaacattgatatgttgcagggtggaaaccagtattcatctgaacatacaattcaaggtattgaagacaagaaattttctatagcatcaacttctcagctgagctcctctcagaatttactgaagcaaaggcaccacttagattccaattcaccaagcaacattacttatgaggcctatgaagaaaagttcggtccatctagtggttcttttgcacaaaggaatttaaaagtgcagaagaaaactatgaacatgcaaccaacacagccgataaatgataatgtcatgaacagacatcctcaaacattgacaagaagtgcttcttatccttgtgagaacaatgaatctgaaagaagaggattagggaaaagaactctgggggatcctcaagttacaatgggtacttcaatggtagtggatggctcatttgtatcatccatgtcctctgatatctctgttgaagaaagcagctttcgacaactgcagaatgctgttagtcagctggatgtgcaaaccaaattgtgcattagagatggtttataccgattggcacgaagtgcgcagcacaggcaagttattccaaatatgatgagcagcaatgaagacaacccggatataaaggatctgcagaatgcagaaactttgcgcaagtatgatatttctaacaaagatcttatatatacttacacaagcatgaatcagtatctctatggctttgaaaagtgtagtcgttagcattcccctcattgtttaattagaaacttcacattgttgtctaagcgctcctaatgcaccatctttcctctgaaacacccaatgcgatgtgttttgcacagcctgttatctctaaaatatcttggtccttaagatgctagttgattgaggtttaattgggtgtttggttcccctgactaaagtttagttcgtgtcacatcaaatatttaaatatcaattatgagtattaaagataggcttaattaggtttaataaatttgccttgccgtttactgtagcatcgtatgagtgaatcatagactatttaggcttaaaactcatcttaacgtttagtactt

SEQ ID NO: 92850 - DNA, 1227 bp, Zea Mays
ctcatgagtgcaacctccgtggacgaagcattcgcctcgccttgatctccaaccccttccttccttgcttaggagagagagggaggagaggagaggaggaagaagatggagagggcggccccagtgaggagttcccacacctccacggccggcctactcgcgtggcctcaacccgatggcgccgcgtcgcaggcaccacgtcggcctaaccagccgacggaggaattcaggaaggtggtgttcggggggcaggtcaccgaggaggccgacggtctcaacaagacgaagatgaggacgacggcctccgcacccaagtcgaaggagacaacagggatcggcatgtttaaggccgagagcgccgccgccgccgtcacaactgcatcccgtgatcgccaggctagccagatcactttttctcaggacgggaccattcctcccaggaagccaacttcagttgctggggtggcgaggcagcgcgaacttagccataccgttgagagttcgggggacggtaagatgaagcggcaggtgtccaatgcgaaatccaaggagctcagtggtcacaacatctttgctgatcatgaagatccgagtcccaacaggtcaagcagctctgctgctgctctggcacatgtgaaaaatgcaaatgtgagctccttctcctttggaaaggccgacatggacagcacagtgaaaacagcaaagaagaaagggtccagcaacaagtctactgatctgatgaatggcaaggccatctccgagagggattcagcgcctgcagggaaacagcctctgaaccgcgcgaagccgaaaggattgagtggtagtagcatttttgcagacgggaaggcctcgacaactggtgatcatgcaggccgtcggacccggcagccacctggcggcgacagcagcatcttgctgggctagcgtgcatatggatattgtcctatgccgccacacgggtggttggtccgtccgtgtgcggccatgttttcctgatcaggcgatgagtcccatctcagatgatctggttcacttctggcgtgtgtatgggtttgtgtctgtgttggttgtgacatgtccaatggaacaaccctatcgctactgcgtgtggtgccgttttgttgtgtagtagtacaacggatgacatgtggtaccgtttcgttgtgtgtacgtggatatacatatgtgtgtttggttattaaatactccctccgtttttaaata

SEQ ID NO: 92851 - DNA, 1440 bp, Zea Mays
cacgtgctgcgtctccgaagagaaaaggaagcgaagaacagggaccccgcaccttcctgccatcctgatgctgccgccgctactccagttccactccacctcacgagtctcacacacctcccccctcctttttagggagagaaagcaacgaaacgccgagagaggcgtgcgagcgggagcaaggagatggagcgggcggcgccggtgaggagctcccacacctccacggccgacctactcgcgtggccgcagccccagggccccgccccagcaacgccgtcgccgccgcgccggcccggtcagccgtcggaggctatcaggaaggtggtgttcgggggtcaggtcaccgaggaggaggccgacagcctcaccaagaggaagccgtgctccgcgcccaagtggaaggagatgactgggagcggcattttcgctgccgggagcaatggagacgctggggaggcagctgctgccgcgaagcccgcccgaacctcctcgcgccaggcgagcagtactgtaagccacatctcgttcgctgaggatggaaccgatcctcccaaaaagcccacatcagtagctgaggtggcaaagcagcgtgagcttagtggcactcttcaaagcgagacggatagtaagacgaagaagcagatctcaaatgcaaagtccaaggagctcagcggccacgacatctttgctgatactctggattccaggtctaacagggcaaggaacccatcgaacggcagcacagcctcacacgcacctgccaaaaatacaaacgccagcaccttctcgtttggagatgccaacactgacagcacgccaaagacggcaaggaagataaccggcaagaaggtcaacgacctcaccggcaacgacatcttcaagggggacgtgccgccagcttctgcagagaagcatctgagcaccgcgaagctgaaggagatcactggaagcaacatttttgcagatgggaaggaaccaatccgcgagcgtgtgggcggaaaccgcaagcctcctggcggtgagagcagcatcgcgctgatttagcataatccgggactcagtgtcgacccctagaggaggatttccaccagcaccaggcagcaggctgttggatcgtcagtttggtgtcttgttcctgatcaaggtgcggcagtgaagagccccgttttagtcttgatgatgtttattaactgttggtgtgtgcatgtttggtttggctgtgagataccaatgccgtcctcatcatggcagtgtgtagtgtgtacggttgatgtgtttttacaaataatagctcgagtctgaaccaagctcacgtcttccaccaccgtcaaattattagcagacgtgtatgtaccaagcgttaccgacaccttgcgtgcactaatttacagacgacggatatatgctatgcgtaacccgataaatgttcatgtcatc

SEQ ID NO: 92852 - DNA, 5510 bp, Zea Mays
atgccgaaggtctttggcaccggcgtcttcgagttccggcacccccgagcggccgagtacccactacccgcggacgccgcccccgctacggctgcggcgcccgacaaagttcccgcatccaccggcggcggctccatcacgctcctcgacatccagcgggaccgcctcacccgcgtcgccaccgagcattggggcacggccgccgctgcggcggccttcgacgcggaccttgtcaggaagatctatggcactgagctccgcgtcgaggggaggggccggaaaactgtgccgctgcagcgtgttatgatcctcgaggtcagccagtaccttgagaactacctgtggccgcacttcgacccggttgacgcttccttcgagcacgtaatgtccatcatcctcatggtcaacgagaagtttcgggagaatgtggcggcttggacatgtttccatgaccggaaggatgcattcaaggggttcctgtggcgggttctcaagctcaaggaagagagcatggataaatctgggtgttgccaactgtatgtatttcattttagacaaaacgaaagggctcttaatatggcagagaaaacaaattacctcctgtttatgataaattcatttcagagtttggaggacgagcttgtccgggaaacaatacttcagttagtaagcctaaagctgtggaataccctttcgtttggacgacttcagatggaactctgcctaaaccctgaattgattaagaagtggaccaaaatcagaagaagagaggcaaaggaagcgaaaaaggctgaccaacctatcaacccttctgaaatgctcgagaataagttccttaggaatttaattgaagaattcgtggagattctcaattcaaaggtcatactatccaatcaagatggtgctgaagaatctgtattgaatgagtctttcagtgggcaaattgacgattcttgcgttctatattgtgagagatttatggaatttttgattgacatgttaagccagcttcctactagacgatttttgaggcccctggttgctgatgttgctgttgttgccaagtgccacttaagtgcactctacactcatgaaaagggacggctttttgcacagttggtcgacttgctgcagttttatgaaggttttgagattaatgatcactctgggacacagctcggtgatgatgatgtcctgcaggcgcattattcccgtttccaagcttttcagttgctagcatttaaacaagtgcctaagctgcgagattttgccttgtccagtattggttcactccataagcgagctgacttaacaaaaaagttgcttgtcttgtcagatgtggagctgcaagatctggtttgtaacaagcttaagttaatctcagagaaagatccatgcagtgaaagacgcgattttcttattgaagtcctagttgctttttttgagaagcggcaatcccaaaaagatgcagtaaatgcacttcctttgtatccaaatgagcagatcatgtgggatgaaagccttgttcctagcattaattactctggagaaggctgtcttgccctcccaaaactcaatctccaattcctgacgcttcatgattatttgttaagaaatttcaatctgtttcgtcttgaatcaacctatgaaattcgtgaagacattcaggaagctgttcctcatctacatgcttatatcaataatgagggagagacagccttccgtggatggtcaagaatggctgttccgatcaagggatttaagattacagaagtgaagcagccaaacattggagaagttaagccttctgctgtaactgctgatgttactttcagcatatcaagctacaggtatcagataaaatctgaatgggatgctctgaaggagcatgatgttctatttttgctgtcaatccgcccttcatttgaacctcttagccctgaagaggctgaaaaatcaactgtgccagaaaggttaggattgcaatatgtacgtggatgtgaggttattgaaattcgtgatgaggaaggagcactcatgaatgatttcacaggaaggataaaacgagaagagtggaaaccacccaaaggtgaaattcgtactgtccgagttgccttagatacagcgcagtaccacattgatgttaccgagacagcagagaagggcacagaaaatgtgtatggaacatttaatattctaatgagaaggaaacccaaggagaataatttcaaagcaatcctggaatctatacgtgatctaatgaatgaaacatgtgtagttccagaatggttgcataacatattcttgggttatggaaatccttcggccgcacagtggatgaatatgcctgatcttctggaagttatagatttcaaggacacttttcttgatgccaaccatgttcagcaaagttttccagattaccaggttacatttatcaattctgatggtacaaaaaacctgcatccaagtcccccttttaaaatcaggctatccaagaaaatgagggaaagcagtcatgctttacctggcaacatgaactccaatttgactgttaagagcagaaataatatggctgatggggagcctcagaaagagaaactaattgttgaaacttacattccagctgatcctgggccgtatcctcaagataaacctaaacagaactcagtgaggttcacaccaactcagatcggtgctataatatctggtattcaacctgggttgacgatggttgttggtcctcctggtacgggaaaaacagatactgctgtgcagatattaaatgttctatatcacaactgtccttcacaaagaacactgattataacccactccaatcaggctttgaatgatttatttgagaagataatgcagagggatgtgcctgctaggtaccttctccgccttggtcagggtgagcaagaattggccactgatcttgattttagtcgtcaaggtcgtgtcaacgctatgctggtccggcggctagagctgctcggtgaagtttctaaattggcgagatctcttcgtcttccagaagatgtgggctacacatgtgaaactgctgcatatttttggctattacatgtttatgcccgttgggaacaattcttagctgcctgtgctcaaaatcaagacaaaccctcttttgtcaaagaccgcttccccttttcagagttcttttcagatactccgcagcctatttttaccggcgagtcatttgagatggatatgcatgcagcgaaaggttgtttcaaacatctttctacaatattccaagagttggaggagtgtagggcttttgagctacttaagtcaacagtggagcgagcaaactatctaatgactaaacaggccaagatagttgctatgacttgtactcatgcagcattgaagaggagggactttcttcaattaggtttcaaatttgacaatttgctgatggaagaaagtgcacaaatattggagatagaaacttttataccgatgctgctgcagcggcaggaagatggccatgctcgtcttaaacgttgcattttaattggtgaccaccatcagttaccccctgttgttaagaacatggcttttcagaagtatagccacatggaccagagtctctttacaaggtttgttcgacttggtgtcccttatattgagctcaatgcccagggtcgtgcaagacctagtattgctgaactttataactggagatacagggagctgggagatctgccttatgtccgtgagcaagcaatcttccataaagctaacgccggattctcttttgagtatcagttagttgatgttcctgattataagggaaaaggtgagtcagcgccttctccttggttttaccagaatgaaggggaggctgagtatattgttagtgtgtatatctatatgcgcctgattggctaccctgccaataagatttcaatattgaccacctacaatggtcagaagcttcttattcgtgatgttatcaacaaaagatgcaaaccatggaatattgagccccctaacaaggttaccactgtggacaagttccagggccagcaaaatgatttcattttactttctcttgtccgtacccgttttgtgggtcatcttcgtgatgtcagaagacttattgtagctatgtcccgtgctcgtctgggcttgtacgtgttctgccgtcgttcactgtttgaacaatgttacaaattgcaaccaacattccagctgctcctccaaagatctgataagcttgccttgaatcttgaggagtgcactccttttaccgagcgacctttggaggaaactggaaacatccattacattactggtattgaagacattaattcatctagtaaagttcaggctggaacatcttcgtcaagtgcaatacatgcagtattatgctcctccggcaaatgaactgcctcaagcagcaccagaaaatattgctgatgcaatcccttctgaaaatggcaatgctggaagggctctgaatgatggaaacgaggacatgacccgggaagaaaatggtggtgcaactgacacagtgatcagtaataggatagaggaagacagcgttgaggcaaaggatgacatgacacaggaaggggacaagggtgaagtgagtggcaagggtcacatggctacagaggataggaaaggggaagcacaaggtggcgcagatggcaagctggaggaagcaaatgtgatgtcggcggacaagatgatggaggaagcaaatgcgacgtcggcagacaagatggaggaagcaaatgccacgtcggcggataagatggaagaagcagatgccacgtcgtcggacaagatggaagaagcagatgccacattgccggacaagatggaagaagcagatgccacattgccggacaagatggaagaagcagatgccacattgccggacaagatggaggaagcaaatgccatgtcgccggacaggatggaggagaaaaattctgatccgaaggacaagatggatgaggagtgacgtggtggtgtaaccagttttgaaatagcggtagacttgttctgtcagccgcatatcttgatttggaacatcatgtattcacctgtgttaccgcagatgaagactgatacgtgctccccaagaggtgtagccttgtgggcagaatcaagatcgacatatgatgaccatgttcctgcggttaatggtggtgaaggctgttttccctaccatcttggccaggctatgctggaaaatgttccttctcttccagccaagggtatccatgtttccgcatgtgtttaatcgtgtaaactgtagaggattttttgggtagttttttctgaaacacccgttccatctatcgttgtctccgtaacataacacagctggaacgttgcttttgtatacttgactgactactataattttggcacaagcattagatttttgcagatttgataggccttatcggccattcaaaattttgatttgacagaccaactcacccagcctataaaagagaagc

SEQ ID NO: 92853 - DNA, 450 bp, Zea Mays
atgtttttgtcacgatgtttgaggtggcgattaggccctctcgccgcggatcctccttgccagctgaatgtcctttggcatgatggtcacacgcttagcatggatggcgcacaggttggtgtcctcaaacaggccaacaaggtatgcctcagcagcctcctggagggcaagcaccgcatggctctggaaacgcaaatcaactttgaagtcctgtgcaatttccctgacgagcctctggaagggcagcttcctgatcagcagctcagtgctcttctgatacttgcggatctcactgagggcaacagttccagggcggtagcggtgaggcttcttcactccaccagtggtgggggcagacttacgggcagccttggtggcaagctgcttcctgggagccttccctcccgtggacttgcgagcagtctgcttggtacgagccatctgcactaa

SEQ ID NO: 92854 - DNA, 1116 bp, Zea Mays
cgtccatggagcgctggttgatgttcgccgagcccacgatgatgtactcatcgtccactgctcgcgagtcagacctcagacgtacggaagccattgttattattgctagatgaatcgtgtcgtgtgtgtacctatcatggtcttggcgtggacgtagatcatgaagcgcctggcctgctgcgccctctcgtagtcggtgttggggtccgggtgctccggcggcacgtactcgccggggctcggcgcctcgcggttgccgaggcagaagaaggtgaggtagtccctggggtcggcccggagccccctggcgcggatggccagcgtcacgtccttatacatcatctccatggtgcggcgctgccaatccaggatggcctgcacggagccgctctccggcacgccctccggccacagcggcaccaccacgtacacgacgaaccgctcgccggcctcgatcttgctcacgatcttgagcgacagctccttggggatgaggtgcagcgcgttgatgtcctccaccgtcacgccgtcgttctgccgccacgcgtaggagctccccaggaagtactggttctcgatgtagatgaagtcccgcgcccgccggatggcgtggatgtacgcgtcctggatgctgcgctcgatcacgtggtccttgccgctcaccagcccgagcgccgccgcctcccggggcgcgttcgcggagccctccgggaaccccgccgccgcgccgccgtcgatggaccggaacacctgcacgttccacgactcggcgtcgccccgcggggccgcctcgcgctccgcccacgccttgttcagcgccaccaggaggttgtcccccttgccctgcttcttccacctctgctcgaagttctccagcacgtcccacgccgcgggcccctccacgcggcagtggatgtcgtgccacggctccctcggcccgcccttgctgatggacgcgccggggaagttgggctggtggaagtccttgctgtgcgtggtgcccagcgtgcggaacagcgggtggtcctgcgtgtcgtacctcccgtcgcacaggtcgatgccgccgaggaagctcacgaggcccggcggcgtctccggcgccggcgcgccgccgcc

SEQ ID NO: 92855 - DNA, 440 bp, Zea Mays
agcttcaaggtcactacaacaagattttacagtactgagcccatttgactttccttgagaaatagccagtgctttttgatctgcgagttcctgcacttggttaatcaactgtgtcgcctgatcttctacttgtttgcgcgagaaggtcaaagccactttcgaagctattagttcagaacacacaacatctagctaaatacatcacctgtttgaagtcattgattgtattcttgatatcatctttattcttgaatgtcatttgtgccagttcatttaactcttatgctgcaaaccaacctgacatcgtcaattcatttaatctctcaatctcagtttcctttttttgtttcacattgaagctccctaattgttgcttctcgatgtgcagtggcctgattagctacaagaagctcttgttccatggactcgatctctggacc

SEQ ID NO: 92856 - DNA, 1807 bp, Zea Mays
cgcaggccgcagccgcccttcccgtccttctttctcgtgaacagagcagggcaggctcaccagccagcacgcgcggccacgccacacccgcggagacgcggcacgcctccactcctcggccctcccccgactccgaggcgagcacgccgcacgctccgcctcgcagtcgcggccccgtgctctcttccttcttctccgtccaccgtcttctccttcttcgctcggagggttcgatctggtaactctggtgagaagtgaagacttagcacagtctgtgctcgtcaagtgccctggcactctggcaggatgcggtggctcggtctttcggtggcactctggtagttgtgtccatgggggacaaggttaatccctggtgccactgccattggcataatcctgcatggaaatccgacactgaaagttgtgccggcgatctccacccacctgacgctgggcatcttaccgccgattcggtcgcgttggctccaattttggaattccctccaccgtacccctcacgcaagaaaccgaggagggtatgcacgagaacagggacgagatcaacgcgctcctggacaccgacaggcagtctggtggcgcagccttgagcgtggagtcggtggccagcgctggcgctggcgctggcgctgcgccgccgccggcagccaagaagagaaggctcagctcctgcaccgacaagtccgtcgttgacacggccagttcagcagcaaggcctcctgagcgttccatggagcaggagcagagggttgaacttgcgaacgaccgcgacgcgcagtcgtgctgcgttggggaggtggaaagcgggcgcaggtttgctctgggggaggcggaagcggaagcggcagagggcgacagccccgacgagcagaggcggaggagggagaggatccaggagactgttgccgcgctcaggaacatggtccccgggggcatcgcgaaagacgccgcggctgttctggacgaagcgatctgctacttgcagtacctgaagctgaaagtgaagacgctgggagctgtctccctctagctaagcctatctagccctctctcctcgtcgtggtggctttgttgtcgaaggccgaagccactggcttctggtgagaggagagctagcctatatcacccatctgttcagttcagtcccagaggagctcggatcttctcctacccgactcactgtcggtggctgcatcacccatcttcctcatcgtgggttggtatgcaaaagctagaaacatctttccgctgagcgtgatccaaagcgaagcccccattccatgcaaagcgctgggtcgtgccgtgcgtggggtggctcctgctttatatacgcgttgtgctcctgctttggctgatgtttgctttggtagttatatatagttctgtgtactacaaagtaaagtaagtcttgtaaaacgtgcacatcctccaggcgggtttgtttctctgctgcccgtctcctatcctgctggccatgattgtttggaggctgctgctgctgcatcatgagtcgtccgttgcccttggagagaagagaagagagggtccgtgctgcgttccactgccaggttgggaaccgcaagggtttgccgggaacggagggagggtcggaatccgactgcgagtgggcactgggcaccagcacgcgtgcggcgcgtgggggtcggagcgtgcggcgacggaatgagtggcgaggcaggccaggcgcgggggcacctgctgctttccttggcttaggttaggtgcgactggactggaccccccagctgagtccgcactagagatggca

SEQ ID NO: 92857 - DNA, 1625 bp, Zea Mays
gcaggccgcagccgcccttcccgtccttctttctcgtgaacagagcagggcaggctcaccagccagcacgcgcggccacgccacacccgcggagacgcggcacgcctccactcctcggccctcccccgactccgaggcgagcacgccgcacgctccgcctcgcagtcgcggccccgtgctctcttccttcttctccgtccaccgtcttctccttcttcgctcggagggttcgatctggtaactctggtgagaagtgaagacttagcacagtctgtgctcgtcaagtgccctggcactctggcaggatgcggtggctcggtctttcggtggcactctggtagttgtgtccatgggggacaaggttaatccctggtgccactgccattggcataatcctgcatggaaatccgacactgaaagttgtgccggcgatctccacccacctgacgctgggcatcttaccgccgattcggtcgcgttggctccaattttggaattccctccaccgtacccctcacgcaagagacctctcgttttgtaccagaaggagaagcgtgctcctgtactcccagctcctttgccgagcaagggcccgccgccgttagatcccgtgccggagctccaaggtagcaacgagactgacgtgactgatgctggagcaggagaagaaaccgaggagggtatgcacgagaacagggacgagatcaacgcgctcctggacaccgacaggcagtctggtggcgcagccttgagcgtggagtcggtggccagcgctggcgctggcgctggcgctgcgccgccgccggcagccaagaagagaaggctcagctcctgcaccgacaagtccgtcgttgacacggccagttcagcagcaaggcctcctgagcgttccatggagcaggagcagagggttgaacttgcgaacgaccgcgacgcgcagtcgtgctgcgttggggaggtggaaagcgggcgcaggtttgctctgggggaggcggaagcggaagcggcagagggcgacagccccgacgagcagaggcggaggagggagaggatccaggagactgttgccgcgctcaggaacatggtccccgggggcatcgcgaaagacgccgcggctgttctggacgaagcgatctgctacttgcagtacctgaagctgaaagtgaagacgctgggagctgtctccctctagctaagcctatctagccctctctcctcgtcgtggtggctttgttgtcgaaggccgaagccactggcttctggtgagaggagagctagcctatatcacccatctgttcagttcagtcccagaggagctcggatcttctcctacccgactcactgtcggtggctgcatcacccatcttcctcatcgtgggttggtatgcaaaagctagaaacatctttccgctgagcgtgatccaaagcgaagcccccattccatgcaaagcgctgggtcgtgccgtgcgtggggtggctcctgctttatatacgcgttgtgctcctgctttggctgatgtttgctttggtagttatatatagttctgtgtactacaaagtaaagtaagtcttgtaaaacgtgcacatcctccaggcgggtttgtttctctgctgcccgtctccta

SEQ ID NO: 92858 - DNA, 863 bp, Zea Mays
gcaggccgcagccgcccttcccgtccttctttctcgtgaacagagcagggcaggctcaccagccagcacgcgcggccacgccacacccgcggagacgcggcacgcctccactcctcggccctcccccgactccgaggcgagcacgccgcacgctccgcctcgcagtcgcggccccgtgctctcttccttcttctccgtccaccgtcttctccttcttcgctcggagggttcgatctggtaactctggtgagaagtgaagacttagcacagtctgtgctcgtcaagtgccctggcactctggcaggatgcggtggctcggtctttcggtggcactctggtagttgtgtccatgggggacaaggttaatccctggtgccactgccattggcataatcctgcatggaaatccgacactgaaagttgtgccggcgatctccacccacctgacgctgggcatcttaccgccgattcggtcgcgttggctccaattttggaattccctccaccgtacccctcacgcaagaaaccgaggagggtatgcacgagaacagggacgagatcaacgcgctcctggacaccgacaggcagtctggtggcgcagccttgagcgtggagtcggtggccagcgctggcgctggcgctggcgctgcgccgccgccggcagccaagaagagaaggctcagctcctgcaccgacaagtccgtcgttgacacggccagttcagcagcaaggcctcctgagcgttccatggagcaggagcagagggttgaacttgcgaacgaccgcgacgcgcagtcgtgctgcgttggggaggtggaaagcgggcgcaggtttgctctgggggaggcggaagcggaagcggc

SEQ ID NO: 92859 - DNA, 333 bp, Zea Mays
gttcaaagacaactgcaactaacaattaaagcacaaggaatatacttgcagatgatcattgaggagcaacaaaagcttggtggatcaattaaagcttctgagggtcagaaactttctgattcacctccaagcttagatgactacccagagatcatgcaacattctcccaagaaaccaaggatagacgcattatcactagattcagagcgcgatatagcacagcctaaatttgaatcccatttgatcggtctgtgggatcacgacattgcattcccagtggaggagttcaaagcagaccctgctatgagcaagtcataaggcaaacttcacctt

SEQ ID NO: 92860 - DNA, 1714 bp, Zea Mays
aagagcccctcgggcagcaggatcttccccctccccaaaaccaaaccagctgcctccgacagcatccaccttttcctcccccaaaccatggacttctccaccggcgggagcgtgagcgggggcggcggaggcgccagcgacggccccgcgcaggcggagcgctggctggagatcgccgagaagctcctcgcggcgcgcgacctcgtcggctgcaagcgcttcgcggagcggtcggtggaggcgaacccgctcctcgccggcgttgacgaactcctcgccgtcgccgacgtcctcctcgcttcccagttcatgggcacctcgggccagccggacccgctcgccatcctccagctgccgcccggagtcagccccgaccaggccgccgtgtcccgcgccttccgccgcctcgcgctcctcctcggtcccagcaacccgcacccgggagccgagatggcgctccgcctcgtcaacgacgcctacgccttcctctcggatccctctcgccgccccccgccgcccgccgatcccgccactggtaccccttactcctcccagtatcccgccgcggccgctcccgcctccgacaccccggagttctggacggcgtgccccttctgctgctacgtgcaccagtacccgcgcagcctgatcgggcgcgccctcaagtgccccaacgcgggctgccgccgcggattcgtggcttctgagctcccgaccccacccacggttgtgccgggcactgaaatgtaccactgcgcctgggggttcttccccctcggatttcccaacgcggccgacctgggtgccaactggaagccattctacaagatgttcccttggaacacggctcccagtggccaaggtggtggtggtaggagtcacggaaaccatggtggtaggcagccacagaatgacagtgctcgtggtggctcttctagaggtaggatcaagaagacgacggcccgcaagaaggtcggggtagggctcaggagacgttctcttggtgtggagagtggcattgattcttcgatgctcgggcaggaaggctgggctggggatgagaacgctggagatggaagggccgaggaggtgaggagaattaacataaatgaggcagcacatgctacagatggcactggtagggttaatgttagcggtgctggcggagttgaagatatcggcaactttcatatcgatgttgatgcatccgaggatatattggggaatttgcacaacatgcacttcttgagggtggacaatcttggacggatgatttaactgttgttatggtttactggggctatgattagccaggccgactcttgctgttcaagtgttcatttgagtgtaattgttccatccctgttatgtaatgttgtagttgtagacttgtagtctacctggtacctgtagttacttaacatcaggcagggaaaaatttgtatgttcattagatggagatacatgccatttgccttagcaaacacactttgtggaggtttccagtgatgggataatgcttcgcagaggtgtggttggactggcaatgcttaccatgccacttctggtttcttcctggcatggtgacacaaaatgttgttgagatcaagtaagtgaattatgttctgctttctgagttcggtaaacttctttggctacaaaaggactaagcttagttatgctaacttgttgatttggttgtgatcattgcatc

SEQ ID NO: 92861 - DNA, 1652 bp, Zea Mays
gtcttcgagttcgaggacatggagaggccgcgttgctactctccgcttgccctgcacctcctcctctgcctcttctcgctccgcgcctgttccgccgcgtccatcacagccggcacccccgacgagtcggagctgtgggggtacgtcgaggtccggccaaaggcgcacctgttctggtggtactacaagagcccgcagaagacgtcgacgccgtccaagccatggcccacggtcctctggctgcagggcggcccgggcgcgtccggggtcgggctcggcaacttcctggagatggggccgctggacgtggacctgaagccgcgcaactcgacgtggctccacaaggccgacctcatctttgtggacaacccggtcggcacagggtacagctacgtggaggacgacagcctgttcgtgaccagcgactggcagcaggccgcggacatgacgacggtggtcagggcgctggcgaaggaggtgcccaccctggcgagcagcccgctgttcctggtcgccgagtcctacggcggcaagtacgccgccacgctcggcgcgtccattgccagggccgtccgcgctggcgagctcaacgtcacgctcggaggtgtggcggttggagatagctggatctcgccggaggatttcacgctttcctacacaccgctgcttctgagcgtgtcgaggctggacgacaacgccggcgacgaagcaaacaagaaggcggagacggtgaaggagcaaatcgtggcggggcagtgggccgcctcgcagaagtcatggggcagcctgctagatttcatcgacacaaagagcggcaacgtcgacgtttacaatttcatgctcgactccggcatggacccggtggcactgcccgtgggttcttcatcactgatgagcagcttgcaggcgatgaagtactcgacgtacggccaggactcccagcctggctccaacaccattgacggcatcatgaatggggtcatcaagcaaaagctcaagataatccccaagaacttcacgtggggggagcaatccgactcggtctacaacgcgctggtcaacgatttcatgaaaccgaagatcgatgagattgatgagctgctgtcttatggcattaatgtgacggtgtacaatggccagctcgacgtaatctgctcgaccaacggagcagaagcatgggttcagaagctcaaatgggatggtctgaggaccttcctgagcctgccaaggcagcccctctactgtggcgccagcaagggtaccaaggcctttgtcaggtcccacaagaacctgcatttctactggatacttggagcagggcactatgtgcctgcagaccagccctgcatcgcgctaagcatgatcagcagcataacccagtcgccagcaagctagttcactgactctatgtggtgtatgccaagaacaaaggaggcgttgaagcaggtagcgcaaggtcccggaggaccattcggcgttcttgaagtgcggtataggttggatacctgaaagacgatgcagttgacaaggacattttttttacagaaaaagatccgataaaaacatatatgatctacgtattacaaaatattgtaaagaggccggaacttgtttttttaataatagaaatgtatctggcttcatcctggtcc

SEQ ID NO: 92862 - DNA, 827 bp, Zea Mays
atggatggcgatggtatccggggtctcatcccggaaaccattcttgccttcctcgaggcgagggtgcaggatctggacaggctggaggcgaggctcgcagactacttcgactacatcgccaggaccgaagtggttgatgtccttggcaacgtagagagaccgcttgtttttgccggtcccgatgaacatggcggtgatgatctcatcggtgctattcctagtgatgtagtcgaagtagtccgcgagccttgccttcgtcccgtccaactcctacggcatggcctcgaggaaggtgaggatggttcccgagatgagaccccagatggcgcctctgtccaccgttatcactgtcaccctcggttcaacacgacgggctcatcgaccatgctcccggccatcgccttcgtgctgcatgtgttgcatggacgccttgatgagtagctcaccgttgccgcctttgaccaagcacacacccaattgatcgattaatgaactagatactcattgaggccacgaatgaaagaattatcatcaaaccaacaaatgacggacacaattttcaatcgattatggatgagtgtgagtagtgatgagctgaggaagatgcaatgatagatcgattgtgtacatatataggcactgcgtacgtgctgcccctttttggagtgacaaataggaactagcgcgcgtatttttgcatacaaccactactaaataagagatatatgtaaaatttaacgcaagggatatagggaagagatatttgtccattgcaatgtattttgaagctgtccacatatactatttatgaagaaacggattatgcc

SEQ ID NO: 92863 - DNA, 713 bp, Zea Mays
aaccaactggactagattcgtctcgtcttttaatcttcggctgacaaattagttttataatccgactatatttaatacccggaacggaggttcaaacattcgatgtgataggggctaaagtttagtttggggtaaccaaacaccccctaaaaggaatgtacctagctatcacgtacttttgtagggagagctagttcccaagacaaagggaggaggaatacacgctcgatatggcgacaacacctcgcagtacgcacgcatgtgcctcgcattcagtcagtattcagttttctacttgttggagccttggactgttgctattatctagtggatccttaattagttcgtttttttaaaggaaagaaagctgctttccctctatctctgcttactaattcatatagggatcccttcatattgggcgcaggcattcaactctgtactttctttaagaattagtatatgcaatcatcggactagaaaaaaaaacaaataatatatatatggcaaacaaatgcaagctagtcccgtctaggtgtatgcggaattagcaaattaagggggtgtttggttgctcctgctaaagtttagcccgggtcacatcaagcgtttgacttttaaatagaagtatgaaatatagacccaaccaactggactagattcgtctcgtcttttaatcttcggctgacaaattagttttataatccgactcc

SEQ ID NO: 92864 - DNA, 1251 bp, Zea Mays
acagctatgtaggtttttgtacaatactccctctgtttcaaaatagtagttgttttagctctagatttttatgtttatattcatatgtatgataacgaatcttgacacatatataggacacatacactaaaaaggtaaaacaaattttaattttggacggagggagtactttatagtggttctggccttcttgacaccatggtgaagctaacaatgatagctcgtgtcactaatggatgtccactagcagaagggttggatgatgggcgagattagaaggatgctgatttctataagcagcaagctaaacttctatttaagaacttgtcaaaagggcatcatgaagcttcacgaatgtcaactgagacatggccctactatttccattacccttgtgccatttatgatccttatatgtatatgtatatgtatgtatgtttgtgtatgtgtgtatatcagaattaggcttgcttttacatgttgctcctcatatagttcttttgtttgtctaatttccagctaaagatgatgcgtccatttgtaaacagttgggattccactgtggctatataaactgctttatgtaattgtctatttgtgtatcacaccattgtctctttaattgcaagaatatgttttgcaggcattcctttttccgtttgtgattcttcatttcttttcatttttattacagggctagcaacataagttggatccaaattataatgttatgaagactctacaagctttactttttaaggaatactaggcgaagtctcttcaatacacgatccaagggctcatggggtcttagggtgctgcaatcctctcgaaaattttgatctggtttgtgttcagctggaggatcctctgttctcaccatcacgtttggcttcttttctactttgtttcatgtttcatttctttgtacttgtcctggcattgtactgctaaagcaaccttgatgataaagtaatagtagcagtaaaattttcagaagctactagagtactatgcaggctctgggttgtcttcttatatgttcttgatgggccaaaggattaggtccttttttcctcctaccaacacttttgacaatagctcttagatgatgtagcagaagacgttttgttctgatgatctttttgtaactggagagattgtatccgtgaacagaagagttgcttatgtacaaacagagatactgtaaatcgctcgaagaaatccacttctcaactgacaattcccaaa

SEQ ID NO: 92865 - DNA, 3006 bp, Zea Mays
tgcacggttctaccggtttcgcatcccgcccgcccgccgcgctcctttccatcgatgtcgtcttccccacgcgctgcgcccgcctgccatctcagcgcgcccctcccacgctccctccgcgctccgtccgccccagaaaccgcgtcgcccacttccatctatggtagaatcttccatccgtaaaccgcgcgtggcccttccatccgtgagcccgcaatcctcgcccccaagggaccgcgccccgccatcttgcccccgagcccgcaatcccctccatctgcacccttcaatcagccgcacgccatgcccccgcctgccccgcccccgcgacaccctacgtcgcacgatgacctcgaaggggcacgctgcgtcactcctgcgtcctctccggagccgacctgaacgccgacgtcgcccgtcccatctccctctctctaggaggacacctcggtggccaacacgagctgcccttctccagctctgccccctagtacgcgccgatgtcgagttcagacctgaggatgccgacatgtcaaatcgagaattcttgtaccatatactggaggaagtcataaaagttggggcaaccactcttaatatcccagacactgtcgaatacactcttccttatgaatttgggaagttaatttctgacataaaggaaaacactcttagaattgaaaatgccatcatttccactcattgccagaatggccttggccttgcaactgccaacacattagcgggtgctcatacaggagcgcgactgttagaggtgactattaatggtattggtgaaagagctggaaatgcttcattggaagaggttgtcatggcaattaaatgtcgtcaggagctcttagatggtctatatacgggaataaattcccaacatattactttgacaagcaaaatggtacaagagcacaatggacttcatgtacaaccacatgaagctattgttggtgccaatgcctttgcccatgaaagtggaattcatcaggatggaatgcttaaatataaaggaacatatgaaataatatcctgatgatattggtttaacacgtgcaaattaatttggtattgttcttgggaaactcaggtattatgcaacctacccataccctcttgatttagacttcattttctccaatattctactgtgatgtctctcaattagatttctcttaccgactttctactttttacttttgtttgatggcatgcatcctctaactaaagagccataaatgttagatttgaatgctatgtatttggctacaaaataggtattaactgttggcgatgttcctattggtagtgttacaaaagtattggtagtagggtaatgatgtaaatcattacacttaagtcatgtcacaggcatatagcctctgattcagtaattatgcaatgatatgctatataggattggaaacgagctgagcggctccgctcggtgcgactcgatggctgatcgagatcggtttggctcgtccattgcacgagctcaagaatgaagctcggttcggctcgaagtgggctcgcgagccgtaccctggtaaatattattgtattatagaataataaattaaaatatatcaatgtgaaatataaaatcacccttcaatattatgagtaatctctactactacttaagtgtcataaatgtttgacataccataatttgttgattttggggactagaagggtatagacctctactacttgcgaagtcagcaaacaatgtagtcgtctagggcagcttctcaagcaattccccagggatctcttgcctctcaagagagcccatctcatctgcttcgatatgggaaagccagatttgtccctaaaattcgttcaagtaagccaaatggggttcctatgtatttatgggcttcaaattttgagcttgactgaaggaagttgaagccgatgtggcatttctttttcgcttgaggtacttgtgttgattcttcccaaggaatatcaataatgtcatctttgtatcaaaggtaagatccaaattgctgagagtattatatgtcaattgttccataactgcacgattgtctcttgttaaagaaataatgtctatttgtgttccttttcatcgtttcctgtgaacatttttattgtgccaaattggtgcattgcaaaagcttgcgaatgtaccaataatattttttttatcaacccagcaccctgccacccgcttttatcaggctcttttgttcactggatttgtggtactcattgcttatgatgttttgctaaagaatcctgatcagaatttcatatatggcaatgcttgccttccatttgcttgagcttggacggatatatgaagctgagagagctgctcaataaaaatgacttctggtcacagcataatgtatgtccttgatgtggttgtagttagtttcagttgtgaaaagcatatcatagcagcctttgagcagattaagtctttaacgaccagtcaggcaccaatgctaattgtttctaggttcttgaggatggggttgtgtgattttacctatctatcgtgttgctttagaagtagatgtgattgtgtttacttcaagaatgttcatacaatgtagtaacttattcttacatgatcaaatgtttacagctgactgtactagaaggttccttttgcaacctcaatttgagatttaagggaggattaccaccagaggcagtatacaatatcataattgatccaaagaataaaagggtgttcatgattagtaatgtgtgtacatgtgtgcttttactattcagatttaggcatgattttttgagtgtctttgtgtttactctttcatgggaacatttgtactgtgccaaattggtgcgttgcaaaagcttgtgaatgtatcaataatatttttatcaacccatcaccctgcaccctcttgtatcagactcttttcttgttagagtagttgttgcattcgtcttgataaagagagatcaatgaaaagatgcactgcgaga

SEQ ID NO: 92866 - DNA, 399 bp, Zea Mays
gaattcccaatatgtcagatcgctggaagcgcaatggcgtgctcatagcccaaaatctatatttgtacctcctctcggcggtttgacgtctgtctgtttgaacacaaagaagagatgaaacagttatacctctggggccgatgccgtcggaagccatggccgccggtccgaagtgccaaaaccaaccgacctgcgaatcaggggcgggcccagtgaaaaatggtcagatccgaatacaaatactagatttggggagttcggggtgtttgaattctcgcagaaggagcagaagggacggcatacctggaatatgctgtcgccggcgaagcggcctgatcgaatggcggcgccggcgcggcgctagggaaagaaaggcagagaaagacagtgtgtgcgcgg

SEQ ID NO: 92867 - DNA, 2249 bp, Zea Mays
atacacactgacacacctcacgcgagccgagacgcccagctcaccgccccaccgagtcccacagtctcagaggccacctcgagccccccctgccccgcaagccgcacccgccgctccctccgccatctgcgctgcgctgctctgctctgcggtgccaggctgccagccagtgccggcgcgcgcccgctgccgccccgacgggcccaccgttctcttctctccgcgctgcgcgccggctgggctgcaggtcagttaatgcgcccgtgacaggcggcgtcggggaggccaagggcggtgccgggttaatcccgccgtctctcgaggcggcgcccgcggaggaccaggcgggagggggagacggtgaggcgcggccatggggggcgccaaggcggaggacaaacccgccgccgccgctgcagaagattggtgctaccaatttggaaacaaggatgcatttgacttgaagcccccgaaaaaatcaccgatcgcgttgagaacggttgtcttcgctatgactatgttatgcgggatatctatttgctcaatgtgcatgaagcaactagggagtgatggctggtcaagagttgtcaagattgaagttgtggaacaaccatgtaataagtccattgctcctctttcggaggctcaatttgtgcgctatcctcaaccgataacttacagcagggaggaatgcaagtgcaatgctgtccggtcctttgcaattatatcatcgcagcgatctggaagtggctggtttgaaacacttcttaacagccacatgaatgttagctccaatggtgaaattttctctagaaaagaaaggaggagtaacatttcctctataatagataccctggataaagtgtacaatttggactggaacagtagcgcttccaagaatgagtgcactgcagctattggcttcaagtggatgctaaatcagggcctcgtggcaaaccatgcggacgtagtcgactacttcaaccgaagaggagtctctgcgatatttcttttcagaaggaacctgctccgccagttggtatcacaggtagcgaacaaccacgacaggttacttaagcaactaaacggaacgcacaaggcccatgtccacacgaagcgtgaggcccatatactggcaagatacaggcccaggctcaacacgacgtcactgatatggcagctgaaacgagctgacgagtacactcgcgacgctcttgagaacctaaacaacacccggcacatgagcgtctactacgaggacgtcgtccgcaacagaacaaagctcttggatgtcctggatttcctcggagtgccgaggaggaagctggtgagccggcacgtgaagatacacacgaagccgctgtcggagcagatcgagaactgggacgaggtctacagcgccctcaacggtacccagtacgagggcttcctgaatgccgctgactatctagtataacatcacgtttctggatgtagatagtgtgcgtgtgattctttcgtttcttgtttgtttctggcagaaattttgatgcggggtaggcgccttttgccgtgcatggttgcattctcggtaacctgatgctcctgtaactaaccctccagcttctctgatctttgtatttgccttgggtgtttgctgatgttctttcaaactatttgaaatcgggctgtcggagttccagatcccgggcggcaggatagttgatgtgacctagataaatgtacaagacacatcacaaatatataaaatatttctgtagtatcctcacaaatatatcaaaaatatttctgtagctcttattacatgatactctactatgcaaccaacagaagcaatatctcctcagggagcttttgctttattgccaaattaaattaagaaatgttctatgggactactacaacggaaaataagactacaagatcacctcagggagcttttgctaactacctgcaatatcaaggtgcagcagttagtcaaattgcacaacagttgtaaaaggaaaaaatacaacttaattaggcctagctgaatatgcgaccatattacagtttgataatagcaccttatactggttagctcctactgccagctagtaaaagaatcaatttgagttgagatatattcggtgttttgagtcttacaaggtctagatttcttatgcgagctccagaacaagagctgatgctccgcctccaccgttgcagacaccagcaactccgatcttgccactcttcgccctgagaac

SEQ ID NO: 92868 - DNA, 509 bp, Zea Mays
cttccacagttccacgccgccactccccccaacccgaccacgctgcgcctccgcttgacccccagccgagggaggaatgggtaagggtacgggcagcttcggcaagcgccggaacaagacgcacacgctctgcatccgctgcggccgccgcagcttccacctccagaagagtacctgctcctcctgcggttaccccgccgcccgcatccgcaagtataactggagtgtgaaggccatcaggcgcaagacaaccggtaccggaaggatgaggtacatgcgccacgtgcctcgccgtttcaagagcaacttcagagaagggactgaggctgctcccaagaagagtgctgccgctgccaactaagtctggatgttgctatcaagaacctgataagctagaacattggaacattttgcttgagttgtacttctgaactatttagcccaaatactctggatgtactggtttatagtgctttgaattaaatttatttgtactttataaaaaaata

SEQ ID NO: 92869 - DNA, 811 bp, Zea Mays
cttccacagttccacgccgccactccccccaacccgaccacgctgcgcctccgcttgacccccagccgagggaggaatgggtaagggtacgggcagcttcggcaagcgccggaacaagacgcacacgctctgcatccgctgcggccgccgcagcttccacctccagaagagtacctgctcctcctgcggttaccccgccgcccgcatccgcaagtataactggagtgtgaaggccatcaggcgcaagacaaccggtaccggaaggatgaggtacatgcgccacgtgcctcgccgtttcaagagcaacttcagagaagggactgaggctgctcccaagaagagtgctgccgctgccaactaagtctggatgttgctatcaagaacctgataagctagaacattggaacattttgcttgagttgtacttctgaactatttagcccaaatactctggatgtactggtttatagtgctttgaattaaagtcagacgccctggtggtttgatgtttcttcttttaattatttggtaccacagtttgatgatgctcatgctcgcatgggaaacctttgcgccctgtacggtattagaggagaaagagagctgcatcttccgagttacaaagttgattaagtgggcagtgatttatttggtggcttccatcatatttattaagttgtggaagcacacgcaaatttgctaaaaacattatccgaaccttttgtaaattattgtacacaggtcacttgcgtgataagcactgacagtaagtttctgtctgtaacggcgatgaaagataccccgtttcaaa

SEQ ID NO: 92870 - DNA, 785 bp, Zea Mays
tactccttccacagttccacgccgccactccccccaacccgaccacgctgcgcctccgcttgacccccagccgagggaggaatggtacgttcgcgccgccgctgccgcctccccggcagcccccgtccgcccgctcgctaacatgcagttgttgtggcttgcagggtaagggtacgggcagcttcggcaagcgccggaacaagacgcacacgctctgcatccgctgcggccgccgcagcttccacctccagaagagtacctgctcctcctgcggttaccccgccgcccgcatccgcaagtataactggagtgtgaaggccatcaggcgcaagacaaccggtaccggaaggatgaggtacatgcgccacgtgcctcgccgtttcaagagcaacttcagagaagggactgaggctgctcccaagaagagtgctgccgctgccaactaagtctggatgttgctatcaagaacctgataagctagaacattggaacattttgcttgagttgtacttctgaactatttagcccaaatactctggatgtactggtttatagtgctttgaattaaagtcagacgccctggtggtttgatgtttcttcttttaattatttggtaccacagtttgatgatgctcatgctcgcatgggaaacctttgcgccctgtacggtattagaggagaaagagagctgcatcttccgagttacaaagttgattaagtgggcagtgatttatttggtggcttccatcatatttattaagttgtggaagcacacgcaaatttgc

SEQ ID NO: 92871 - DNA, 2805 bp, Zea Mays
acgcgcacacagcacggcactacggcagaaggaaaaaaagaggcaggcggacgacacagagagaggctcggaacaaggaaagagtcgccggcggcggagaccccaaccgaaggcccccggtcgcttcgccgggcaaggcgtgtccgtgcccctcggacaccgggagtaaaaaacagtgaacgctaagctttgggaatggagttgacagtttctgctgaataacagaaaaaaaattactcgccttttcctgaatccatggaacttcttgatactaatggtcatgggaaaacaagagcacagaatgctgaaaatatggcaccagtttctgttaagagtccagatacatcactggaaatcaaagagaagtcgccccacaatttgacagagcaccaggaagaactggggccccctgtaggccatgacgggagtttgtcaccgaaaattctctcccacatacaaccaactcaggcatcggatgattcgtcaaaagatgagggagaccatgctgctgtaacaaataaggatggagttgaaaccatatccgaaaatggttttactggttcgaatattaggccaacagttgaaaagaaatctgaagaagacaatgtgtatagtcatgagaccgttgctgccacccccaaaaagaaagtagaaccagtaaagggatctgaaggctcatacacaggacttgttgacactagtgcaccattcgagtctgttaaagaggctgtcaccaagtttggaggaattgttgattggaaagcctacagggctcagtcattagagagacgcagggttgtgcaccttgaacttgaaaaggttcagcaggagattccacaattcaaagaagactgggaaaccgctgaggtggctaagtcagacgtcattgaggagctagagagaactaatagacttgtcgacgagctgaagcataagctggagagggcacagcttgaagtggaccaagcaaagcaagattctgagcttgccctgcttagggcacaagagatggagcaggggattgatgatgacgctagtgtaatagcccaaacacagttggcagttgccaaagaaagacatgaaaaggctgttgaggagctcaaattgctgaaagaggagctaagatcaacacatgaacaatatgctgtattagccactgaaagggatgcagccattaaacgggccgaggaagttgtttgtgctgccaaggatactgagaagcaagtagaggagctcactttagaacttattgcatccaaagagtctctcgagttagcccatgcttcacaccatgaagctgaagagcacagacttggggcagctatggccaaagagcaggatttcctggcttgggagaaagagctagaagaggcacaagcagagctaaaccagctcaacgaacaaattgcatccaaaaggaatgtggagtccaaagctcatgaaaacgagtgcaaactacttggcctgaaaagtgagctagctgcctatgtggaaaacaaattgaatgaagaggctggaatggttcaggagcaaggttccgacgaagcaaaagaaattagtaggtcaatcaagcaggctctagcttcaaagaggaaggagcttgctgaatttaaagggaaattagaaaacgcaagaattgaagccaatttagtaagagttgttgtagaatcactcagctcagagcttgatagggagaaagcttcacttgctacattgcagcagactgagggtatggcatgcatcacagttgcttctctagaagctgagctcgacaggacagagcaagagatagaattggtacataagaaagaagcagaaactcgggaaatgatggcggagcttccaaggatgttgcagcaagcagcccaggaggcagacgatgccaagatggcagctcatttggcacaagaagaactgagaaaggccaaggaagaagctgagcgaactaaggcttctgcgacaactgcagataccaggttgcgtgcagttctgaaagaaatagaggcgtctaaagcatccaaggggctagccatagcggcagttcaagcgatgcaagagagcaatgacgcaggaagcgctggtgcttctcctcgaggagtaacgcttcctataagcgagtaccatgctcttagcaagagggttcacgaagccgaggaacttgcgagcgagagggtggcagccgcgtttgcacaaatagagttggcaaaagagtccgaatcaaggaacctagagaggctgcaagaagcatccaaggagatggatgaaaagaagagtgatctccaaatcgcgctggagagggctgagagtgcaaacgaggggaagctcggtgctgagcaggagctgagaagatggagagctgaacatgtgcagcgccggaaagcccacgaggctacacaacatccagtcagtcctgtgagaactccaccgaggatgcttgtcgagcagaagggctcttaccgggaagaaaatgaacttcccacagatccgaagttgcacaagtcaaatggtagtatggatcagtttgtttccagcgagaaatcgcggaaaaagaagtcgttcttcccccagatgtccacacttttgtctagaaaggcacagacacaaacataagactataagagtgattgttctgaagaaaagagttcgttcatgtatctttgtaaaatgtaaatggtgtaaattttaatttttgcccatgctcttgtaaattgtctatttgtctcatacttgaagaagactgagtgtatgtctttgtatgatgttcttggagaggatgctgttacccagatctttctttgctttaca

SEQ ID NO: 92872 - DNA, 497 bp, Zea Mays
ttgagccagccaacaaatagtaacaataaacaatagtaatccttacatcacaccagtgacttacacgggcagccgattccatcggctgcaaaatttatcatgcatgatatggtatcgcttcgaatgtctttttgcagtgcaacagcacactctattttcttctatgcaacaaaatgaaccaaaaacatacacaaccagcaccatgccacaatcaccaaaacaaaccagaatagacagacatggagcgaaaatatgtttcacatgtgtctgatgccaaggatgctctgagctgtgtaccagcgtggagcaggctcagtgaagtcagcaccaccactctctagcctgacgaggcatggccacttgttgcagagggcttcgcaacgtagatctgcttcatcctaccagtgcctgaactcctgtcggaaccagaaccttgattcctaccctggtaccctgatcgtcgctgccactcgttaccagtaccagccttctgagtc

SEQ ID NO: 92873 - DNA, 1049 bp, Zea Mays
cagtaacggcccgcttggcgtgcgtcgccgtccaccgccgcgacctcgaggtgtagggccgggttgctgaccgcatcgcccggcgtgtcgctcggcgtcggttcgggcaggccgcggccgcgcgcgtgatcgatggggaagagaccgccgaccgatccgaagcgcttcggggatacgtcgaatgcaggttcatcgtctggatggaccgatgagaagcacatgctctacattacctttttggaggaatcatttgttaaccaattgtacagtagtaagggggaaatgaattcggcagaatcattctatgcaactccaggtgcatggcaaaaatcttcttatagtggaaatggtagaaacacaaaatatgatgagggacatggatattgggggactgtcgaggttgacggagatggagctgattatatggatgatgatgcatcaactaatggtccaagacaagagagagatactagttaccatgcaaggcaaaggaattccagggggtcagctgctttccgtttgcgccagcatgggcattcgttttcttggagagaatcatcagaccagaacttcttggatggggagactcaaggtagcaaggaacaaggaagagggtctagcaaaaaccagcaaaagcatgctgatacgaccaaggtcggcccacatgattcatgaaatcacaggtttacgctagcagctcttttgtgattcaggagatcagtcatcctcatggggaagcttaggggccaatgggattggttcatgcaagctaataagtttgtaagaatagcagtgatggaggtgggcagatgtatataaatctgttcattcatctccagatagccaaaagataggtgtttcctgttggtagtgtatctattaggaatgtcgtagattgctaatgacttcctgtaaaatcgtccaggaaggtttcagatattgaggtggaccagctgggtaactgttgttgtgtcccgtaatgtacaagtacagatgtctgcaatgttcatttgacttgttgacaaaatggaattttatgatatttgaaa

SEQ ID NO: 92874 - DNA, 2429 bp, Zea Mays
agaagcctatcaaaacccgcaaaaagaccagcaaaacccaaatcaaaatcgcgcaaaacatatactcccgcgcgacggcgagcgcatcttatgccgcgcccactatgccaccgtccgcactcccgcgcggcgtccatgccgtcctcatcacctcaggccacctccgcaacctcgatccgcacctccaggtcccccctctcctcctcgtcaactccctgatcgccgccttctcccgcgccgccctcccgcgcctcgcgttgccgctcctccgccgcctccttgcaggcgcccacccgctccgccccgactccttcaccttcccgccgctcgttcgtgccgccccgggtccggcctctgccgcgcagctccatgcctgcgcgctccggctggggctcctccaccccaacgtcttcgcatcgggttccctcgtccacgcctacctgcgtttcggccgcgtcgcggaggcgtatagagtgtttgatgaaatgcccgagcgggacgtgcccgcgtggaacgcaatgttgtctgggctgtgccgcaacacccgggcagcggacgcggttacgctattagggaggatggtcggcgagggggtcgcaggggacgccgtgacactctcgagcgtcctgccaatgtgcgtcgtgctcggggaccgagcgcttgctctggtcatgcacgtgtatgcggtgaagcacgggctgtctggcgagctatttgtgtgcaatgccttgattgatgtgtacgggaagcttgggatgctaacggaggctcattgggtgtttggtggaatggcattgcgggatctggtcacgtggaattcgatcatttcagcgaatgagcaaggtgggaaggttgctgctgcggtggagcttttccatggtatgatggaaagtggggtttgccctgatgtgctaacactcgttagcctggcatctgctgttgctcagtgtggagatgaactcggtgcaaagtcagtgcattgctatgtaaggaggcggggctgggatgtgggtgacatcattgccggaaatgctatggttgatatgtatgctaagatgtcgaagattgatgctgcccagaaggtatttgataacttgcctgatcgagatgttgtgtcctggaacacattgattacagggtatatgcagaatggacttgctaatgaggcaatcaggatatacaatgatatgcacaatcatgagggtctgaaaccgattcaagggacgtttgtcagtgttttgcctgcatactcgtacctgggtggattgcagcagggaatgcggatgcatgcactgtcgattaagactggattaaatcttgatgtgtatgtcactacttgtctgatagacttgtatgctaaatgtgggaagctggtagaagcaatgtttttgtttgaacatatgcctagaaggagcacaggtccttggaatgccatcatagctggtcttggggttcatgggcatggtgcaaaggcactcagtctcttctcacaaatgcaacaagaagaaattaagcctgatcatgtcacttttgtttcattattggctgcctgtagccatgctggcttagttgatcaaggtcggagtttctttgatttgatgcaaactgtttatggtattgtgcccattgcaaagcactacacatgcatggtagatatgcttggcagagctggtcagttggacgaagcttttgagttcatacaaagcatgccaattaagcctgactctgctgtttggggcgcactacttggtgcttgtaggattcatgggaatgttgaaatgggtaaagtggcctcacaaaacctatttgaacttgatcccgagaatgttggatattatgttctgatgtcaaatatgtatgcaaagattgggaaatgggatggagttgatgcagtaaggtctttggtcaggcgccagaatttgcaaaagacccctggatggagttcaatggaggtcaaagggtcagtgagtgtattttacagtggcacacagacagaaccccaccctcagcatgaagaaatccagagagggctacatgaccttttagccaagatgaaaagcgcaggctatgttcctgactacagttttgtcttacaggacgtagaggaggatgaaaaggaacagatcttgaataatcatagtgagagattagctattgcctttggcattataaatactcctccaggaactccgctccatatatacaagaatttgcgggtctgtggggattgtcacagtgctaccaaatatatatcaaaaataactgaaagagagatcattgtccgggatgcaaaccggttccaccactttaaagatggacactgctcttgtggagatttttggtaacagttaaacataaatacaacattttatttccctgagttctcctggttatttaatctatatctatactactatattacgaaccta

SEQ ID NO: 92875 - DNA, 159 bp, Zea Mays
atgcaggtttccacattgcagacacacaagagtccagcctacgccaacgctcctgcagttgtctgcactaaagatcaggacacgaagatcgcgagctttatcaaggctcggtttgtgcggaaggtgtattttagtgagatctccaagatgaagcattag

SEQ ID NO: 92876 - DNA, 201 bp, Zea Mays
ccttcccttcccttccccctctcctcacttgcgccaccgccatcatcgatcatctcctcgagatcgtgtgtaatacaggctatatagtagtcatatgaaagaggttgtgtcacttaatttaggcactgttgaattcggagcgttgtttcgcggaagcacatgtgatgaggggagggggaccggccgggaaaataaaaaaaa

SEQ ID NO: 92877 - DNA, 235 bp, Zea Mays
agaaagttacatatatttatataatcgaaaagagttatgctcttaccactatataatccatcagtttaaactttgcaaaagtcacacaaccaagtcaccccatactcattatcccactaaattcaccaaacatattgtactcaaacttaacacactatcaaaatcaacggtccagatagttggataactcatctcccttccccataaactactttatttgaatcatccctcatcc

SEQ ID NO: 92878 - DNA, 482 bp, Zea Mays
agaaagttacatatatttatataatagaaaagagttatgctcttaccactatataatccatcagtttaaactttgcaaaagtcacacaaccaaatcaccccatactcattatcccactaaattcaccaaacatattgtactcaaacttaacacactatcaaaatcaatggtccagataattggataactgaactcccttccccatgaactactttatttgaatcatccctcatcccttcccttcccttccccctctcctcacttgcgccaccgccatcatcgatcatctcctcgagatcgtgtgtaacacatgctatatagtagacatatgaaagtttagggttgtgtcacttaatttaggcactgttgaattcggagcgttgtttcgcggaagcataggtgatgaggggaggggggaccggccgagaaaataataataataaaaacatgctttaaatatagaatggtatgtacgttaaaga

SEQ ID NO: 92879 - DNA, 894 bp, Zea Mays
atgggaaaggagactgtggtggaggtgcatggagcggtggcggaggagaagcagcaggtgaggaacggagaggagactgcagcggaggacgactccggtgggtcggatccggattcggactctgaatcggatttagattcggagtcggactgggactcgtattcggaagaggaagaggagcgacagcagcagagaaagaaaaaggagaaacccaaaaacaagaagaagaagaagaagcagcggcggcggcaacagcagcagcagccggcatggctgatcacactgctgagaaccaggttctgggagccatgcaaggagcacgtgtcgaagaacagggcggagcagtgcatgttctgcctcaagtgctgcaaggtgacctgcccccgctgcacccacgacctgcctggccaccgcctcctcaagatccgccgctacgtctaccgctccgtcgtccacgcttccgatatgcaggcgctcggcgtcgacgtctccaggatccaggcatatgttgtcaatgcaaagaaggtgctgcacctgaggcccatgagcaggtccaagcatttcaggcctcaggcagggacgccgcgctgcgtgacctgcagaacctggctccgtagcgcgcccaacctgttctgctctcttgcctgccaggggaatgttgatgtagcgcaagacgacttctcggggcccgaagctgaggtccgctacaggagcctccaagtgcagatggctgaaccatcaggggctgcagccgatgagctgcctggccctgaagctgcgcacgaggtgcctgcgcaggttccgccgccgccgccgccggccgcaaatcagaacgcgtcgctccgcaggcggccgcgcaagcaggcggcgccggagagggcgccgttcttctga

SEQ ID NO: 92880 - DNA, 99 bp, Zea Mays
gtgtgcaatcgacagctctggatcatgttgccgaaacgtttcttgcgcgttattatgttcgtacatgttttgcgtttcaggtacacgtgtgtaatcgac

SEQ ID NO: 92881 - DNA, 5735 bp, Zea Mays
ctgccaatggaggacccaaataaaacgttttctgacgtagttaagcttttgacatcatggctgccgcgacgctccaacccagataatgtctcccgggacttctggatgcccgatcacagctgtcgagtttgctatgactgtgattcacaattcaccatattcaaccgcagacatcattgtcgtcgctgtgggcgaattttctgtggtaagtgcactgcaaactccatcccagtttcaagtggccctgacagaaatgtcgatgagggggacaggatacgtgtctgcaacttctgcttcaagcaatgggagcaagaaagagtcacttccctcaaaccggtgctgccggtgctcaccccttccctgtctgagacgagtttgttcagcaccaagtcagctatcaccatcaatagtgttaccacaacggcaggctcttactctaatgggaattatcagcatgtgagctgtgttaccagcactagtcctccaaagtgttgccatgacaagacctcccataatatgcaagacactcatgctcctgagaaatgtatgtccactgtttcaaacaaagatgactcttcagttcagtttggctactacacaaacaggagtgatgacgaagatgaagaataccctgcttactgctctgataggcaggtacaacatcaacaacagagtggacaatattatggcccagatgagttttatgagcttgatacaccctacaattcaaaaatgtcgatcgttgaagaatctatgacctctaaagaactatccccacatgtgcttgatcaaggatttccgagtgcaccgaccattacaaaatcagacaatgaaccagaacattattatagttctgaatgtggtgctgcttcatccatttatgctttagaaagtaatgatacgaaccctgttgattttgaaaaggatgaacttttctggcttcctcctgaaccagaagatgaagaagatgagttgcaagctgaattgtttaatgatgatgacggtgacgatgacgatgacaaatctgtagctgatggtgaatggtgtcgaattcggtcgtcaagtagttttggcagtggagagttccgaagtagagatcggtcgggcgaagaacataagaaagtaatgaagaatgttgttgatggacatttcagggctttgatctctcagctactagaggtggagaatattccgttgcatgaaggtgatgacatgggctggttggagattgttacttctgtatcatgggaagctgccaacttcctcaggccagacacaagccagggtggtggcatggatcctggtggatatgtcaaggttaagtgcttagcatgtgggcaccgcaatgaaagtactgttgtaaaaggagtagtttgtaagaagaatgttgcacataggcgcatgacaactagaatagagaagccccgtctcctactacttgcaggagctcttgagtaccatcgagtcacaaatcagctgtcaagtattgatacattgctccagcaggaaacagatcaccttaaaatggcagtcgcaaagattgtagctcaaagacccaacttgcttttggttgagaattcagtttctcgatatgctcaagatttgcttctagaaaagaacatatcgttggttttaaatatcaagcagcccctcttgcaacgtattgctcgttgcacaggtgctcagatagttccttctattgatctcctaccatctcagaagcttggttactgtgagttatttcatgtagataaatacgatgaacagtctgttagctcggttaacgtgtcaaagaaaatggtgaagaccatgatgttctttgaaggatgcccaaaaccattgggttgcactgttctgctaaagggtggtagcatggatgagctcaagaaaattaagcatgtggtccagtatggtatttttgcagcatatcacttggcgttggaaacatctttccttgcagatgaaggtgcaaccctaccagaacttccattgttgtctccattgactgtagccttgccagataaacgatctactgcagacagctccatttcagcagtgccaggcttcacaattaatgtttcaattagccagcaaactgatagttttgaccacattggtaccgactacatcatgtcaacccaaccaggtgaaaatgctgtggctgaagcaccagtatccagcgaatgctttagttctcagaatacctactctcattctcttggaccttggtgtgctaataacagcaatttcaataacggcactggtgatggagatggattagctaatgtcactgcaactccaaattctgtttccatatcttctttgtctacatctggtgcactcacaaaccatacttctagatattctagtgtagagaaaaacagtatgcattttggtgattatcatgatggttcaatgaggttacatggtaagacggtgacaatagattcaaccagcacagcaagccattatcaccagagcacagtcaaagctagcactaatatcaatgtcaatgagtcattagaaggtccatatgctttggctaatgtgaaaaccatcaacgagaacaattctattgtagtccaaccagtgtctactgctgctgtacaataccaagagaccagtcaaggagatgatagcacatcaaataaggatgaagtggtgccttctgatcatcaaagcatcttagtctcattgtccacacgttgcgtatggaaaggtactatttgtgagcgttcccagctgttacgcatcaagtattatggtaactttgataagccccttggaagatttttgcgggattacttgtttgatcagggctatcagtgtcgttcctgtgataagccacctgaagcccatgtccattgctatactcatcgccagggaagtctaaccatttcagttagaaaacttaccgaatttgttttaacgggtgaaagggatgggaaaatttggatgtggcacagatgtctgaaatgtccttggagtaatggatttcctccagcaactcagaggattgtcatgtctgatgctgcctggggtttgtcacttggtaaatttttggagcttagcttttcaaaccatgcagctgcaagtagggtagccagttgtggtcattctctccacagggactgcctccggttctatgggtttggcaaaatggttgcatgcttccgatatgctcctattagtgttcactctgttcatttaccacctcataaacttgattttggccaccagcccttggattggatacaaaaggaagcaaatgaggttattgagcgagcaaaacatctatttgatgaagtattgcatgctttacacatgatatctgacaaaaaggttcaaggcagttcgattaacatggaatttagcaattacattgctgatcttgaaatcatgcttcgaaaggaaaagtcagaatttgagggatgcttgaataaagtcttgagaagggatatgcagaaaggccaaccggacattcttgagatcaataggctgcgaagacagttactcttccattcatacttgtgggataaaagactggtatttggcgcaagatcagatagatgtcgtcatgagaagacccattccatagatagtgtcgctgagcaaaatgtaatactaaagcctcaaagtgaatgcagcgggaataggtctgccaacaaagatgctaaatatgttgagtgccttcaggaaagtatttatggagggaatcacactggagttgatgtgggtactgtcaattcgaatcatgtccatcaaatggctacaggcgaattggattcgcttcagagagacatcaaagctcctctatacagcagtgttagtgtaaatggtgagtcgattcccttggaaccagatcttgttgctcgacgcaccctttcagaaggtcagtttcctagtgtattggatgtgactaatgcacttgaagcgaaatggaccggtaaagatgatcctgtttctagcaaggtaaccatgccagaatctacagcatcttcagaggactcagaagaacatatgggtgataatacaccttcatacgcctctatattgctgagcaagctaggggacagtgcagcagatcattctaattggatagagatgcctttcttactattttaccgttccctcaataagcaatggaatcgatcaaaccgatttgatgcactcaacgaatatagtcccgaatatgttcctttcttaagggaagtggagcgtcatattggacctaaatttttctttcctataggaatcagtgatactgttgttggagtttatgatgacgaacctactagcattatctcttatgcgctggcctcccatgaatatcatcttcagatgtcagatgaactggaacgagaaatgacagacacttcactcccactatgtgactcaagaagtgtctcgttaactgaactggatgaatgtacttctgaacttctaagaagtgttgtctctacagaggacattatcctctccatgtctggaagaaagaacccacttgcttcagattcacttgtgcctcgaaaagtaagtcacataaaagtgaattttggggatgaaggtcctctaggacaggtgaagtacactgtgatttgttactatgccaaacaatttgatgctctgaggagattatgctgtccatcagagcgtgattttgtcaggtcccttagtcgttgcaagaaatggggtgctcaaggaggcaagagcaatgtattctttgcaaaaacaatggatgatcggttcataattaaacaggttaccaaaactgaattggagtctttcatgaagtttgctccagattacttcaaatatgtatcagagtcgatttgtactggaagtcctacttgcatcgcaaaaattcttggtatttatcaggttaagagcctcaaaggaggtaaggagatgaggatggatgttcttctgatggaaaatcttttgtttgagcgcgatgtgacaacattgtatgatttaaagggctctgccagatcaagatataacccagactcaaatggtagcgataaagtacttcttgatcagaacttaattgaagcgatgcctacatcacctatatttgtcggaaacaaggcaaagaggctgctggagagagctgtttggaatgacacgtcctttcttgcttccatcgatgtaatggattactctttacttgttggtgttgatgagaaaaggcatgaacttgtaatgggtattatagatttcataaggcaatatacgtgggacaaacacctagagacatgggtgaaagcttcagggatactaggtggaccaaagaatgtgtcgccaacagtaatttcaccaaagcaatacaagaagcggtttaggaaagccatgtcggcctactttcttgtcgtcccagaccagtggtcgcctccagtggtcatccccagcaagcaagctgagagtggtcaagacagggacgaacaggttgtcttgacagaattgtgagatgcatgcattacttttaggaacattcagggaataactcctcttttttgcaacatctatagattttgattttatttaaattttgttcattgttttttcttgtagctgtattttctgggtattcctaccctttcctttttttggggaggatctatagaaagttttagcccaagtctttgaaactggtcattgtaaataccatccttcttctaatgaaatgatacacagctctcctgcgtgtttaagaaaaaaaagtctttgaaact

SEQ ID NO: 92882 - DNA, 615 bp, Zea Mays
agctgcctcagctcacaacctagacagagagagataggcaggccagctagcttcttgtagctaggtctcctggattactgtgacaatgtccaagataggcagcttcgtgtccggcctggtcagccaaattcattagcatcgatcgcgcgcgcttgttcatgcatttgacgtgcgtgcctgcatgcacagccggcggagctacggcagcgtccagcacgcgatggcggtgaatgctcaagcctccgctgctgcagcggcggcgacgaaagcgggcgtcgtcgcggcagcggatgcgtcgggggcgaccaacaacaagacgaagcaggacaagttctggatgagggaccccaagacgggctgctggatcccagagaaccggttcgaagaggtggacgtggtcgacctgcggaaccggctgatccacgtccaccaccacaactaaactccttcggaagcagcagcagatcaaacaggcgtatgggctaatgagcaccttgctggaatcagtcgtcagctgaccaccgtcagcatctatcacgtggattatatatgctgtaaaataaacactgcgcatttccatacttactataattaaagtaccagtttcaacgatca

SEQ ID NO: 92883 - DNA, 549 bp, Zea Mays
agctgcctcagctcacaacctagacagagagagataggcaggccagctagcttcttgtagctaggtctcctggattactgtgacaatgtccaagataggcagcttcgtgtccggcctggtcagccggcggagctacggcagcgtccagcacgcgatggcggtgaatgctcaagcctccgctgctgcagcggcggcgacgaaagcgggcgtcgtcgcggcagcggatgcgtcgggggcgaccaacaacaagacgaagcaggacaagttctggatgagggaccccaagacgggctgctggatcccagagaaccggttcgaagaggtggacgtggtcgacctgcggaaccggctgatccacgtccaccaccacaactaaactccttcggaagcagcagcagatcaaacaggcgtatgggctaatgagcaccttgctggaatcagtcgtcagctgaccaccgtcagcatctatcacgtggattatatatgctgtaaaataaacactgcgcatttccatacttactataattaaagtaccagtttcaacgatca

SEQ ID NO: 92884 - DNA, 1359 bp, Zea Mays
atgaggaaccaccacaagctagctcctaccaccccttcctcctcaaagaacaaccacagcagcaacaaggcggagcagccacacctctcgggagcttacattaggagcctcgtgaagcagctcagctcctcagctgcagcaagatccaaagaccacagcaccatggtgggcaccaagccacatagccaccagccgccgccacaagaagacgccctcttgcagcagcagcagcaggcccaaacagcaccaccacagcagcagcagcagcagccacacaagaagcaggtgaggaggaggctgcacacaagcaggccgtaccaggagagactgctcaacatggcagaggcaaggagagagattgtcaccgctctcaagatccatagggcctccatgagacaagccaaagagctgcagcagcagcagcaacaacaacagctgatgcatctgcagctgcagcgacaacaggaggttcatcatcatccagcgcaagagccaagccaagcagcaaccggagcttcgtcgtctgcgccgagctacgcttcctactcagattacctgtacaactctccattttcgcatttcactgcccctactcccagtagctactcttcgtcgtccccactgatgatcacttacgacgacgcaccagtcgcgccgccgcccatggtcgtcagttctgagcataacctagatgaccagctgctccctgctctccccttgcagcctctaggtctaaaccttagcttccagggattcaatagttgtagctccgccgtcgccggtgacgacaccaagcagaacagcacctgctctttcgatcctccgttgctccaaccgtcaccaggttcctcctattcggtctactcctctcccccggtgacgatggcgagccacgacctgtccgctgtcgccatggagaacacctcactggcagcagcagacgcgtcgctgcaccgggtgcttgacgacgaggagatggcggctatctactcgatcgggcagcagcacgacattgagtggagcgataccatgagcctggtcacgtcagcgtggtggagcaagctccttgagagcatcgaagacaagggcaacgggacagcagccgatcaggaggccggtggaggtgctgccagtgccaacatggtgatgatgatggaggatccgtcgtcgtcgttggtggacatgcccgattgggccagcgataaccttggccatgaggctacccatgaaagcaactctagttttcccgggatacatttgaatgactactactaccatcaggacgaagatgtctccttgcccttgccccgcatggacattggagatatcgaaggatgggatacagaatggttctcttga

SEQ ID NO: 92885 - DNA, 273 bp, Zea Mays
atgggggaagagtgcgcgcaggggcgagtggatgctagggggcgcggccatcagcagagagggggagggaatgggagtggcggcgggtgtggggagcttgccctggttcggcggtggctgaagacgaagctgagggagggggcagccatggagaggggcagcggcttgctcccaggcgtgcacgaagaagaaaggtgtggggaggatagagaagagcctagaacaagtacggtggataaggatgagaatgaggataagataaaacaaatataa

SEQ ID NO: 92886 - DNA, 608 bp, Zea Mays
agtatctcgacaactgtagcctgcacgtcccatattcaagcttggcgtccacttgtctagccctgctccttccctatgccgacgctgctcactgcctctccctcatctccccacgccagcaacaaggaggcaaggacgtcgtacctttcctggtggccgccatccctctcctctcctgtttctggtggtcgatgccccttgttccagcagcaagcagctcccttcccttgccgtggatgtcaactacctccccctgcttcctactcctcctcccatggataagctcgcccttttgctgcccgccctcaatccctagccgcttccgcttcctcctgcacgtggtcagcgcagcgtgcgtggcttgcctgcagcagcgtggtcagcgcaagctcggcgtggctgacgcagcgtggttggtccggccatggcgcggccaggccaatgcctcggcatggtcgtgcgtgtgtccccggcacggcatcgcgctcgcgtccggcacagcctgcgcagccccgactcgacctttgtgcgatcccagcgcagcagcagcatcgccgtccacgtgcctcgccgcgagctcgtctacccatccgtcgtcgctgcgaggt

SEQ ID NO: 92887 - DNA, 1069 bp, Zea Mays
gagcgttcagtttcttacatggtatcagccttatctcgattcccacctctccccacctcctgcttccgcacctctctagattcaccatggtgagtccgtcaggatcatcctcctcgagcaccaacctttttgttgatcccgctccaccctctgcctcctctctggtgatgctcaacatccgaagccatgcctccatcgtcctctctaccgatgcaggcaacttccgtcagtggcgttcgtattttgaactcaccttccacaaattcggcctcctcgatcatatcgacggcacggtggatgccgccgctaagttcgacgaccccgaatggcttcaagttgacgcctgcatcgtctcctggctttacaacacgatctccacggagatctggaacgacgtcaaccgccccaacacctgcgcctactccgcctggactgcgatcaacaaccagttcctcgacaacagccttcagcgcgccgtgtacgcccagcaggacttccatagcctatttcagggcgacctgggcatcgctgagtactgcggcaagctcaagtgcctcgcggacaccctctacgactgcggcgcccccgtctccgatcccgcactcgtcatcaacaccctgcgtggtttgaacaacaaattcagccaggcggtcgctgttctctccaccatgaaacctcctccaaccttcctctacaccaagtcctatctcctacaggaagagcaccgcatgcgccactcccagaagatggaagcgcagacagcgctcctggcggcggcctcgaccgaccaggcgactcggcccaccgctcccgcccctccatcgtccccggggtccaccaacaacacctacgcgcggcgcaagaagaggacgaccaacgatggtcgcactcgccagaacaacacaggtggccatccggtgcctcctggcggcgcgcctccaccaccgtgggcgatgacccacaacccgtggcaaggtgttgtccgggcgtggcccatgaatgcctggcggcccagtgtcctcggatccaggcccggtgtccaccccgtgtcttctccaccaactctccc

SEQ ID NO: 92888 - DNA, 552 bp, Zea Mays
tggatttgaacaagaatgttattcctttttgccagagcagacagatgagaaaacaaaagggaagcaacaatccttggaaaacttgccatcatccctctccttccctcctgctactatgctacaaaacatctcatcccgcccaccatcctcatgatgcctcctctaccaaagaggaggagaggaggaacaaagtttcccccacccacccatttctctacacaaacacacccacccttatttctcgtgcttcctttttttttagttttgtcatgtttatcttacagcgtccgccggttcctccagctggattttttttttgtttcgtcactagactagacggaacgacggatccgcaccgcgcgcccatcatgcgacgacgatgccggtggtgaagaagatctgcccgccgccgctgcacggcgagccggccaccatctcagcggccgacttcctgggcacgtcggcggccgtgctccggtgtccttggctggcaagctgctcctctatgcggaccagaggaggagatcaggagaggttggagggcgaggaagt

SEQ ID NO: 92889 - DNA, 1398 bp, Zea Mays
gagaaagaatccaactcgcaatttatgaatgggaataaagatgagcccagtgcctcttcatttttatgcacgcccagcacgcccagacggcggaggaagggggaaagaggagggcagagcagcaacagtacatcgagcgagggagtagagtaaattgaatcaggtttcgtgtcgattcggaggctttcgcttctgcttgcggagttgcggtggagatttgaggcctgcggcgaagatggcacctgcggaatccggggagaaggcgaccagcttcgccatggcctgcagcctgctcagccgctacgtcaggcagaacggtgccgccgctgccgatctcggcctcgctatcagagctgaatccgatgcaaagaggacgtcgacggacatggaaaagggggagacggggaaggagaccatggatctcttcccccagatcgctggattcggctcggaggccgccacgaaggaagcccctgatgcgagggagccagagaagcgccagctgactatcttctatggcgggaaggtccttgtgttcgatgacttccctgctgagaaggcaaaagacctgatgcaaatggccagcaagggttcacccgtagcccagaaccctggcctgctgcctccctccacagctgcaaccgttactgacagcaccaagatcgcagcagtgccagccgcaccaattgctgtggccaacgcccagaagagtgcagcagatataccgcaggctcccaaggcatctcttcgcaggttccttgagaagagaaaggatcgccttactgcgaaagcaccatacccgggttccccttcagatgttacacctgtgaagaaggagatgtcggatggtcagccatggcttgggctgggacctcagatcgccaaccctgatctgagcttgtccaaggaggcgagccagtgatcgatgatccagcatcaccatcttcaaaactgcgatactcaacagccatgtgtggaagtgttctgttttgggcccctatcattccgggttttttttcgcatggataaataggttgtacgaaagtaaagaacacagctaatgacggacttcagtaaggattaccggcgctggggcaggtttggctgatcagcctttgctggcctgacccaagtggccattttagaaagatgaaaatgtaatgtagtagttgctagaacaagttggcatcttgggatgttctgtgttgtttggctttggcactggtgcgtgtcagtgtcacaaagctatttattttcacagatacatgctatatgattttttttattatcttctggttgtctctgtagggttatgaaatatcacagcttttctttctaagtgattgtgatcaatgcccctggactatcagaatgttgttctctgaagttacaatctac

SEQ ID NO: 92890 - DNA, 512 bp, Zea Mays
gtcctagaataaaccttttattcttcaatggcaacatagtcgtggccaccaccacaccacaccacctgaccccgccattcccttcttctcttgcaggtcatacacagacgacgtcccggctccgcatggccaacaccaagggctcgtccaccggcgcaggccatagcgacctcgacagggccattttgcacgagcagcaccaggcgttcatggcctccgtgctccgcaccgggcttcataaatgtgcaccaccagcaacacttccaccaatacccctccccccccccccccccccccccccccccccgcctcgtccaccgccgctcgagcgtctcctgccttccaccaccaacactactgcgcacgaggcaagaatgcgggaatcgtgggaaagaaattgcgggcgggcgcgctggggcgattgggggaaatctcgcgacacgcaaatttgcgcgaccaaagcgagtggatgcgggacgcaaagctgtcggggaggagaaggaggcactgtt

SEQ ID NO: 92891 - DNA, 420 bp, Zea Mays
atggtgtcgcaggctcccgtggcgggggccggggcgggcgccagcctcgccgcgtcgctgtgcaagaagagcaaccgcgtcgcgcgggtgctcgcgtacgcgctgctcgagtggatcctcatcgcgctgctcctcgccaacggcgtcttctcctacctcatatccccggttcgccgccttcttcggcctcgcgccgccgtgcgcgctctgctcccgccttggcgtcgacagcctcttcgagacccgcccgccgcaccaccgaggcgccgagcccctgcgccgcttgctgtgcgacgcgcacgctgccgagctgtcgcgctcagattatggcctgacgcgcatgccgctgcttgcttctactcgccgcatggctcagattatggcctgacctgctcgaatggacgaacgctgtgttgttga

SEQ ID NO: 92892 - DNA, 1436 bp, Zea Mays
gcaaggaaagcctcttgagagtgttaagaatgccctgtccactactctctctgatcttattccaggagattacttcaacataataacatttaatgatgagcttcactcattctcatcgcatttggagcaagtaaatgaaaaaacaattggaaacgctattgaatggatgaacttaaactttgtcgctcagggtggcactaacatcatgcatcctttgagtgaggcaatgactttgctgtcaacttctcacgatgcgcttccacaaatctattttgttactgatgggtcagttgatgatgaacggaatatctgccatacattgaaaactcaacttattaaaagtggatctaagtctcctcggatttctacttttgggctaggttcatattgcaaccactatttcttgaggatgttggcatcaattggtaagggtcactatgctgctgcatttgatacaggatcaattgagggtcgaatgcttcaatggttccagaaagcttcaagcacaatagtgtcaaatgtttccattgatgccataaagcatattcaagattttgaagtggattctgtatatattccagacatttcagcaaaatatccattgtgtgtttctggaaggtacaatggcaagcttccggagacacttatcgccaagggtcacttggctgacatgagtgaaatatctattgaattgaaagtccaacatataaaggatatacctcttgataaagtattggcaaagcaacagatggatcttctcacagcaaaagcatggcttatggagaacaaggagcttgagcgaaaggttgtgaaattaagcatacaaaatagccttccttctgagtacacacgcatggtactacttcaaaccagtctggacaaaatagatccagcacaacaggcgaagaataaaccaacgaaacaaagcagtagcccagatgagctgccagcgatgccgctaggtggcctagcggtcggatttggcgacgtagcggcaacaacagagaacctgacaacaggattcggagacatgaaagcagccgagaagtttgtgatgttggagaaggccgctggctgctgcagccgcatggcggactgctgctgctgcatgtgcttcatcaaggcgtgcagcaagatgaacgaccagtgcgccatcgtcatggcgcaggcctgcgccgccatcgcgtgcctgggatgcttcgagtgctgctcagagctgtgctgcggcgggtccaactgagtgaggccacagcaaccgagcaagttggtgagaatgtgttgttgtatagtgatgtaaatgctcccagtaatgtatagaatttggcatcacgtacgtgtttatctaacttggcttgatcagtaagagcgtcacgtgtgttaatcactgtattaagggacagaacagaagcgcacacgttccgttagctttgtgcaaa

SEQ ID NO: 92893 - DNA, 1131 bp, Zea Mays
ctccacacgcatgactctcccacctcattcgcttgacctcccttccacttaaaccacgccaaaaaccagctcgcgattcctcccactggcctgaatctgacccgcatcgcccgccatccccaccgccgcgcctcttccgggcagccatggacgaggccttcgcgcgcgcggtggaggacggcctcaagctcaccaagcgcctcgtcctgcccagcgggggcgggatgccgccgccgccgcgcccgcacctggcgatggaccgcgacgaccccgccgcggcgctgcagcagctcatgccggcggcgcccatggcgtacgccgtcgtcgtcgacccggccgccgtcgacagccccgacgtgcccagctaccagccccacgtctacggccgcctcgacccgcccgcgctcatcccgctccagatgcgggaggtcgagctccgcgtcgactgcgccgccggctgcgccaccgccgaggtcgccctgcgcgcgcgctggtggctgcactgcatcacgcgcagccgcgcgtgccactgccgcatcgtcgtgcccatggctcaccagggttcaattctaggcgctgaggttactgttgggaaaagatcatacaatactcatgtaattgatacagaggataactgttcagtgaagattgcaatgcccgagagtgggggtcttttaaaacaggaatttttttccttgacaataccacaggttggaggtggagaagatatatttgccacaatcagatggtcacaaaaattgctatacgacaacggacaattttctgtcgaagtaccatttcgtttcccgcagtttgtgaaccctttgccaaaggttttcatgaaaaaggagaaaatacagttgattgtgaatagtggtgtgactaaggagattttattgcagggaacaagccatcccttgaaggaaaaaagtagacaaggtgagaagttgtctttcctgcatgaagcagttgttgagaattggtcaaccaaagattttaccttcgcatatactgtttattctggtgatttgtctggtggagttcttgtgcagccctcaaccttgcgtgactatgatgacagagatatgttctgtctttttcttttacctggaaataacgagaacagaaagg

SEQ ID NO: 92894 - DNA, 676 bp, Zea Mays
tttccgttgctgcatgcagggcgaaataagttccatcgagggggtccacgctgcctccagatgctgcaaagaggttgatgagttcgttggaaggaacccggatccgttcctaacgattcagcaagagagaggaagccacgatcaatctcagcagtttctgaagaagttccgaggaaagagctgcctgagctactacctctcgtggatctgcggtggcgggtggtggtgcccgccgccgttgcagctcaagaggccaccggcgccgagctgctcctgcgcgccgcggctggggaagctctgctcctccaccgcctcctcctgctgcagctgttgctgctgccggttccgcgtcgtgtacgccgccgccggctgcgggtgctgcgcgccgtgcccgcgctgctcgtgcgactgcacctgcgcctgcccgcgctgctgctcctgcgcctgccccatgtgcagcgccgcgtgctgcgccccgcgctgctgcctgtgcctatgatggccatgagaaattttgcgtgcatgctagtagtagtagtacccggagatgatgatggatgactggcattttgcagcatggttttttttttggtttagtttcggcgacacgagtactgttgtaactggctgtacgtggctgatctggttagtgctggtgaatggtgtcgattccaca

SEQ ID NO: 92895 - DNA, 1723 bp, Zea Mays
cgacgacctagatagctgctagcgagcctgtccatcgatcggcctcgtgcttgagctcaaacctgttgcatggtgtgcgtgcgtggcatagatagatagacagatcgacgatggcgaggtcatccaacaagaagaagtcgcagcagctgaagcagaagccggtgtcggcgtggcagttcctgttccgcgggtgcctgggcggggccgcgtccgggagcaggcggcggaagaacaaggtccagccgcggtcgtccacgcagcaggggcgggcggcgccgccgtcccccgcgccgtcgtcgtcgacggggctgcagcaccagcggctgtcgctgacggacgtgatgagcacggcgtcggaccaggacctgtcggtgtcgctggccgggtcgaacctgcatgtgttcacggtgggggagctgaaggctgcgacgcaggggttcgtggacagcaacttcctgggcgagggcgggttcggccccgtgtacaggggcgccgtggccgagggcgccaagccggggctccgctcgcagcagatcgccgtcaagctgtgggaccccgagggcacgcagggccacaaggagtggctgtcggaggtcatcttcctgggccagctgcgccaccccaacctcgtcaggctcgtcggctactgcagcgaggaggagcaccgcctgctggtctacgagtacatgcctaaggggagcctcgagaaccacctcttcaagaagttcccgcccgttctgtcgtgggcaacgcgtctcaacatcgcggtgggcgccgccaaggggctcgcctttcttcacgacgccgagaagcccgtcatctaccgcgacttcaagacatccaacattttgctcgacccggactacgaggcgaagctgtcggacttcgggctggcgaaggacgggccggagggggacgacacccacgtgtcgacccgcgtgatgggcacccaggggtacgcggccccggagtacatcctcacggggcacctcacggccaagagcgacgtgtacagcttcggcgtggtgctgctggagatgctgtcggggcggcgggcggtggacagggaccggcccagccgggagcagcacctggtggagcacatgcggtcgtggctcaaggacccgcagaagctggcccgggtcatggacccggccctggagggcaggtaccccgccgccgccgcgcaccgggcggcgctggtggcgtaccagtgcctcagcggcagccccaagaaccggccggacatgtcccgggtcgtccaggacctggagccgctgctcacggccactgccgacgacgacgtgcccgccagcgagccgacggcgtgcgtggagccggagaggaaggacaggacgaggagaagcgacggcggcgatcgcagagacaaggcgcgccggcccgataaagcgccggccaggtccccgaacccgaagagggccgtcaggagacgggctccgggccagagcgaggagttctgggagtggaacatgcccgctgctgctgcgcctggacaagggaaatcgtagcatcatggtagggtgtgtgtgtacggtgtacctagccatagttttttttaaacagtgccggctgctagcttgtgcagtggttactacttttatgtataaagagaggtgtagtataattgtagatgatacgtatgcctttgttcagggttacacttctgtctgttaattctaactttgcccggtccgtttggtcg

SEQ ID NO: 92896 - DNA, 1749 bp, Zea Mays
atgaagcccatgagctgccacgagcaggagcacccggagctcgccgccaccacgaccaacagcggcttcgactggcttgaggatcccatctccttcctcaccgcagacgtcgacatcgccggcggcggctatgggtggtggtccgatcccgcggcggcgcagcaagatggtattggcagcgtcgtggcgcagaccctttcgcccccggcgccgctgctggcgcacacctcgccgagcattgcgtcaccggtcgtgtcggagccttcgtccaagaaacgcaagtccccggcgcacagggcgtccgccagtactggcagcaaccagcgtcgccgcgccgaccaagacaggccaggtgctggtagcagcagcggcggcagcaagaggagcggctccaagggcggtggagcgggatccgaccgggacacgaggtgggcggagcagctcctgaacccgtgcgcgaccgccgtcgaggccggcaacctgtcgcgcgtgcagcacctgttctacgtgctcggcgagctcgcctccttctccggcgacgccaaccaccggctggccgcgcacgggctgcacgcgctggcccgcatgctccccgccgccgtcggcccggcggccgcggcgaccgtgcgggtgcctccctgcgagtgcccgacgccggggttcgcgggcgcggagccgcggctgttccgcgcgtcgctcatcaagttccacgaggtgagcccgtggttcgcgctccccaacgcgctcgccaacgccgccatcgcgcaggccgccgcgtcgggctcgggcgggcgcgggggctccgagccccggtcgctccacgtcgtcgacctcggcgtctcgcacggcgtgcagtggccgacgctgctggagtcgctgacccggctgcccggcgggcgcgcgccgccctccgtccgcctcaccgtcgcgggcgccccgccggcgcccttctcggcgtcgcctccggggtacgacttctcgccgcacctcctccggtacgccaagtccatcgacctgcggctcgcgatcagccgcgcggcctccctagactccgtgcacgggctcgcctcctccccgtcgggcgaggcgctcgtcgtgtgtctccagttccggctcggccacgccggcgccgacgagcggacagagattctaaggaaggtccggggtctcaacccggagctggtggtggtctcggagctcgacggcgggggcgacggcaccgcggcgggcgagttcacggcgaggctggagctgctgtggcggttcctggagtcgacgtccgcggcgttcaaggggagggatggggaggagaggcgcctgctggaggccgaggctggcacgtccgtcgcgtcggaggcggcaggggcagggagggaggcgtggcgggagcgcatggtggtggccgggttcgaggcggcggcgttcggagacgaggcggtggagtcggccaagtcgctgctgaggaagtacgacggcggctgggagatgtcggcgtcggggacggccggcgcggtggcgctgcggtggaaggggcagccggtgtcgttctgctcgctgtggcggccggcgtgcagcggctaaggccgcggagccgtgcgtccatgggatcaccggatcagatatccagatagatgatcaatcgaacatggcggatgatctgggccgtgcgctgcgactcgatggagattgcattgacaggatggggatggcggatgcaacccggtgcccacttgcccaggttccaggagc

SEQ ID NO: 92897 - DNA, 1518 bp, Zea Mays
tatagattattattattatcataggggtcggatcctcctctgctcttatccactcgcctactacctcctctttctccgcccacctccacccccttccctgctctctcccactactgccccctttcgccgtctcccttctcccatcccttccgccgtttctgcctgctgcgaacccggcggcaaccgacctcgatcgtcgccgttcgtccgccgaccaccgccaagaggcagagttgatatggccctcaagaccccgcacctcccatccaatttcgcgaggcggccaagcagccaccacagcttcagccagtggcactcgcctccgcaccacccaaagcttcctccaaggcccgacccgcagacaagagttgccattgccacgaagccgccgccgccgccgcatgtcgtccgcaagaggagcacgacgtcgacgttgatgaggtgcagggacggcctaggcctacacggcttcacggacgacgaggctgttcatcagaccccggaaccggaagaccaccagaccaccgagctccccgtcgtgacgcacccgtcggtcgtcttccccggcgccacgctgcagctgcacgcgttcgagttccggagccgcatcatggcgcacaccctgctgcagcagggcctcagcttcggggtcgtctgccgcgggggggtagcggacgtggggtgcgtcgtgcacgtcgtggagtgcgagaggctcaccgacggccgcttcttcctcacctgcgtgggcagggaccggttccgggtcgtcgagaccgtcaggacgaagccctacgcggtcgcacgggtccaggtctttcgggaccgtgaccacagccaccaccaccaccaccacgacctgatgcagcaggtggagcggcacctcgggaacgtggccgcgctcgcggacaagctgggccagaagccgccgccgccgctgccgtaccgccagggcgaccggcggctgcacaccgccgcctcgctctcgttcctcgtcgcgcgcctgttcgtcgacgaccgccgggagcagcaggcgctgctgcggatggacgacgccgcgcagcggctggcgcgggagggggagtacctggagcgcaggagcaagtacctggcggccttggcggcgatcaaggacgcgttccagcactcgtcctgcaacgagaagtagatcgcggacctgtacattttcaagggtagaagaactgtacaagttccctggtgaggtctgaccgtctgttaatacctaagggtttgattagtgagttggtctgtttttgtatgttggtttagtccttggtgtttcctggaaaagattgggacgatgatctaaagctctaaaaaaataataagaagggcaataagcaaccagactatatgcttgctgttggtattgcttcagctacgaccagctcctgctgctgcctgtacattcttgcatggcctttctgtgctgccacttctgctgctatttctaataaactgatgtactcattcgtgtgtatatatgctatttctagatgt

SEQ ID NO: 92898 - DNA, 1307 bp, Zea Mays
gatcctcctctgctcttatccactcgcctactacctcctctttctccgcccacctccacccccttccctgctctctcccactactgccccctttcgccgtctcccttctcccatcccttccgccgtttctgcctgctgcgaacccggcggcaaccgacctcgatcgtcgccgttcgtccgccgaccaccgccaagaggcagagttgatatggccctcaagaccccgcacctcccatccaatttcgcgaggcggccaagcagccaccacagcttcagccagtggcactcgcctccgcaccacccaaagcttcctccaaggcccgacccgcagacaagagttgccattgccacgaagccgccgccgccgccgcatgtcgtccgcaagaggagcacgacgtcgacgttgatgaggtgcagggacggcctaggcctacacggcttcacggacgacgaggctgttcatcagaccccggaaccggaagaccaccagaccaccgagctccccgtcgtgcacgtcgtggagtgcgagaggctcaccgacggccgcttcttcctcacctgcgtgggcagggaccggttccgggtcgtcgagaccgtcaggacgaagccctacgcggtcgcacgggtccaggtctttcgggaccgtgaccacagccaccaccaccaccaccacgacctgatgcagcaggtggagcggcacctcgggaacgtggccgcgctcgcggacaagctgggccagaagccgccgccgccgctgccgtaccgccagggcgaccggcggctgcacaccgccgcctcgctctcgttcctcgtcgcgcgcctgttcgtcgacgaccgccgggagcagcaggcgctgctgcggatggacgacgccgcgcagcggctggcgcgggagggggagtacctggagcgcaggagcaagtacctggcggccttggcggcgatcaaggacgcgttccagcactcgtcctgcaacgagaagtagatcgcggacctgtacattttcaagggtagaagaactgtacaagttccctggtgaggtctgaccgtctgttaatacctaagggtttgattagtgagttggtctgtttttgtatgttggtttagtccttggtgtttcctggaaaagattgggacgatgatctaaagctctaaaaaaataataagaagggcaataagcaaccagactatatgcttgctgttggtattgcttcagctacgaccagctcctgctgctgcctgtacattcttgcatggcctttctgtgctgccacttctgctgctatttctaataaactgatgtactc

SEQ ID NO: 92899 - DNA, 1476 bp, Zea Mays
ctctctctctctctctctttctccctgcttctctctctccagctcgctgtcgatggtgatgactgatgaccatatccgtgcacggcgccagatacgcatacacgcacatatatatacccggccgccagggtttgggggctcagaagaaccgaccgcgcgtcaattaacccagcagaaggtccgtcgtctcgtcgccgacgactcggcttctgctcatcaccaccagccactagctgtcgtcgccgacatcgacgcacgcggaggagatcgatcggcccggccgccggccgcaggagaagatgagcttctttggccgcggcagcagaaaccagagaaccttcaggccgaagaagagcgcgccgtccgggaacaaggggatgcagctgaaaaggcacatcgacgccaccctcggcagcggtaacctgcgagaggcggtgcgtctgcccatcggggaggacctcaacgagtggctcgctgtcaacaccgtcgacttcttcaaccaagtgaacattctctacggcaccctgatggagttctgcacgccagcgacatgcccgaccatgtcagccggaccaagctacgagtacagatgggctgacggagccaagatcaagaggccaatcgaggtgtctgcgcccaagtacgtggagtacctgatggactgggtggaggcccagctcgacgaagagaccatattcccccaaaagctcggggctccgttccctcccaacttccgcgacgtcgtcaagacgatcttcaagcgcctcttcagggtgtacgcgcacatataccactcgcacttccaggtgatcgtcaggctcaaggaagaggcgcatctcaacacctgcttcaagcacttcacgctcttcacactggaattccggctgatcgacagggcagagctggctcccctcaacgagttgatcgagcccataatacttggttattgactggagaggctttgtttaggccgactgtgccgagagaattttcccccctctccttttaattttgatcatttcgggtggaatatctccatctgcattttggaagcgtaggctagtggtttcgctactctgtcccggatgtatgtgttcccttccctagcagtagcagccagcggttggtctcaactttttcagtcaaatggagtgctgtttgatccgactcagctgggtgctttgtttctgttctgttctgttcttttttttttgtctaagatgggcgcctccgttctgtttattattttttagtttaaccttttcagctggagtttgaacttttctctacttctaaaaagcacgagtttggtgaccatctttctcctcttcctcactgttgaggacgtatatagtttttttattagttgttgccagagaaattgtgaaatattaaggtcgatgataatatttgtattgctcgctataatataatcgttatgcattaatattttatcgaatatttatgtgactttgc

SEQ ID NO: 92900 - DNA, 1407 bp, Zea Mays
ctctctctctctctctctttctccctgcttctctctctccagctcgctgtcgatggtgatgactgatgaccatatccgtgcacggcgccagatacgcatacacgcacatatatatacccggccgccagggtttgggggctcagaagaaccgaccgcgcgtcaattaacccagcagaaggtccgtcgtctcgtcgccgacgactcggcttctgctcatcaccaccagccactagctgtcgtcgccgacatcgacgcacgcggaggagatcgatcggcccggccgccggccgcaggagaagatgagcttctttggccgcggcagcagaaaccagagaaccttcaggccgaagaagagcgcgccgtccgggaacaaggggatgcagctgaaaaggcacatcgacgccaccctcggcagcggtaacctgcgagaggcggtgcgtctgcccatcggggaggacctcaacgagtggctcgctgtcaacaccgtcgacttcttcaaccaagtgaacattctctacggcaccctgatggagttctgcacgccagcgacatgcccgaccatgtcagccggaccaagctacgagtacagatgggctgacggagccaagatcaagaggccaatcgaggtgtctgcgcccaagtacgtggagtacctgatggactgggtggaggcccagctcgacgaagagaccatattcccccaaaagctcggggctccgttccctcccaacttccgcgacgtcgtcaagacgatcttcaagcgcctcttcagggtgtacgcgcacatataccactcgcacttccaggaattccggctgatcgacagggcagagctggctcccctcaacgagttgatcgagcccataatacttggttattgactggagaggctttgtttaggccgactgtgccgagagaattttcccccctctccttttaattttgatcatttcgggtggaatatctccatctgcattttggaagcgtaggctagtggtttcgctactctgtcccggatgtatgtgttcccttccctagcagtagcagccagcggttggtctcaactttttcagtcaaatggagtgctgtttgatccgactcagctgggtgctttgtttctgttctgttctgttcttttttttttgtctaagatgggcgcctccgttctgtttattattttttagtttaaccttttcagctggagtttgaacttttctctacttctaaaaagcacgagtttggtgaccatctttctcctcttcctcactgttgaggacgtatatagtttttttattagttgttgccagagaaattgtgaaatattaaggtcgatgataatatttgtattgctcgctataatataatcgttatgcattaatattttatcgaatatttatgtgactttgc

SEQ ID NO: 92901 - DNA, 1611 bp, Zea Mays
ctctctctctctctctctttctccctgcttctctctctccagctcgctgtcgatggtgatgactgatgaccatatccgtgcacggcgccagatacgcatacacgcacatatatatacccggccgccagggtttgggggctcagaagaaccgaccgcgcgtcaattaacccagcagaaggtccgtcgtctcgtcgccgacgactcggcttctgctcatcaccaccagccactagctgtcgtcgccgacatcgacgcacgcggaggagatcgatcggcccggccgccggccgcaggagaagatgagcttctttggccgcggcagcagaaaccagagaaccttcaggccgaagaagagcgcgccgtccgggaacaaggggatgcagctgaaaaggcacatcgacgccaccctcggcagcggtaacctgcgagaggcggtgcgtctgcccatcggggaggacctcaacgagtggctcgctgtcaacaccgtcgacttcttcaaccaagtgaacattctctacggcaccctgatggagttctgcacgccagcgacatgcccgaccatgtcagccggaccaagctacgagtacagatgggctgacggagccaagatcaagaggccaatcgaggtgtctgcgcccaagtacgtggagtacctgatggactgggtggaggcccagctcgacgaagagaccatattcccccaaaagctcggtcggtaacttggacttgtctgtctagtcgccaagcatatgatcgtttgggactttgtgcatggtctgatcatatgtttgtatgtttgtgtttggttcgacactattgtgatggtgatggtgatgccgccgacaggggctccgttccctcccaacttccgcgacgtcgtcaagacgatcttcaagcgcctcttcagggtgtacgcgcacatataccactcgcacttccaggtgatcgtcaggctcaaggaagaggcgcatctcaacacctgcttcaagcacttcacgctcttcacactggaattccggctgatcgacagggcagagctggctcccctcaacgagttgatcgagcccataatacttggttattgactggagaggctttgtttaggccgactgtgccgagagaattttcccccctctccttttaattttgatcatttcgggtggaatatctccatctgcattttggaagcgtaggctagtggtttcgctactctgtcccggatgtatgtgttcccttccctagcagtagcagccagcggttggtctcaactttttcagtcaaatggagtgctgtttgatccgactcagctgggtgctttgtttctgttctgttctgttcttttttttttgtctaagatgggcgcctccgttctgtttattattttttagtttaaccttttcagctggagtttgaacttttctctacttctaaaaagcacgagtttggtgaccatctttctcctcttcctcactgttgaggacgtatatagtttttttattagttgttgccagagaaattgtgaaatattaaggtcgatgataatatttgtattgctcgctataatataatcgttatgcattaatattttatcgaatatttatgtgactttgc

SEQ ID NO: 92902 - DNA, 709 bp, Zea Mays
cgcgcgcacgacgacgacgaccaccaacagcaacaggagagaggaggagatcgataagggatggagggcggcgagacgacgctgtccgggttcggcggtgccggggcccccggcgtggacaccaaggtgctgcacgcgttccagaccagcttcgtgcaggtgcagacgctgctggaccagaaccgcctcctgatcaacgagatcaaccacaaccacgagtccaaggtgcccggcgacctctcccgcaacgtgggcctcatcagggagctcaacaacaacatccgccgcgtcgtcgacctctacgccgacctctcctcgctcttcgccgcggccgacggcggcggcggccgcgccgcgtccgagggcgggtccgtgggcaccgtccgccaccaggcgggcgccggccacaagaggatcaggtccggcctcgactgatttgttgccaggcatttcttcttcgcagagaaaaggagtagcagtactaagtacagtagctagccacgtaccaccagccgcagcgaaaccacctcccttttgtcttctgacttgagctcttcttgtatctatcgacatacgctatatatctatctatctatttatatgtctccattacgactgttaccatattcttgttgctaagagctactactacttagtatgcgattagtctgtattttcgatgcaatgcaattcatggacgatgcacgca

SEQ ID NO: 92903 - DNA, 1676 bp, Zea Mays
ccgccgccgcctcaaaaccctagctcgatggagacattgagggaggccacagcctgcaggtaggttcgttcgactagtcatgggccgcgaaccatctactgcaatttgcagcccatgagagacgatcgggctctccaagtgggcatggtgcagggtagctgggctccctgggctccaacaaggaacgaggcccatctataatgacggttagacaaagaagtggcgcagcggcactaggccatccgttgaagcgttatcccgcagcgggcaaccacggtcacgtacgcgaaatctctctctctcgtggtcgtgcgcttccttcccgagactccaatgcccctgcctcccctgctcccgcgcctttaccccacgccgcctccacttcgcgccggggacaggggtaacgccgtccctctctctcctggaagaagaaggccggcgcttctcgctgtcgtccgcgcaaagagaaaggacgaggcaagcttcaccgaccgcatccttgactacatcgagggagggccaaagttaaggagatggtatggagcacccgatttgcttcccaaggatggggctgcggaggatgaggaggacgagtctcaagatattgaggagtctcgggacgctgtgctagtcaccaatggcgacagtgagattggacagatggtgatattagcactaattctgaaaagggctagaacaaaagcacttgttaaggataaacgaaccactgaagaagcttttggaacttatgtggagtgcatggttggtgatatcggagataagtccttcacaaagagagcactaaggggcgttcgtgctataatttgtccagctgatgatggttttttctctgaaccgatcgacctcaagggtgttcaacacattgttctgctatcacagctggctgtctacagaaatagtggtggtttgcaagctattatgaacagcaagctgaagacgctagcagagaaggatgaagaagtggttcttgcatctggcatcccatgtacaataatcagaacaggttctctgcaaagcactcctggtcgcgagagagggcatagcaagcaagggaagaataagcaaagaggatgctgctaccatatgtgtggaagctctgaatagcattcccctaaagacacacatttttgaggttgcaaatggtaaggagaaggtgatagactggaaagcatggtttgaagagcagaccaaaagagaagaagaaatacagtaaaaaacaaattggaagtgtttttcgcttgttggtccatgagaaaggaaaatagaaaagagcaaaaaaaggagaggatttataaaaacttgatggctagtttggaaactcaaatgctcttcggaattgaaggggatgggagaggaaattagttcatttctacctcaatcctctccaattccgaacgagatttgaggttcccaaatagcctaaaggaaatgagctgaaggttacgtttgatcctctagccttgctggcaattgaatcatactagtatatccgatgaagaaacaaaagtgcgtggagaagtggaggcacgtctatgaactctacactctgcagttgggctgaagcccctgatccctcattgtttatcaactcattcattatcttatataaaatgcagttcaaattatttgattaaagactttaaccatccacgagt

SEQ ID NO: 92904 - DNA, 1760 bp, Zea Mays
ccgccgccgcctcaaaaccctagctcgatggagacattgagggaggccacagcctgcaggtaggttcgttcgactagtcatgggccgcgaaccatctactgcaatttgcagcccatgagagacgatcgggctctccaagtgggcatggtgcagggtagctgggctccctgggctccaacaaggaacgaggcccatctataatgacggttagacaaagaagtggcgcagcggcactaggccatccgttgaagcgttatcccgcagcgggcaaccacggtcacgtacgcgaaatctctctctctcgtggtcgtgcgcttccttcccgagactccaatgcccctgcctcccctgctcccgcgcctttaccccacgccgcctccacttcgcgccggggacaggggtaacgccgtccctctctctcctggaagaagaaggccggcgcttctcgctgtcgtccgcgcaaagagaaaggacgaggcaagcttcaccgaccgcatccttgactacatcgagggagggccaaagttaaggagatggtatggagcacccgatttgcttcccaaggatggggctgcggaggatgaggaggacgagtctcaaggtacatagagaaagcactctgtaaatttgaactccttggcggctgtgtcttcttatttgttggcagatctggggtgacaaatagatattgaggagtctcgggacgctgtgctagtcaccaatggcgacagtgagattggacagatggtgatattagcactaattctgaaaagggctagaacaaaagcacttgttaaggataaacgaaccactgaagaagcttttggaacttatgtggagtgcatggttggtgatatcggagataagtccttcacaaagagagcactaaggggcgttcgtgctataatttgtccagctgatgatggttttttctctgaaccgatcgacctcaagggtgttcaacacattgttctgctatcacagctggctgtctacagaaatagtggtggtttgcaagctattatgaacagcaagctgaagacgctagcagagaaggatgaagaagtggttcttgcatctggcatcccatgtacaataatcagaacaggttctctgcaaagcactcctggtcgcgagagagggcatagcaagcaagggaagaataagcaaagaggatgctgctaccatatgtgtggaagctctgaatagcattcccctaaagacacacatttttgaggttgcaaatggtaaggagaaggtgatagactggaaagcatggtttgaagagcagaccaaaagagaagaagaaatacagtaaaaaacaaattggaagtgtttttcgcttgttggtccatgagaaaggaaaatagaaaagagcaaaaaaaggagaggatttataaaaacttgatggctagtttggaaactcaaatgctcttcggaattgaaggggatgggagaggaaattagttcatttctacctcaatcctctccaattccgaacgagatttgaggttcccaaatagcctaaaggaaatgagctgaaggttacgtttgatcctctagccttgctggcaattgaatcatactagtatatccgatgaagaaacaaaagtgcgtggagaagtggaggcacgtctatgaactctacactctgcagttgggctgaagcccctgatccctcattgtttatcaactcattcattatcttatataaaatgcagttcaaattatttgattaaagactttaaccatccacgagt

SEQ ID NO: 92905 - DNA, 1412 bp, Zea Mays
agtaaacatatatatttgttttgttaaaatttgattttctatgtctaagccatactcttacctctgtgatctgttctatcagagatgttgtggaacttaaggaggcaataagaattaaagaggctgaaggagacgcctatatttctgatatcgaggttcgtttttttatttgtcagtactgtttttgggtatgagtaaaatgtataatatttgcaatacagacagttggtcaagcatatgaagacatgcaaacgcaaaatcagcatcttcttcaacagcttactgatagagatgactttaacataaagctagtatcagatagtgtgaagatgaaacaagcttgtagttcccttctctctgacaagcttatgctagagaagcaactccagcaagttaacacttcactggagtcatctaaactgaaaattgcccgtggcgaagagcagatgaagacttgtgtagcgcaagctataaaaacttcagctgaaaacagacatcttactattagcctggaaaggattgcgctggagttatccaacacagataaggaactcaagtggcttcggtcctccgttggatcctctgagaaagaatacgagcaaactcagcaaaagatatctgagctgagagcgttactggagcacgagaggttaggcttctgttgcaagttaatcttgcaatgccgctgtctctcgaaatttgcttgttacctttacttttttcaggagtgagaggcggcggcttgaagaacaatatgaagaggtgaaaaatgaagttatggagctgacctctgagactgaagagactactgtccggaaacttgaggatgaaataaaagaatgcaagggtattctcaagtgtggtgtatgctttgaccggcctaaagaggttgtgatcaccaaatgtttccacctattctgctcgctatgcatccagagaaacctcgagattcgccaccgaaaatgtcctggctgtggaaccccattcggacaaaacgacgttagggaggtgaagatatgaacctcaccaaagtgacagtgacaaaaccgacttgcgtgtgaacagcagcaacaaactcccttgtgaatatcgtctgttatgttggcgaacatctagatctaacttgctttattactgggattaaaattaggataagaactggaagaagtgaagttcctaatttatttgctatcgtgtgtgctatgtatgattacccttggcagcgagtggtgtatctgctgggtgtcaatatgctcgaattctagctcctccctgctagcgggtgcatgccagttttattaaggctattccatgtacatggtgtcacactctttaatacataccacataggatgaaaatctgatgtgacatgtgattgaaacatagggagacaccactcatgcaccagatta

SEQ ID NO: 92906 - DNA, 3056 bp, Zea Mays
atgagctcagatagagtcaatgcatatggtggttcaagacgagacgtatatggtttcattccaatgcagaagctgaggcgcaataacagtacctggagatttggtaacatacttatagtcttagctatgaatatggattccacagctcttcaatatgaaaaccaaaaattggtgcaacaactggaggtacagaagtccgaaatgcatgcattggagcgcaagttcaaggagcttagtgatgatcaatgttcttatgacaagactctgatttctttgaataaactgtggaatcagctgattgatgatttggttctgcttggagtacgggctggtggggatttggataatttgcaagcacttgaccatgaagagttatcagaagaatctttggagtcgtgtccttccgaggagatatttctcttaaggctcttgaagacaaacaacatcagagataatagtgacactagcttgttgaaatttgttgaagaagctcttgcttttcggtcttcagcaactgttactttgatgaagtccctgcaagagactatttcttcgcagcaagctagaagtgagtctttgtctttagctttgaatggacaaaagtcaaatgaagatgttattgttgcccttcgaaatcataatgattgcttgaaagaggtggcagagaatgcgagtcaagccatctctattatcaacgagaagcacaaaaggtatcttgatgagattgaggcttttaaaagcaaccattcaagggagctacaggaaatcaagcgtatttcaggtgagctagaggaaagcattgcagagcttgaggaaagtcaaaggaagttggttgtgctccagttgcagaggcatggttctgtaatggatgcatctggggcaaatgctgtgaatggtggtatttctactcataaatcttcagataaaagtatgagctggcaagacctcaaagatgctgttgacgcagctaagaccctcgcaggaaaccgtctattagaactccatcagactcaagaggataatctgatactatccaaggagctgggagatcttgaggggcaattgaaagatgagaagtatgtcttggtatccaaaccgtacatgattcttaatgataaactacaacatttgaatgctgagatagagcgttatagagggttggttgaagttttacagaatgacaaggaccagctcatgcaaagggagaaagaaatttctgcaaaagcagaatcgctcgacagtgttaaacaaaccattatcacatatgagaaaaaaattgaagaactggaaactcaaattcagatactcttttctgaaaagaatgatctcgaaaccaaggttgaggagactttgcaagattcaggtaagaaagacttcaagaatgagattcatgttatggctgcagcactctccaatgaactgggtatgatggagaatcagttgagtcgatcaaaggatgcagcttctgaagcacttgcattgcgtgagcaagctgaatcattaagatcattggtagctaaaaagattgaggaacacaagaagatttcggataaatacaactcacaagtaattgagatcaagtccctcaaggcattggttgaggagttggagcaggaaaagcaggagctggagtttattgcagatatgtacgtgaaagaaagttctgagtctaggacaattgctgatattgaagaatcagaaacccgagctcgcaatcaggctgaatatttgaggagcaatctagaggagcatagtcttgagcttcgggttaaagcagcaaatgaagctgaagctgcatgccagcaaaggctttcctttgctgaagtggaactagaagagttaaggaccaaagtagatgcatctgaaagagatgttgtggaacttaaggaggcaataagaattaaagaggctgaaggagacgcctatatttctgatatcgagacagttggtcaagcatatgaagacatgcaaacgcaaaatcagcatcttcttcaacagcttactgatagagatgactttaacataaagctagtatcagatagtgtgaagatgaaacaagcttgtagttcccttctctctgacaagcttatgctagagaagcaactccagcaagttaacacttcactggagtcatctaaactgaaaattgcccgtggcgaagagcagatgaagacttgtgtagcgcaagctataaaaacttcagctgaaaacagacatcttactattagcctggaaaggattgcgctggagttatccaacacagataaggaactcaagtggcttcggtcctccgttggatcctctgagaaagaatacgagcaaactcagcaaaagatatctgagctgagagcgttactggagcacgagaggagtgagaggcggcggcttgaagaacaatatgaagaggtgaaaaatgaagttatggagctgacctctgagactgaagagactactgtccggaaacttgaggatgaaataaaagaatgcaagggtattctcaagtgtggtgtatgctttgaccggcctaaagaggttgtgatcaccaaatgtttccacctattctgctcgctatgcatccagagaaacctcgagattcgccaccgaaaatgtcctggctgtggaaccccattcggacaaaacgacgttagggaggtgaagatatgaacctcaccaaagtgacagtgacaaaaccgacttgcgtgtgaacagcagcaacaaactcccttgtgaatatcgtctgttatgttggcgaacatctagatctaacttgctttattactgggattaaaattaggataagaactggaagaagtgaagttcctaatttatttgctatcgtgtgtgctatgtatgattacccttggcagcgagtggtgtatctgctgggtgtcaatatgctcgaattctagctcctccctgctagcgggtgcatgccagttttattaaggctattccatgtacatggtgtcacactctttaatacataccacataggatgaaaatctgatgtgacatgtgattgaaacatagggagacaccactcatgcaccagatta

SEQ ID NO: 92907 - DNA, 1922 bp, Zea Mays
atgagctcagatagagtcaatgcatatggtggttcaagacgagacgtatatggtttcattccaatgcagaagctgaggcgcaataacagtacctggagatttggtaacatacttatagtcttagctatgaatatggattccacagctcttcaatatgaaaaccaaaaattggtgcaacaactggaggtacagaagtccgaaatgcatgcattggagcgcaagttcaaggagcttagtgatgatcaatgttcttatgacaagactctgatttctttgaataaactgtggaatcagctgattgatgatttggttctgcttggagtacgggctggtggggatttggataatttgcaagcacttgaccatgaagagttatcagaagaatctttggagtcgtgtccttccgaggagatatttctcttaaggctcttgaagacaaacaacatcagagataatagtgacactagcttgttgaaatttgttgaagaagctcttgcttttcggtcttcagcaactgttactttgatgaagtccctgcaagagactatttcttcgcagcaagctagaagtgagtctttgtctttagctttgaatggacaaaagtcaaatgaagatgttattgttgcccttcgaaatcataatgattgcttgaaagaggtggcagagaatgcgagtcaagccatctctattatcaacgagaagcacaaaaggtatcttgatgagattgaggcttttaaaagcaaccattcaagggagctacaggaaatcaagcgtatttcaggtgagctagaggaaagcattgcagagcttgaggaaagtcaaaggaagttggttgtgctccagttgcagaggcatggttctgtaatggatgcatctggggcaaatgctgtgaatggtggtatttctactcataaatcttcagataaaagtatgagctggcaagacctcaaagatgctgttgacgcagctaagaccctcgcaggaaaccgtctattagaactccatcagactcaagaggataatctgatactatccaaggagctgggagatcttgaggggcaattgaaagatgagaagtatgtcttggtatccaaaccgtacatgattcttaatgataaactacaacatttgaatgctgagatagagcgttatagagggttggttgaagttttacagaatgacaaggaccagctcatgcaaagggagaaagaaatttctgcaaaagcagaatcgctcgacagtgttaaacaaaccattatcacatatgagaaaaaaattgaagaactggaaactcaaattcagatactcttttctgaaaagaatgatctcgaaaccaaggttgaggagactttgcaagattcaggtaagaaagacttcaagaatgagattcatgttatggctgcagcactctccaatgaactgggtatgatggagaatcagttgagtcgatcaaaggatgcagcttctgaagcacttgcattgcgtgagcaagctgaatcattaagatcattggtagctaaaaagattgaggaacacaagaagatttcggataaatacaactcacaagtaattgagatcaagtccctcaaggcattggtatgttgtcctaataacttctgtctccttaaaggtggtgctaaactgctaatagcctgagaaatcgatacatatatttaccccttgggaaagttagtgtgtttccttggtctctcttcgtgttgtagagcttgtatcaaagacaccagtagcagctatatcatgtttttgtctttgtgctagcaaggacatttgactttgtagtggtgaagagctcgattggttagtacatcattttaataataggcttgattcctagcttctgtaaatacactagtatgttgtcaattaacatatcatttggtctttcaattttatgtatcaat

SEQ ID NO: 92908 - DNA, 1136 bp, Zea Mays
gtgaaaattgtgttttcggtatttgaaacctaggggatatcatgactatcgcaaccggccaacaggaaatttcagccgggcatccccaattcatcttccccacgccgcgtccgcgtccggaccggacaccggcggcacctcctcctgcctccacttcaccagttcatcgggcgccggaagtgggagccatccgccgccgccacatatctgtcctcttcggcgctgactggggctcagccgctcgaagctccatcccgcctcccgtcttcgccgccgctcgtcagatccctcgacgcgacggtcgtgtcttgactctccaccacgcgactccacccagctcttctccacgcgactgcagagcgacgatcggaggcgccgccatcgcacaatccaccgtcgctgcctgctcctgtgatactctcacaagatccgctgctacatccatttcttcttcttccacgttgctgggaggagacgggcgcaaggatttgtgcgagggagaaagaaagggaaggaaaggggataggacgggaggaggagcacgactgcttaccacttattcttcccagcccggtaccgtagatttctcttgttctgtgtagtgtgctttctaatttgtcgtatatatataaatatgtggaaatatattataaataatttcctttgaatttgacttgtacaagtttctataatttttacatgtaatgcatcagttatatgttttccatatctgcatgtgcacaggagtagcgccatttgccaacagcaacaatacgcgcttgtagcaatttcggtcggtagtgaacgcaataaacaaacaccgttaggggatctaatggcgctgttcaaataaaacaaacaaatccaggtaatcattacactgtaaaccgatagcacctgcagcccattccattaccattcctattaactagagtgaaccaaacactaccttgatgtattcatcttgatgtattcatgggcatggtaacaaaatttcagaacctacaagtctgtctataagcgtctacagttcattacgacctgactcggccaccgctcgtatctccatctcaggatgtatgatgggcattttatcaataatgttccagtagcgtctttcaaaaagagaaaaaaaa

SEQ ID NO: 92909 - DNA, 1224 bp, Zea Mays
gtgaaaattgtgttttcggtatttgaaacctaggggatatcatgactatcgcaaccggccaacaggaaatttcagccgggcatccccaattcatcttccccacgccgcgtccgcgtccggaccggacaccggcggcacctcctcctgcctccacttcaccagttcatcgggcgccggaagtgggagccatccgccgccgccacatatctgtcctcttcggcgctgactggggctcagccgctcgaagctccatcccgcctcccgtcttcgccgccgctcgatccctcgacgcgacggtcgtgtcttgactctccaccacgcgactccacccagctcttctccacgcgactgcagagcgacgatcggaggcgccgccatcgcacaatccaccgtcgctgcctgctcctggtgtgtcctctctcctctctcctctccctctccatctccgtctcaaatcttttacccaaaccctaaccccgactgctatctattcttgtaagtgatactctcacaagatccgctgctacatccatttcttcttcttccacgttgctgggaggagacgggcgcaaggatttgtgcgagggagaaagaaagggaaggaaaggggataggacgggaggaggagcacgactgcttaccacttattcttcccagcccggtaccgtagatttctcttgttctgtgtagtgtgctttctaatttgtcgtatatatataaatatgtggaaatatattataaataatttcctttgaatttgacttgtacaagtttctataatttttacatgtaatgcatcagttatatgttttccatatctgcatgtgcacaggagtagcgccatttgccaacagcaacaatacgcgcttgtagcaatttcggtcggtagtgaacgcaataaacaaacaccgttaggggatctaatggcgctgttcaaataaaacaaacaaatccaggtaatcattacactgtaaaccgatagcacctgcagcccattccattaccattcctattaactagagtgaaccaaacactaccttgatgtattcatcttgatgtattcatgggcatggtaacaaaatttcagaacctacaagtctgtctataagcgtctacagttcattacgacctgactcggccaccgctcgtatctccatctcaggatgtatgatgggcattttatcaataatgttccagtagcgtctttcaaaaagagaaaaaaaa

SEQ ID NO: 92910 - DNA, 883 bp, Zea Mays
gaagcagagggagagcagtcaccaaaccaaaaccgctctcgagtctccatccattctctccgctcatccgcagctctcgagtctccagctctagctagccttagcctcgtccaagggacgaaggggccaccatgagcgtggtgatcctggacggctccacggtgcgcggcttcgtggcggacgaggcggccttcgcgcgcagcctggacgcgcggttcgccgcgctggacgccaacggcgacggcgtgctgtcccgcgccgagctccggcgcgcgctcgagtccttccgcctcctcgacggcggcggcttcgggtccgcccagccggcgccgctccccgccgaggtcgccgcgctctacgacgccgtcttcgagcagttcgacgccgaccacagcggcgccgtcgaccgcgccgagttccacgacgagatgcgccgcatcatgctcgccgtcgccgacgggctcggctcccagccgctccaggtcgccgtggacgacgagggcgggagcttcctgctcgaggcagccgagcacgaggccgctgggatcgccgccaagatcgaagccaaccgcaaggcggaggcggaggcggaggcggccaagtgacgacgtgtccctcgtgcgggccctgcgcttgattttctgggtgtttgctactacgtactagtactacttacctggcggccgatgtgccgccgcacgtgtacggtatactacgtaactagaagcggccagcaccagctactcaaatcactgctgatgctacttgtgaacggaataaaacctgtcaatcattttagtggtcttgcttgcataaaacacttctttgtcgtcaaatcttcggtccactttcttgtagccctaacagcacttgttagtgagga

SEQ ID NO: 92911 - DNA, 422 bp, Zea Mays
attttctcacgaaatagcacgtaaaagagcaagattgacaccagattcatgcacaggaaatttatgcacaatccaaagaaacacacatgctgtcaacaaaaaattgttgttttattccaagatgtacgagttcagacactttccaaaggtgtaaggtatgcaaattcgattcactttgttataagtcgcctcacatcgcataaatgatttgatcttcttaaagagctttggtgctacctgcagaggcatgtttcatagaaaatttgttatttctagcttgacaatgacaaatggtgaagtgcaagctggaattaagtacttatagttacacatttgtcgatgcatgaccagtaatcaaaatattacctagtgcagttttggtgaccggtatcatcattctcaactctcttgacacatttcta

SEQ ID NO: 92912 - DNA, 795 bp, Zea Mays
atggccacgaaacccctcctgcatccactgcttggcttgaccgccgtcggcgtccatggaggcagcgtcgcgcttggagccagatccgcacgcggggatgtgtggatccggtgggctaggggccagacctggccatccctcagttcatggtcacggagttgggcgctccggtggtggcgcgggctccgtggttctattgccggccacaccagcgtgggagctctaccgcgtggtggagctgcctctgttcggagggcgtggtgcagtgtgaaaggccacggccggtgtcgcattaaagtttgtcttggccacggcttcgccttcggtggttgctttcgcttatcggggtctggtatgcgggtgaaggtgggactttgcaacgtgaagtcgaagctattacatcaggggatgtggctcgggaataatgacagatgtcgagacccccttcttcgactagattgtttcggagattttggcatttgccgagggcaggacagaggttcaagcttgttggtgaagaatcggagctgcctcgtgtgggtaagaaaaacttcggcacaatatgttgcgagggatggggatgggtatattagtggtaccccagtcatcggcatcgtcggcgtcggacgcggcggggccggtcagccggtgcggatccatcaggcgcaaacggacatcgaactcctgacgcggatgggcgcgagagcccgggtccgctacttcaagggctccggcggcgtcggtgggggtgagggggctgaggttaggcggccgccggccacggaatcaggatga

SEQ ID NO: 92913 - DNA, 1074 bp, Zea Mays
atgtcgcgtagcggagacgagccggtgacatcacatgacgctgcacgcagcgctgggctcttcgtcctcgtagtactgctggccgtacgggttccggccgtagccgccaccatagggccagtgcccggcggggccgcccccgccgccgtagtacccgccagtaggcgggccgctgtagctgccgtatggctgcgcgctgtagccccactcgggggcgggcggccagatggacggcgcgccccccatgccctgctgctgcggcattggcgccatcgccggcatcggcatcctcacgggcgccgccgcggccatcgacatcgccgggcccgtgcggggcgcctccagccgcgccgcgatgggggtgtttgtcgtcctgacgatcttcggcttgccgtcgccgtgcccgtgcccgtgcgcgtgcgcgtgcgcgtggcggccggccggctcgtccatgtccaggtcgtcgaagtcgtcgtccatgtccatgtcgtcgaacttgacgtgcttattcttacccggcttgcctccgccgccgtgcccgccatggcctccgcctccgtgcccgccggcctggccatggccgtgcccgttgcctccgccgccgccgccatggcctccgcctccgtgcccgccctggccgtgcccgttgccgctggccttccctggcttgggcgccttgccgggagcgacggcgccgtgcttctgttgtttccctccgcctccgcctccgcccccgcccaagccgaagccgaagcccccgacgacgtgtatgtcggtgatgaccttgccggcgtcggcggtgagcctgtcggcgacctcctcggcgtcgaagggcccggacaccgtcaccgtgttgttcttctcgtcgtaggagatggtcctgatgctcaccttgtcttggaccttgcagaggaccttcctgatcttcttgtagcacttgtggcactcaagatccacccccatgaccaccgtcgacatcttgtgctggctgctgtggacgcctggccaaagctagctctctctgtgcctgccacctttgttgctggtgcacgaggagaagagataagaaggtag

SEQ ID NO: 92914 - DNA, 1056 bp, Zea Mays
atgtcgcgtagcggagacgagccggtgacatcacatgacgctgcacgcagcgctgggctcttcgtcctcgtagtactgctggccgtacgggttccggccgtagccgccaccatagggccagtgcccggcggggccgcccccgccgccgtagtacccgccagtaggcgggccgctgtagctgccgtatggctgcgcgctgtagccccactcgggggcgggcggccagatggacggcgcgccccccatgccctgctgctgcggcattggcgccatcgccggcatcggcatcctcacgggcgccgccgcggccatcgacatcgccgggcccgtgcggggcgcctccagccgcgccgcgatgggggtgtttgtcgtcctgacgatcttcggcttgccgtcgccgtgcccgtgcccgtgcgcgtgcgcgtgcgcgtggcggccggccggctcgtccatgtccaggtcgtcgaagtcgtcgtccatgtccatgtcgtcgaacttgacgtgcttattcttacccggcttgcctccgccgccgtgcccgccatggcctccgcctccgtgcccgccggcctggccatggccgtgcccgttgcctccgccgccgccgccatggcctccgcctccgtgcccgccctggccgtgcccgttgccgctggccttccctggcttgggcgccttgccgggagcgacggcgccgtgcttctgttgtttccctccgcctccgcctccgcccccgcccaagccgaagccgaagcccccgacgacgtgtatgtcggtgatgaccttgccggcgtcggcggtgagcctgtcggcgacctcctcggcgtcgaagggcccggacaccgtcaccgtgttgttcttctcgtcgtaggagatggtcctgatgctcaccttgtcttggaccttgcagaggaccttcctgatcttcttgtagcacttgtggcactcaagatccacccccatgaccaccgtcgacatctgaagaacgcaaactactctggttcttcagttccatacacacagtcagatgtacataaaaaagaagctcgagattga

SEQ ID NO: 92915 - DNA, 1164 bp, Zea Mays
atggcgagcgcgggcactactagggccgcggcggcggcgctcctcttatccctctccgccgtccttctcttcctcctcctccagacaccgccgcggggcctcgccgaccatgtggccgccgcgctcgacagcttactcgactggcgcggcctgctggagctggcgacgcgcaggaacatgatcctcctctgccacgccatcctcctcgtcatcctcagggacgccggagtcctcggcacgcctgccggccgtcgcagccagagccacagccgcagcccgccagcggccgtcgcacaacaaaccgcgagctccgtcgctccggctcggtcccacgccaccgggagcgccgtcgtcgtctggcgccggcggccgcggaacagggccgccggcgccgccgcgcccaggcacgacgctgtggctgcccgtcgtcgtctcgtcgagtgccagtgccagccggcggtggagacatgggcggcgccactgctgacgacaggcccacaagcacgggcgacggaagaggccgccgccgtggccaccgaacagcagatcgtcctcgcgcaaccgcccaggaacgaagccggaccgctcgagcatcaccgtggccgcgacgctgtcgttggaccaccagctgagcatcccacggccatcgcggtgggcggcgatgatcgccgcatcgccaccgacgacgagaagcgcatggacgacgggaatggagatggagatggaatggagatgatcgccgcgtcgccgcatgcgcgacggcgagagcagcagacggcgggaatggagacgggaatggaaatggagctggccgacgacaggacgttcgaggagttcatcaagagccagaggcggcagatgcggcaggagagcctgaagctgctcatcagctcaggctaccactaccacgcgatagcagcatagcatgttattaattagtttggctgctaccattaaattaaaccataacggtcggcgtataacagagaagaaatctgacaatgcaaggtcgttattcatgtgttgctctggcctgtcccctccgatcgagatattgccctgcttagtagcatatggccagtagatcatacgtgtgtgtaaaacactgtgcagatcatacgtgtgtaaaacactgttttgaaatgtattgtttatagagttttg

SEQ ID NO: 92916 - DNA, 285 bp, Zea Mays
atgggagagttgttcctccttccactcatgacctacgggctcctagggctgcggcccactcataacctattaagcttaggactaagtgtgttggtcgtctacaggacccacaacatgacgagacacgccgagacacaggctacggaggccaggagtcagtgtggcacagagacagtaatgatggcgctagagctcttcgccgcccacacaactagtcttaaagagcgagtccagagaagctcagacgacaggcacatgctgacaagcacgactttaccgaggtag

SEQ ID NO: 92917 - DNA, 1219 bp, Zea Mays
atgacctcagtttgctcatcttgctgttctttcaaatgccagatagcccactggagacaaggtcacaaagatgaatgccatccaccaagtgttaatactaggcatgatgaagaagaagaaaaggctaaagtgggaagagctgccaaagagaatgcatcagttggtgttaaacaggttgctgaaatgaacaaaccagctgttggatctaaaacttctgatgcaaaccatgatttgaagagttcaaatggtaaaagtaaacatatgccttctgaagcagtatgttccagtgcagagattcctggaggtcataagtccaacagcacagttgaaatttctcaaaacgttcagtctgttgacagtagtaagatgggatcaagtatcaaacatgcaaattttgttgaagatggttcttccaccgaggacttaaatgaggcattgccatgtaactttcattcttcttcaccaaacattaatggtcgtagcagttttgtaaacaaagaattctgcaatcattccaaggaacaccaaagagctaaggatgccagtgttgttgaggattgttctcagacaagcagtaccagggagcttgaagacagtaacattcaccacgtagctgcatctgttgtcttggagtccaaaagttctaggactcctattcatgtagaacttgagaggtctaaaacaaaatctgctgggaatgacagcattcagagcacgaaacctgtgccatctgcattgactgttgacaaagccacttcagttcgtgggagtctttctattacacctaataattcatctaaagtagcagatagtcttcctgatagaagttttaaaccttcagataggtcaggctcaacaacaaataatcttgcaacatctctgaagaaaatgacactcttcccatatgaactttttgtgaagctctacagcaaggttgagttgcacccttttggtcttcataaccttggtaacagttgctatgcaaatgctgtttttagtgtttgatgtttactcgaccactcacaacatatcttttggaagggcttcacgcaaaaaactgttctcaaaatggatgatgcttcatgtgtgaatttgaaaaactcattgtggagggcaaacggtgcaagactgccttgtcaccgactggaatactctctcatttgaatgacattggcaatagctttggtcctggtaaacaagaagatgctcatgaatttct

SEQ ID NO: 92918 - DNA, 437 bp, Zea Mays
ctttccagctcacgaacacgcctgtttcgttccctgtcgcccgtgcctcggtcgtctccggcgacccgcgccccgcccccgccctgcctccgagcctctggctaccccgcacccgcagcggcatccccggcccgcccccgcgcgtttgcccgccgctgctccagccggcaccgccgctggccacttcggctgcagggccgtcgccgccggcctctcccgccaccgctctcggccgctgctccctctacgcagcctaacccggcgtcgagccctcctccggccggccaccgccccatcgatacgtttttttttagtattttattctttcctcttccttttctttttgaagttgtattgaatcccaatttatcagtggaggtgcttgctctagtaatgtaactgatgactctattgtgttgacctcattcaaagtccaa

SEQ ID NO: 92919 - DNA, 1295 bp, Zea Mays
accgttctttcaaccaaccacctcgactcgaccacccaccacgtcctcgcctcccaagttccattccatccaaccgagagctcatctcatcaccagtccgacgatcggagatgcggatgagctgcaacggctgccgcgtcctgcgcaagggctgcagcgacgcctgcaccatccgcccctgcctgcagtggatcaagtcccccgaggcgcaggccaacgccaccgtcttcctcgccaagttctacggccgggcggggctgctcaacctgctggccgcgccgcccgccgaccacctccgccccgccgccttccgctccctgctctacgaggcgtgcggccgcatcgtcaacccggtctacggctccgtcggcctgctctggtcgggccagtggcaggcgtgccaggccgccgtcgaggccgtgctcaagggcgaccccatcgtgcaggtgcaggtcgacgccgcgtccgacgcctcgccgccgctcggaccacgtcgccacgacatccgccacgtcgccagggaccccgccgccgcgcccgacgtcctcctccgcagcagcagccgcaagcgcgccgcgtcgtcttccacctcctccaagcacaaccagcccgggagcagtaagcgcgcgtcgctcggcaagaacaggcaaagggcagaacaagagccggtgcccatggtcgttgagcacggcgaggagtccgccggcagccacgaccacgaccacgaccagcaccaccgcctgcaggggtcggaggaggacaccgacgtggaggcggcttcccatgcccactcccacgtgagccaagccgagccagagcccgagcccgagaccgagccgcagagccacgcgccgccagcctgcagccagcagcaggctaaccaggagcatcaggacgacgaagacgaggagctcgcgctggagctcacgctcgggctggagccgctcgtcaggcagaggcagcggcccaagtcttcgcgcagcgactgcgatcacagcggactgagcgcggcgtcgagcctcatgtgcttgcgcctgcagctgccggcctgatctctcacctgctagttcctcacaacagttctcgacttctctggccctgctgcctgtgtcaagatcaagactcactcagagacagacaacgaagatagtcatcctaggtttctggctagtatctttgtaaaaacgttgctggactgaactgcactgcacagcgtggtcctaggatcctttttgtgtcttgcgccatgtaccgtagatgtgatgtgatttgttcaaagtttttttttgtttggc

SEQ ID NO: 92920 - DNA, 108 bp, Zea Mays
gattactcatatcatataataatatctgctcgaaattaaaagaaatatggaatcacacccactttacaacatatattacagttatggtgggcggaaaataaacaaaga

SEQ ID NO: 92921 - DNA, 1391 bp, Zea Mays
tacatgaaaatatccatgaaggatccaaccaccctaaattatatggcttggagcagccagaaaggataacccttggctcctgcagcttgccatttctcgctttcctcattagcggactccagaataagagtgaggttggaagaaactctaccgaacatcactctgtttctatgcttccaaaccactctgtttctatgcttccaaaccacccaggctcccaggataataagagggtccaagccatcctttcaagtgtcagaaacaatagttgaagatctctcccaccattgtagaaaattggaaatcctcatattgaggggctaagatgtgcacacattatcacaaacataaagatccatagttcgcttaaaacatttctaaacttttgggaaaagaaaaaataattgtaattctaacactaatacataagtgaagggatatttttttaatagtgaaacacacatattttatggcacgtttttaaagtaaatagaacagccaatggagtaaaatattcatatgacgagagaaaggggagaaaaaatgaaaccactatgtacagaacgaaacataaatctagaattaagattgaaatatgtacctatcttaaagtgagattttttgtcagagttaataagatgagtaatagggcagtaaattcttcctacgacagagaggtgacgggaaacacttactacgacaggaggtgacgggaaacaatagttttcaatcgtttctggtgggaaaaaatactaatgtaagtgtcataccttttctttttttaaaaataaaacaaatggtacaaatttacctgttttgtatatataaagaaagaaatataaatctagaagattgaaatacatacctgttttcaagcgatatatctttttgttagtgttaatagaatgagcattagagtagtaaactattcctatgacagagaggtgatataaaacagtagttttcaatcgtctgcactgcaaaaatactaaaggaagtggcacacatttgggaaaataaagaaaacaattagtacaaaattacctattttatatgagaccataactcttcaaagcttagctgcagtgtagaagatgcttgaagtacgacacaaatagttttaaagaagtcagcaaccaataattactattaaaataaaaaacatcagaaaatgttacctcttgagcatgatatcattctaatttggaagtgaaaaggttttaaagatacctgaatgtaccaattcattttgttagttgtatcataggaaggaatcgagggtaagataaaccagatttcttctttgcaaaacattcgtcgaatgagtagaaagcagcggcggtggcaatctaatcacaaagatgaacctctattcacaatgcagaaccctg

SEQ ID NO: 92922 - DNA, 588 bp, Zea Mays
atgctcgatataaagtatgcgagcatttatggacctaccaccggtgataagattaggcttggtgataccaatctttatgctgagattgaaaaggacttcgccttttatggtgatgagtgcatatttggcggtggaaaagttctgcgtgatggcatgggacaagcttcagggtacccagaatctttctgcctagatacagttataaccaatgctgttgtgattgattataccggaatatacaaggctgatatcggtataaaaggtggacttatagttgctattggaaaggctggaaaccctgatgtcatggatggtgtccataacaacatgattgttggggtcaatactgaagttattgcatctgaaggcatgattgtcactgctggtggcatagattgccatgtccactttatatgtcctcagttggcagaagaggcaattgcaagcggcatcacgacattagtgggtggtggaaccggaccagcacatggaacttgtgccacaacttgcactctagcaccatctcaattgaaattaatgttgcagtccactgatcaattgccaattaacatgggattcacaggcaag

SEQ ID NO: 92923 - DNA, 144 bp, Zea Mays
ttaatggccttttgtattttattgttctaccaccaagtatttttaacctctgctccacacacctacgaggatattactgaatattggttgccatcttctacatatggtgcttgcgttatctttaaataggataaagatcacaat

SEQ ID NO: 92924 - DNA, 276 bp, Zea Mays
atggcgagcgttggggagacagagagatgggcgcgccgggcgagcttcagtctaagcaccgacgagcaggaagccgcgcgagcacgggagctcgggatgcagagtaccatggcggacaacctccatggcgagctgagcgaaggcacaggggcgagcggccggccggcgagctcggctaaggaggggaagcaggggcgcggcccgcgcgagcagaggaagacgggattcgacggcatcgtggggaagagccgctcggcagagaggagcacgccatga

SEQ ID NO: 92925 - DNA, 2394 bp, Zea Mays
ctttcgttttacgccagcgagtgaagaactacttcctccctcccttctgccttctcccctgccccctctctcatcactctcagatctctccctccccctccctccttcccttcatctctctgaattctgcacacctcgccgtccacgcattccgcgctcgccctcgcggatccggcagccctttcttcgccgtcgttcttgcctccgctgtcctgctctcctggaggctgctgttgggtcaccagtggctggactcgaccccgcggcctccggggggtgggttcgctggatggttatcgcctcctgatccatccggaccccggatcctctgcaaaggcaccgcctttgtgggttgggttctctgcgcccatgcagaagggtttggcgcgtcggcggtgaggcagggctctggtttagttcttgcgttggactagtccggagatgcttcgtggaacggggtacgggggcggcgatgcgcggaggcgggcactgcgctcgtcgcggcggcatctgccggggtggatctggtggcttctcgggatcttcctcctcgtcgggctcatgctcttcgtcctgcaccacaaccaaaaggagcagttccggccgcccgtcgtggataatggttcagcgatccaggaagtccctcgtgaaaaagtgaatttctcagaagaacttttgagcagcacatcatttgctcgccaattagtggatcagatgactctagcaaaggcatatgtcatccttgcaaaagagcaaggtaatcttcagcttgcatgggagcttagttcacagataaggaattgtcaaagattgctatctgaaggggcagttaatggaagagcaatcactaaagatgaagcccatcctataataagccggctagcacggttaatatacaaggctcaggactctcactatgatatcagcacaacaatagtgacattgaagaaccatgccttggcactagaggagcgtgcaaaggcagcaattgttcagagtgctgagtttggccagttagcagcagaatccttccccaaaaatctgcactgtctaactgtgaaactgacagaggagtggcttcggaacccgaagcataggagtcactcagaggagaaccggaattccacacgattggtggataataatctgtaccatttctgtatattctctgataatgtgctggccacttcagttgttgtcaattctacggtctccaatgcaaatcatcctcaacagcttgtgtttcatgtggtcaccgacagaatccattttggcgcaatgtcaacttggttcctcataaatgacttcaaaggttgtactgttgaagtccgctgcatagatgagttctcgtggttgaatgcttcttcatctcctcttgtcaggcagctatctgaggcggaaactcagggttactattactcagctggttccaagaatcctgaaagagaaacaaaattccataatccaaagtttgtttctctactgaaccatttacgtttctacattcctcagatacttcccaacttggagaaggtggtgtttcttgatgatgatgttgtggtgcaaaaggacctgactcagctgttctccattgagttgcatggcaatgtcattggagcagtggaaacctgtttggagtcgtttcatcgatacagcaagtatctaaatttttcgcaccctaccatcagctccaagattgatccacatacttgtggatgggcttttggaatgaacatttttgacttgatagcctggaggaaggcgaacgccacatcgttgtaccattattggcaagagcaaaattcagatctattgctctggagaacgggaattcttcctgcaggccttttgacattttacggcctggtggagcccctagaccgcagatggcatgtcttgggtcttgggtatgatgtagacatagatgaccgtttgattgagagtgctgctgttgtgcactataacggaaacatgaaaccgtggctgaagctggctattcgccgttacaagtatatatgggagcggtatgtgaatatctcacatccgtatgttagagagtgtatgttgcaatagaaagcctgcaaatctctgtatgttcttggatggtgttgaagctgtttcctcacacgaggctgctttcgagcacattgtatgagggaaaggttcagaggtagtagaatatataccagtcatcaaagaagtcaactgttaagtttctttttctttttgggttgggggaagattcattttgagatgaaaataattcctttgcagagtttacatacaaatctggactgggaattttagcagtctaaccagatacatctggatagatattgtaaaagagatacagttggatcaatgagcattttttctttgagatttaggaagtgc

SEQ ID NO: 92926 - DNA, 1051 bp, Zea Mays
tttttttgtagatctggatgctgggtttagtagataatgcaatggccgtttatcctacagaaagcgtccggccggtgaaagcaggtagcagaggtgtgcactactgcaatcacatgcgcaacacagcatggctaagcaagcggctttcggggcatcgtagcatatggtttcccttttaccgccttaacttctccgtcgcacgttcgactttaacttctggtctcggaaggcagagaccagagagagcaaaccagagagcagaggccaaagcaagcaaacgagccagccactatccatggccatcctcatcgccaacctctcggccgtcgtcacgggcgcgctcgaagcggcaagggccattgccaccgagacgctcccggcggccgtgacgagggacgccgtcgtcgaggcgtcgagagcctcggtggcatggctcacgagctacctgtgggcctggctggccgtcgccgtcgacaacctcccggcgggcgccgcggcggtgagctccgcggccgacgcctcggggccctgcctccagacggcggccaagctcctccgcggcctctacgcctggctggccgccgcggtggtccagaagctcccggacgtcgccgccgagaagctgctgggcgacgcggcggcgtggctcgtgcgcggccgcggcggcgcggtgtacgccacgctggcgctcgcgctcctggccgtcgccttcctcggtggcgccgtgtgcgcgctcacctgccgccgctccatgatgaggcccgggcccgggaccgggctcggcggagcgcggagcgtgctcgaggccaaccccaagcgctactgctacgccaccgtgcggaccgtgcggcgccgcgccggtggggctgctggttgcaagatgcttccggccgggcttctcgtcgcgttcgtggcctacctggctgcaaaaacgctctactaatgcctgaggtgttacgctaggtgtcccgatcttagaagcacgaatgctgcatgcctgcaaatcacgctgtagttgaatttcaagtgggtttttttttttgcccgctct

SEQ ID NO: 92927 - DNA, 97 bp, Zea Mays
aaccaagcgcaaaattcgctttcgagagagatcaaacctaagatctgaatgtgttactacgctagaagtcgctctacgcgtaccacatacgcgctgc

SEQ ID NO: 92928 - DNA, 1647 bp, Zea Mays
ggcagggagcagccacagcctgctagggagagacgcagacggcacatgaaaactacaagaaatccgctgcgaaactccggattaaaaataagattcttcattttaagatatttgaaaattgaaatgtcggtaggacttggccttctggaatcccccgctaaaccataggcgtgttctattggaagttggaacaaaaccatggagagtgaaatcatggcctcctatgaaacaaagcagaattgcgaaattagggtatttgagagttcagacgagatggcaacagatctggcagagtttatttcacaagcttcagaaatttcagttaaggaaagaggatgctttgctattgccctttctggaggtcctcttgttagacatatgcggaagctctgtgaagcaccatacaacaagacccttgattggtctaaatggtacatcttctgggctgaagaacgtgcagttgcaaagaaccatgcagagagtaactacaaattaacaaaggaagaatttctctccaaggtgcctatccttaacggccacgtctactccatcaacgacaacgcgacggtggaagaggcagcgagcgactacgagttcgtgatgcggcagctggtgaaggtccggacggtgggagtctcggagagcaacgactgccccagattcgacctggtccttctgaacatcgggcctgacgggcacgtagcctcgctgttccccaaccacccagcgctggagctgaaaggcgactgggtgacctacatcaccgactccccggagcctccgcccgagaggatcaccttcacccttcccgtcataaactcggcgtccagcgtcgccattgttgccaccggagaggacagggcgagagccgtgtccttctccgtctctgcctgccaggaccaggaggaggaaggcccagcagacgacgacgctggaacgacgatgataccgccggctagcatggttcagccaaccgatgggaagttggtatggttcctggacgaggcggctgcttcgtctcttgaggcttcgaatggcgcttgcgagcatcaagaagggtactgagaacagactggatgctacctctgcgaacgccgcctacagtactctctggtttcttcagagtcgaaagtttgcatgcagttggatgtgggcaattaagagtgaagcggtttgtgtgtttttatgtcaagacctcacgcatatcgcgcggagtagctaagctcgaccgtatattggttgcgacgtatgatccttgttttatttaagtgtgttggcggttttatcctacctgaaactagattccttcttgtgaggctggctattttggtattcataggccctgttcgtttacatcggattgcacccggaattattccggctaatcaaattttatataaattatagaagcaatccggctcggaatcgttccgacccaccaatccgacacaaacgaacaaggccttattctttatggacacgcccggaccggacccgggatccctgagagaaatattatttcgattaaggtctcgttcgtttcggcctgatccggccgttccaggcctctttctagctggaaaaaattatctagtttggaattcggccctcagctgttcgtttcaacctgaaataaaaacaaaagcg

SEQ ID NO: 92929 - DNA, 755 bp, Zea Mays
tgctggcgcgcccctgtgccggcctggctgcccgcgcccgccgctcgccccgcgtgacgtgagtgaccggagttggccatggccgggcacgccgcggaggccgacgtggatggactgggtgcgaccgaggggacgacatcgacggatgagattgagacgcagcgacgtcggccacgagggcgcgcgtcctgagcaacccctgctcgtgtggtggccagaggagtgcgacgtgccgcccacagcgtgttcgacagattgctttcatgaattacggtaccagatttatataataaaaacaatgtttggagcctcggaagaatctctgttgttacaactcttttttctcaacgaccgctgctagtccacttcttgtagagactggacctgaactagctacgaagagtccaggccatcatgccatgtgtataggtgatttggtggtagtggcaccatcggcgattggtggcagctgttggttcttgatggagacgactggtatagctagcagctaggtgtttagttattcagttcttcgaaggtgtatgttcatgttcaggcctcgaagacaaaactagcaagatggtgcttctaccttgtggacttttacagaacaatactacgagtcaaatttcctttttttggatgaaacttgcaagatcaacggagaggtgtatggacacttgtttggcgagtcatccagatatgtaatatctttatcatattatttgatttttcccccggggggataagcgtgc

SEQ ID NO: 92930 - DNA, 1697 bp, Zea Mays
gccgttactagtgtcatgctctcagcacactggtctgctcgtctgcctcctttgccttcctctatttaaaccctctccgcccccccgacccaaaacccacaccatccagccttcccacctccctcccccaccacgccgtcgtcatggacgccaccctcagcaccacgaccacccaggactccctactcttcctcctcccttcagccgccaccttgctctccccgctcctgaccgtgctcctcgtagccgtctcgctgctctggctcttcccgggcgggcccgcgtgggcgttcgtttccaggtcccgcgcgacgccgccgggcgcgccgggcctggtcaccgcgctcgcgggccccgcggcgcaccgcgccctcgcgtcgctgtcccggtccctgcccggcggcgccgcgctgtcggccttctccgtcggcctcacgcgcctcgtcgtagcgagccagccggacactgcgcgggagctcctggccagcgccgccttcgccgaccgccccgtgaaggacgcggcgcgggggctcctcttccaccgcgccatgggctttgccccgtcgggcgactactggcgcgcgctgcggcgcatcagctccgcgtacctcttcagcccgcgcagcgtggccgcggcgggcccgcgccgcgccgccatcggcgagcgcatgctgcgggacctcctctcgggcgcggccggacgagaggtcgtcatgcggcgcgtgctccacgcggcatccctggaccacgtcatggccaccgtgttcggcgcgcgctacgacgccgccagcccggagggcgcggagctggaggagatggtgaaggaagggtacgacctgctcggcatgttcaactggggtgaccacctgccgctgctcaggtggctggacctgcagggcgtcaggaggcggtgcaggagcctggtgggcagagtcaacgtgttcgtggccaggatcatcgaagagcacaggcacaagaaggacgacgccattggagagccggccgccgccggagacttcgtcgacgtcttgctgggactggatggcgaggagaagctgtcggactccgacatgatcgctgtcctctgggagatgatctttcgagggaccgacacggtggcgatcctgctggagtgggtgatggcgcggatggtgctgcacccgggcatccagtccaaggcgcaggcggagctggacgccgtggtgggccgcggccgcgccgtttgcgacgccgacgtggcccgcctgccctacctgcagcgcgtcgtgaaggagacgctccgcgtgcacccgccgggtccgctgctctcgtgggcgcgcctggccgtgcgcgacgcggtggtcggcggccacgtggtccccgcgggcaccacggccatggtcaacatgtgggccatcgcgcacgaccccgcggtgtggccggagccctccgcgttccggcccgagcggttcgaggaggaggacgtgagcgtgctgggcggcgacctccgcctcgcgcccttcggcgccggccggcgcgtgtgccccggcaagacgctggcgctcgccaccgtccacctctggctcgcgcagctgctgcaccgcttccggtgggcgccggccgacggccgcggcgtcgacctggcggagcgcctcggcatgtccctggagatggagaagcccctcgtgtgcaagcccacgccgagacgacgtagagcc

SEQ ID NO: 92931 - DNA, 1964 bp, Zea Mays
gccgttactagtgtcatgctctcagcacactggtctgctcgtctgcctcctttgccttcctctatttaaaccctctccgcccccccgacccaaaacccacaccatccagccttcccacctccctcccccaccacgccgtcgtcatggacgccaccctcagcaccacgaccacccaggactccctactcttcctcctcccttcagccgccaccttgctctccccgctcctgaccgtgctcctcgtagccgtctcgctgctctggctcttcccgggcgggcccgcgtgggcgttcgtttccaggtcccgcgcgacgccgccgggcgcgccgggcctggtcaccgcgctcgcgggccccgcggcgcaccgcgccctcgcgtcgctgtcccggtccctgcccggcggcgccgcgctgtcggccttctccgtcggcctcacgcgcctcgtcgtagcgagccagccggacactgcgcgggagctcctggccagcgccgccttcgccgaccgccccgtgaaggacgcggcgcgggggctcctcttccaccgcgccatgggctttgccccgtcgggcgactactggcgcgcgctgcggcgcatcagctccgcgtacctcttcagcccgcgcagcgtggccgcggcgggcccgcgccgcgccgccatcggcgagcgcatgctgcgggacctcctctcgggcgcggccggacgagaggtcgtcatgcggcgcgtgctccacgcggcatccctggaccacgtcatggccaccgtgttcggcgcgcgctacgacgccgccagcccggagggcgcggagctggaggagatggtgaaggaagggtacgacctgctcggcatgttcaactggggtgaccacctgccgctgctcaggtggctggacctgcagggcgtcaggaggcggtgcaggagcctggtgggcagagtcaacgtgttcgtggccaggatcatcgaagagcacaggcacaagaaggacgacgccattggagagccggccgccgccggagacttcgtcgacgtcttgctgggactggatggcgaggagaagctgtcggactccgacatgatcgctgtcctctgggagatgatctttcgagggaccgacacggtggcgatcctgctggagtgggtgatggcgcggatggtgctgcacccgggcatccagtccaaggcgcaggcggagctggacgccgtggtgggccgcggccgcgccgtttgcgacgccgacgtggcccgcctgccctacctgcagcgcgtcgtgaaggagacgctccgcgtgcacccgccgggtccgctgctctcgtgggcgcgcctggccgtgcgcgacgcggtggtcggcggccacgtggtccccgcgggcaccacggccatggtcaacatgtgggccatcgcgcacgaccccgcggtgtggccggagccctccgcgttccggcccgagcggttcgaggaggaggacgtgagcgtgctgggcggcgacctccgcctcgcgcccttcggcgccggccggcgcgtgtgccccggcaagacgctggcgctcgccaccgtccacctctggctcgcgcagctgctgcaccgcttccggtgggcgccggccgacggccgcggcgtcgacctggcggagcgcctcggcatgtccctggagatggagaagcccctcgtgtgcaagcccacgccgaggtggtgaatggcgatcgctagagcgaaagcgcaactacgctacgcatggcgcgccatcgagttccatgcaaaactatattattatactactattactagcgtttcatattttgcacttgtggttttgtctacgttaattaccgttcgcgatcgatggaactgagtgaagtgtgcacagcatactccattgctagaaagaggacgagatatgtgaaaacgcctgatggctgatggcaaattatatggagagcatgtttcagtattacaaaactgttccttt

SEQ ID NO: 92932 - DNA, 1408 bp, Zea Mays
gccgttactagtgtcatgctctcagcacactggtctgctcgtctgcctcctttgccttcctctatttaaaccctctccgcccccccgacccaaaacccacaccatccagccttcccacctccctcccccaccacgccgtcgtcatggacgccaccctcagcaccacgaccacccaggactccctactcttcctcctcccttcagccgccaccttgctctccccgctcctgaccgtgctcctcgtagccgtctcgctgctctggctcttcccgggcgggcccgcgtgggcgttcgtttccaggtcccgcgcgacgccgccgggcgcgccgggcctggtcaccgcgctcgcgggccccgcggcgcaccgcgccctcgcgtcgctgtcccggtccctgcccggcggcgccgcgctgtcggccttctccgtcggcctcacgcgcctcgtcgtagcgagccagccggacactgcgcgggagctcctggccagcgccgccttcgccgaccgccccgtgaaggacgcggcgcgggggctcctcttccaccgcgccatgggctttgccccgtcgggcgactactggcgcgcgctgcggcgcatcagctccgcgtacctcttcagcccgcgcagcgtggccgcggcgggcccgcgccgcgccgccatcggcgagcgcatgctgcgggacctcctctcgggcgcggccggacgagaggtcgtcatgcggcgcgtgctccacgcggcatccctggaccacgtcatggccaccgtgttcggcgcgcgctacgacgccgccagcccggagggcgcggagctggaggagatggtgaaggaagggtacgacctgctcggcatgttcaactggggtgaccacctgccgctgctcaggtggctggacctgcagggcgtcaggaggcggtgcaggagcctggtgggcagagtcaacgtgttcgtggccaggatcatcgaagagcacaggcacaagaaggacgacgccattggagagccggccgccgccggagacttcgtcgacgtcttgctgggactggatggcgaggagaagctgtcggactccgacatgatcgctgtcctctgggtaagaaataaggaacaccgaacactttcatacggtaccaagaacagctgctgacattcatggacatgtcatttcgtagcatggatcgatcagctacgaaatgcgcactgcgcgcatgtacgtgtcgatgctcagctcggcgcatgctcgtgtactcgtttcgtttgtttcttcaaacagtaacacaatacacgcgcaggagatgatctttcgagggaccgacacggtggcgatcctgctggagtgggtgatggcgcggatggtgctgcacccgggcatccagtccaaggcgcaggcggagctggacgccgtggtgggcc

SEQ ID NO: 92933 - DNA, 968 bp, Zea Mays
ccatttcgactttcgagcgcagaaacgagagggccggagcagccgcagtcccggcgatcccgccgccggtcgccctcatacttcctcgtcactgccttcgtttctctttccaacaatcaagatgagccgtggcggtagcgcgggtggtggtcaaagttctctgggttacctctttggaagcggtgagccccccaaaccagcagtggcaccagctgtaagtgctccacctgctgctgcaggtgctccacctgctgagaaaccacctgctgcaaagcctgatggcaccagtcagattgctgctggggttaccagccaaaccaataactaccacagggccgacggtcagaacaccggaaacttccttacgatgattgcaggaccgtccttcgaccaaggtccacgctgctcctggcggtggctcttccctgggatacctgtttggtggcaactgatgccgctcaccaagctatcaccccccactgtcgccgcatgctttttctgaatcgtgaacagccgttgtcatttcatgtgtacccaaacctcccgtcccgcgtgggcccgtaagctgcgcctagatttcagggctaatcgtgtgcctgaaccctcatcataagtcgtctctgtacccagcttctcgtttcgtttgcacccgtgatggtatggtttggttgttgcccgctggacctatctattctttgcatttttcctttgaaatgtatccttgcccatttcgatgcgtccggtgaagtgttcttgcatactttattactcgcctgacagcacttgagtacagcgtcgtgcctggctggccttctgcagtggcttcggctcatgctgaagctccgccaaatggtcatcgaagaagccgttctggcttgaagattggtctgaatgactggatctgcttgactgttatgctgctgaggaacaggagccgcaaaaaaaaaaacgaattaagtacaacaaaa

SEQ ID NO: 92934 - DNA, 1097 bp, Zea Mays
tacaaaaccatccgcaggcttccgttcggcctccatttcgactttcgagcgcagaaacgagagggccggagcagccgcagtcccggcgatcccgccgccggtcgccctcatacttcctcgtcactgccttcgacctaattgtttagtgaacctcgtatcacgggatgcatgtcttcccagatggtacccgtttgcgtgtgagcttgcaaaatcctgggcttggtcatctttcttcagagtttctctttccaacaatcaagatgagccgtggcggtagcgcgggtggtggtcaaagttctctgggttacctctttggaagcggtgagccccccaaaccagcagtggcaccagctgtaagtgctccacctgctgctgcaggtgctccacctgctgagaaaccacctgctgcaaagcctgatggcaccagtcagattgctgctggggttaccagccaaaccaataactaccacagggccgacggtcagaacaccggaaacttccttacggaccgtccttcgaccaaggtccacgctgctcctggcggtggctcttccctgggatacctgtttggtggcaactgatgccgctcaccaagctatcaccccccactgtcgccgcatgctttttctgaatcgtgaacagccgttgtcatttcatgtgtacccaaacctcccgtcccgcgtgggcccgtaagctgcgcctagatttcagggctaatcgtgtgcctgaaccctcatcataagtcgtctctgtacccagcttctcgtttcgtttgcacccgtgatggtatggtttggttgttgcccgctggacctatctattctttgcatttttcctttgaaatgtatccttgcccatttcgatgcgtccggtgaagtgttcttgcatactttattactcgcctgacagcacttgagtacagcgtcgtgcctggctggccttctgcagtggcttcggctcatgctgaagctccgccaaatggtcatcgaagaagccgttctggcttgaagattggtctgaatgactggatctgcttgactgttatgctgctgaggaacaggagccgcaaaaaaaaaaacgaattaagtacaacaaaa

SEQ ID NO: 92935 - DNA, 1049 bp, Zea Mays
tacaaaaccatccgcaggcttccgttcggcctccatttcgactttcgagcgcagaaacgagagggccggagcagccgcagtcccggcgatcccgccgccggtcgccctcatacttcctcgtcactgccttcgatggtacccgtttgcgtgtgagcttgcaaaatcctgggcttggtcatctttcttcagagtttctctttccaacaatcaagatgagccgtggcggtagcgcgggtggtggtcaaagttctctgggttacctctttggaagcggtgagccccccaaaccagcagtggcaccagctgtaagtgctccacctgctgctgcaggtgctccacctgctgagaaaccacctgctgcaaagcctgatggcaccagtcagattgctgctggggttaccagccaaaccaataactaccacagggccgacggtcagaacaccggaaacttccttacggaccgtccttcgaccaaggtccacgctgctcctggcggtggctcttccctgggatacctgtttggtggcaactgatgccgctcaccaagctatcaccccccactgtcgccgcatgctttttctgaatcgtgaacagccgttgtcatttcatgtgtacccaaacctcccgtcccgcgtgggcccgtaagctgcgcctagatttcagggctaatcgtgtgcctgaaccctcatcataagtcgtctctgtacccagcttctcgtttcgtttgcacccgtgatggtatggtttggttgttgcccgctggacctatctattctttgcatttttcctttgaaatgtatccttgcccatttcgatgcgtccggtgaagtgttcttgcatactttattactcgcctgacagcacttgagtacagcgtcgtgcctggctggccttctgcagtggcttcggctcatgctgaagctccgccaaatggtcatcgaagaagccgttctggcttgaagattggtctgaatgactggatctgcttgactgttatgctgctgaggaacaggagccgcaaaaaaaaaaacgaattaagtacaacaaaa

SEQ ID NO: 92936 - DNA, 1007 bp, Zea Mays
accgtctcctttttctatacaaaaccatccgcaggcttccgttcggcctccatttcgactttcgagcgcagaaacgagagggccggagcagccgcagtcccggcgatcccgccgccggtcgccctcatacttcctcgtcactgccttcgtttctctttccaacaatcaagatgagccgtggcggtagcgcgggtggtggtcaaagttctctgggttacctctttggaagcggtgagccccccaaaccagcagtggcaccagctgtaagtgctccacctgctgctgcaggtgctccacctgctgagaaaccacctgctgcaaagcctgatggcaccagtcagattgctgctggggttaccagccaaaccaataactaccacagggccgacggtcagaacaccggaaacttccttacggaccgtccttcgaccaaggtccacgctgctcctggcggtggctcttccctgggatacctgtttggtggcaactgatgccgctcaccaagctatcaccccccactgtcgccgcatgctttttctgaatcgtgaacagccgttgtcatttcatgtgtacccaaacctcccgtcccgcgtgggcccgtaagctgcgcctagatttcagggctaatcgtgtgcctgaaccctcatcataagtcgtctctgtacccagcttctcgtttcgtttgcacccgtgatggtatggtttggttgttgcccgctggacctatctattctttgcatttttcctttgaaatgtatccttgcccatttcgatgcgtccggtgaagtgttcttgcatactttattactcgcctgacagcacttgagtacagcgtcgtgcctggctggccttctgcagtggcttcggctcatgctgaagctccgccaaatggtcatcgaagaagccgttctggcttgaagattggtctgaatgactggatctgcttgactgttatgctgctgaggaacaggagccgcaaaaaaaaaaacgaattaagtacaacaaaa

SEQ ID NO: 92937 - DNA, 485 bp, Zea Mays
tcccacgcctctgcctgcccagatttatctcctccaggccacccctccccaggttctcttcccctagatctccccgccacctttctcgcttgtgcagtggcaccaccatgcgaggagctaggaaggaggacagaacttggtatgtacctgttcattctcctctccattcatgtctattcatagcggaatcaagctggcaaggagctgggaaggaggatagaactgagaatgattttcatctaaccattggctgattatcatgtatttgctgcaatgttttgtcgactaatggttgctgcatcatgtatttgatggactaattttattttaagcttctctagccgatggtaactgttgtttaaatttgaactgtgctaccaatcatgtcaagctatggttgaatttaaacaagccaaaaactatgctaccaaacatggctatgtattaagaaatactatgctttactcctattttactaaaactgt

SEQ ID NO: 92938 - DNA, 2995 bp, Zea Mays
cgctttcttcttcctctactcgcgccgccgcgtctcaagtctcaacgctgcgccaaaacggcaaaaccctaccctgacctgaaccccaaacccgccgcgcctcctcctttctcgtactgcaattcgggactagccgccgccagtctcgatggggaagaggagcggcagcagtaggaaggacaagaacaaggtcattctcccaccggagctgccgccggaaatacacgacgatgaggtggatgtcagcgaggaagacatcgagttctatgccaccgacagcagtaacgttacacccttccgccacttcgacaagaagtccatcgacaggtatgtcgggagggttgccgggcgcgacgagggcgaggtcgagcgcctctacgaagagcgccagaagcggaaggccacagaatcgtcggggagaccccgcgaggatgatgattatttggaggtcgaccccgtcgacgcactccccaccaagacgctgcaaggggagctcgtctacaatagagctaagaaagcaaggtctgaagacaattccggcagtgttaagactaaagctcaagagaatggtgcaaatgccaagacaaatactaaaaaagatgaatcaaagggaaaatctaaaaacaaaaagggagatgataataaagtgaaaaatattcaatcccaaactgaagttccaaagggacaactacactcaaatgtgctggaggaagtgaaggaggaactttcagctgaggaattattcgaaaaaaagaaggctcaacttgctgaactggggatgtctatgcttgaagatcctgagtcgaacattagatctctgaatgatatgctaagtataagcaatgacagagaccaaaaggttgttaaacttggtgtgatgtctttgcttgctgtgtttaaggacgttattccaagttatcggattaggcagctgacagaaaaggagctagcagtagaagtttcgaaagaagtgaagaagacaagatattatgagtacacacttattcgctgctacaaggcctacctgcagaaattgatatcgttggagaagcagccctacttttatactgtggctgttcgttgcatgtgtgctttattagacactgccccacattttaacttccgtgaaagcctattggctagtgtggtaaaaaatttaagctcctcagatgatgtagtaaggaaaatgtgttgtgaagcaataagatcattatttataaatgaaggaaaacatcgtggtgaggcaacaatagaagcagttaggttgattgcagatcatgtgaagctcaatgattgccaacttcatcctgatagcattgaggtcttcctgtctttgagatttgatgaagatattggaaaagatgagattcaggaggaaaaggtgaaaccaaagaggaataaacgttggcaaaaaaatcaggaggttccgaagcaattgccagttaatgataagaagaaaaccagacaggaactgatctcaaaagctagaaaggaggttgatgcagaccttagagcagtttccttcactcttgacccgaaggagagaaaagggatacaaaaagaaacactttctgctctgtttgagacttacttccgcattctgaagcatagtatggccgcttcaaattcaaggactaaggtgaataatgtttcccctggtggctcacacccacttctcactccatgcctggagggtttagggaaattttcacatttaattgatttggatttcatgggtgaacttatatcttgcctcaagaagctttctgggtatagtgaccgacaagacgaaattcccaatgataatgcactgtctgtctcagaacgtctgcagtgctgcatagttgtgtttaaagtctggaggagcaaccttgaggcactgaatgtggatctgcaggatttctttgtgcagctctataacctcatactggagtatcggcctgacagggatcatggcgaggtattggctgatgcgctgaagacacttctttgggaaggcagacagcatgatatgctaagagccgctgctttcatcaaacgattagccacatttgctctctcatttggctctgcagaagcaatagcagcattggtcacactgaagcatctcctccaaaaaaacagcaagtgccgcaatatgttggaaaatgattctggtggcggttctctgtcttgcttagttgcgaaatacaaccccgaagctacggatccatatctgagtggtgcactcgcttcagtcctctgggagctcagcctcctagagaagcattatgacatctcagtttcctcgatggcttcgaatatcttgagtatggcaaacctgaatcccacccagaacccagttcctatcttgaacgtgaaccctcttgaagcgtacagagacctgtcattggaaagggaactatcaaaaccggctagcaaagcattgccactgaacctcaaaaggaagcggcgtgccaaggagtttgttgcgctaagcccagatgtgcttcagaaggcagattgctcggtggacaaagacgagctcgaagagaagctgcagagccatttctccgtgctaagaggcatctctgagaatgagaggttgagggcagagctgaaccacacactgtcatccataaacatgtacaaggagtacaagaagcagaaaaggaaaaacatgaaagttaagaccggaaggaaaaaaaacagcaaggctttagccgtttaaggctttagccgtcttatctgttccggaggtctttgcgctcgaccggtggatgggtgtaattttcagttttttttgggcatatttcccattgactactatagtgcagttttctgccacccttttgccgtttctgcacaccacactatgaaagacttgtttgcatttgtgattttgggaaatggtttagggaagttgtagtttttccccatttttctcagtttctctatacgattttgaggggaaagcggatagattcttccctaacgcattatacattgatattca

SEQ ID NO: 92939 - DNA, 1101 bp, Zea Mays
gccaaatgccaagagcataccaacagaggcccgaaacctagtcaaggtgggcaaacggagctccaaaagccatgtcatggtcgtgatatgacgagcgagagggaaacttcgaagttgcacctcagtcaaagcagcgtagtgcatcaaataataagtcccaaatctctgaacagatttgaaaatgctaaagtgaagttcatctcttctgaagaagtggcattattgagtagagagaggccaccatctgttacatcaagatttactttgtcgcagccaagcaaggcatcatctcctccaactacaaaacacttgtccaatatgaattgtgtatccccaagcaggagtgataaaaatgtgcaagccctgaaacgatgtgctgatgcaagtcatagtcaagcagaacttgaggataggtcatattctgctatgcagcaaaggcgggttcatcctgcatctccttcaagcatgaagcagccatccaatatgaaatcaacatcccctggtaggagagacatgcaagtgcaaaaccagaaacgatatgctcctatgcgggaaagtcaacctcatgtgaaacagttgtcaaataggactgccacgcaagtgcatgccaccaaacgatctgctacttcaagtcatgatcaggcaaatattgatgacataaacatggattgtgaagcaagatctggtggttccgtgcctatgatgcatgaatgtagaacaagtgaatcagtaaaagtaaaaatggactctctgattgaacacaaagctagagaaaagaagatagtgaatgcagacaaaggagaaattaaatctcagactgagcttgaacctagggaaaaggggaccttatgcacttcagatgaagatattggatgcaaatcagaaattgggagtctgaaccagaacaaagatgtgattgtcaccatggtttcaactgtgcagtattcaagacgcccagcacctacaaattgttggaggtgtgaaaagaaacactctaatgtattagaagcttacaacaactttgttctaagggcatatatccatgacataaagttgttgatatattcctcggaagtgcttccccctgattctcagtgttag

SEQ ID NO: 92940 - DNA, 1604 bp, Zea Mays
aaaattacccaacacgggcaacactccacgccaggagtgggcgagtggcacaccgcacaccagccttcgtcttcctcgcggtttcgtccactcccgtcgcccgttccacctgtgacctgccaaggcaccaagcctgaccgacttcgcttacggttcccggtgacccccgcccaccctcctcgcgatgtctgacgtcacctccgactcggcgcagagacgccgctcgccgccgccgccgtcgccgtcgccgtcgatgccgcgtttccagcagcagccgagcgggcgccagccgcccccgcccggcgccgaccccttcgccttcggcatcgtggccttcatcggcatctgcttcgtcctggtttcactctcagtcccatcaagtgttctacatcaagttcctgaaggacatgttggggtgtactggagaggaggtgctcttctgaagacaatcactcctccagggtttcatctgaagctccctttgatcacccagtacgagccaatacaggttacacttcaaacagaccaggtcagagatattccttgtggaacaaaaggtggtgttatgatcagctttgacaagatagaggtcgtgaaccgccttcgcaaagagtttgtgcatgaaaccctactcaactatggtgtgcactatgacaagacatggatatatgataaaatccatcatgagattaatcagttctgcagtgctcacagtttgcagcaagtttacattgacatgttcgatcagattgatgaaacaatgaaagaagctattcaaagagactgtacacgctatgctcctggaattgaaatcatcagtgttcgtgttacgaagccaaatatacctggtagtatcagaagaaactttgaacttatggaggaggagcgtacaaaggcactgatcgccatggagaagcaaaaggtagcagagaaggaggcagaaacacagaagaagattgcgctatctgaagcagagaagaacgcacaggtgagcaagatcctgatggagcagaagctgatggaaaaggacagttccaagcgacaggagcagattgataatgacatgtacctcgcacgagagaaagcagtagcagatgcaaactactacaggatattgaaggaagcagaggccaataggctcaaactgacacctgagtatcttgagctgaggttcattgaatcaatcgccaataactcaaagattttcttcggtgaaaagattcctaacatgatcatggatcaaaggttgctcaagaactaccttgatgctgctcctaggaaggaccattatgagatgtagaagcgtgttccgtgagttggaagcaaaagacctttgtgtgtgtgatcccaccgtccacgcagtagataggattcccacgagccgttcagtacctcagtaagccagaaaagactcatcaggaccctcttgaagatttagatgcaaaaattttcttcgccaaaaatgtacagttttgctcactgacttaggacatgtttggagcatctatttttttagaaactggtttatgaaaactgaaatggtttcaaacatatctgattatatcccagtttatagaaactagattcctagtttcttaaaaact

SEQ ID NO: 92941 - DNA, 220 bp, Zea Mays
gaggccatgataatcgcttccgcgaacctcttgtatggcatgtgtttacaccaatcttgagtcggtgtaaagtcgataaaagtcacatgctttttaacatgatctattacgaaaagggcgtgacatccgttgaatttccatggcataagaacctgcaaaatatcagtcattaggatcctacaacagaagtgtcctttataaatacattcgaaatgaacac

SEQ ID NO: 92942 - DNA, 1846 bp, Zea Mays
aggtcattttccccttgttcttttaagaaaaaagagagagaggagaagccaatgctgtattaccagcaatggaaggaggcgcgaaaggacggggacgtcgctttgtgagtcaggccgggcagcggcagcggcggcggcgaaaagagaacagagttgcgaagaaagctctccggccggggtgggatctctggtggcagcagcgttcgtccacgaggatccgattcggccgtcggagtagagggagcagtaaagaaaaggaagggtcccgactcccgagggatcaaagtcaccgacgccgcgccggcgggcgcagtcaccaaacagggacagagtactacagactggtccctgtcctgtacgtagccgctactgctcagctcggctcaccagcagcagcagacgccagcgccagccttgagctgctgtgccgaagcggccggatcctgggtccgtcccctccattcccccactataaactaggcgtgctggtacagaggtgcacgcgcactctctgactcagctacgatctgaaagaaacccgccaccagctctcgtccttccttctctccaatccaaccgcaatcctttcagcttcagcttcttctgctccttctctggtgaggaggcgtggtgagagactgcgactgcgcgatggaggcgtcgtcgtcggcgttggcgctcgtggccgccgtgctcctcctctcctccccgctcgctgcgtcagatttctgcgtgtgccgttcggaccagccgacggcggtgctgcagaaggcgatcgacttcgcgtgcggcccgcagggcggcgccgactgcacgcccatcctgcagggcggcgggtgctacagcccggacaccgccgccgcgcactgctcctgggccgccaacacctactaccagaacaacaaggccaggggcgccacctgcgacttcggcggcgcagccaccgtctccaccaccgacccgagtttctccgggtgcactttcgcttccagtgccaccagcgccggtgctgggactggaaccgggacggcgggcagcagcaccttcagccccagcgcgggcaccggcttcaacggcaccgggaacgggatgggcggcagcactactaccggcctgggacccacgggcaacgcctttgacgccgccgccgccgccgcgccgggcctgctccccagcgccgcgtccctcggcctcgcactcgccgtcctctccttcctaacctagccctgccgcgccattaacggcagcctcccctcgtcttatgtctggtcgtgttcagtaccatacctctctgaacatgagccagctgctgctgctacttggcttgctccatggcggaaggggacgggccggggagctgtacgtactgcgacgaagaagagtgcggtggaactggctggttggttggttttggttccagcttcattttcacctcacaccccacactgctagtggcgacggtggttggggttgcggggtgcggtgcgtgccttttttgatgaatcctagctacacgacgggatggcgtgtggtttattcgctggtaggatggctgtctcttttcctccgaggaccattcatgtcttccttgtttgtacgtacctctcttcttttcttgttttatgtacaagacttgtcgctagccctttgtttgtttgtttctaatcaaactctttgttctgctgccattatttacttgtgattagtttaagcctagagcaacccggccggtggtttcggttcagcttcagcattagctggagtgagcacgcgtatctagacggatcttaggtgtctcagtgtctgtcggtccctactcttctatctggaaggctggaagctcttt

SEQ ID NO: 92943 - DNA, 1718 bp, Zea Mays
aggtcattttccccttgttcttttaagaaaaaagagagagaggagaagccaatgctgtattaccagcaatggaaggaggcgcgaaaggacggggacgtcgctttgtgagtcaggccgggcagcggcagcggcggcggcgaaaagagaacagagttgcgaagaaagctctccggccggggtgggatctctggtggcagcagcgttcgtccacgaggatccgattcggccgtcggagtagagggagcagtaaagaaaaggaagggtcccgactcccgagggatcaaagtcaccgacgccgcgccggcgggcgcagtcaccaaacagggacagagtactacagactggtccctgtcctgtacgtagccgctactgctcagctcggctcaccagcagcagcagacgccagcgccagccttgagctgctgtgccgaagcggccggatcctgggtccgtcccctccattcccccactataaactaggcgtgctggtacagaggtgcacgcgcactctctgactcagctacgatctgaaagaaacccgccaccagctctcgtccttccttctctccaatccaaccgcaatcctttcagcttcagcttcttctgctccttctctggtgaggaggcgtggtgagagactgcgactgcgcgatggaggcgtcgtcgtcggcgttggcgctcgtggccgccgtgctcctcctctcctccccgctcgctgcgtcagatttctgcgtgtgccgttcggaccagccgacggcggtgctgcagaaggcgatcgacttcgcgtgcggcccgcagggcggcgccgactgcacgcccatcctgcagggcggcgggtgctacagcccggacaccgccgccgcgcactgctcctgggccgccaacacctactaccagaacaacaaggccaggggcgccacctgcgacttcggcggcgcagccaccgtctccaccaccgacccgagtacaaacgattcctccaccaccgacacgagtttctccgggtgcactttcgcttccagtgccaccagcgccggtgctgggactggaaccgggacggcgggcagcagcaccttcagccccagcgcgggcaccggcttcaacggcaccgggaacgggatgggcggcagcactactaccggcctgggacccacgggcaacgcctttgacgccgccgccgccgccgcgccgggcctgctccccagcgccgcgtccctcggcctcgcactcgccgtcctctccttcctaacctagccctgccgcgccattaacggcagcctcccctcgtcttatgtctggtcgtgttcagtaccatacctctctgaacatgagccagctgctgctgctacttggcttgctccatggcggaaggggacgggccggggagctgtacgtactgcgacgaagaagagtgcggtggaactggctggttggttggttttggttccagcttcattttcacctcacaccccacactgctagtggcgacggtggttggggttgcggggtgcggtgcgtgccttttttgatgaatcctagctacacgacgggatggcgtgtggtttattcgctggtaggatggctgtctcttttcctccgaggaccattcatgtcttccttgtttgtacgtacctctcttcttttcttgttttatgtacaagacttgtcgctagccctttgtttgtttgtttctaatcaaactctttgttctgctgcca

SEQ ID NO: 92944 - DNA, 1793 bp, Zea Mays
aggtcattttccccttgttcttttaagaaaaaagagagagaggagaagccaatgctgtattaccagcaatggaaggaggcgcgaaaggacggggacgtcgctttgtgagtcaggccgggcagcggcagcggcggcggcgaaaagagaacagagttgcgaagaaagctctccggccggggtgggatctctggtggcagcagcgttcgtccacgaggatccgattcggccgtcggagtagagggagcagtaaagaaaaggaagggtcccgactcccgagggatcaaagtcaccgacgccgcgccggcgggcgcagtcaccaaacagggacagagtactacagactggtccctgtcctgtacgtagccgctactgctcagctcggctcaccagcagcagcagacgccagcgccagccttgagctgctgtgccgaagcggccggatcctgggtccgtcccctccattcccccactataaactaggcgtgctggtacagaggtgcacgcgcactctctgactcagctacgatctgaaagaaacccgccaccagctctcgtccttccttctctccaatccaaccgcaatcctttcagcttcagcttcttctgctccttctctggtgaggaggcgtggtgagagactgcgactgcgcgatggaggcgtcgtcgtcggcgttggcgctcgtggccgccgtgctcctcctctcctccccgctcgctgcgtcagatttctgcgtgtgccgttcggaccagccgacggcggtgctgcagaaggcgatcgacttcgcgtgcggcccgcagggcggcgccgactgcacgcccatcctgcagggcggcgggtgctacagcccggacaccgccgccgcgcactgctcctgggccgccaacacctactaccagaacaacaaggccaggggcgccacctgcgacttcggcggcgcagccaccgtctccaccaccgacccgagtacaaacgattcctccaccaccgacacgagtataatttcttaatggtaacggcagccatctcgttgttctgaaacattgcctgtcctgtccacacttgatgcaggtttctccgggtgcactttcgcttccagtgccaccagcgccggtgctgggactggaaccgggacggcgggcagcagcaccttcagccccagcgcgggcaccggcttcaacggcaccgggaacgggatgggcggcagcactactaccggcctgggacccacgggcaacgcctttgacgccgccgccgccgccgcgccgggcctgctccccagcgccgcgtccctcggcctcgcactcgccgtcctctccttcctaacctagccctgccgcgccattaacggcagcctcccctcgtcttatgtctggtcgtgttcagtaccatacctctctgaacatgagccagctgctgctgctacttggcttgctccatggcggaaggggacgggccggggagctgtacgtactgcgacgaagaagagtgcggtggaactggctggttggttggttttggttccagcttcattttcacctcacaccccacactgctagtggcgacggtggttggggttgcggggtgcggtgcgtgccttttttgatgaatcctagctacacgacgggatggcgtgtggtttattcgctggtaggatggctgtctcttttcctccgaggaccattcatgtcttccttgtttgtacgtacctctcttcttttcttgttttatgtacaagacttgtcgctagccctttgtttgtttgtttctaatcaaactctttgttctgctgcca

SEQ ID NO: 92945 - DNA, 1403 bp, Zea Mays
attctaaactctactgccgtacagtctatgcaacgcctgaagagcacggcgctgcccggagaaggatgcgtgtaaggtgtaactatcgcctactgcagctcaggttgtttctgatagtcttctcttctgccgtccatccggcctgcgcgctcgctctcctgctcttctgcgccaactgggcgaccgccgacgccaacgccgacgacctacgccaggtgctgggatttttgtcggttccttcggcagctttcgtcgcgtccttcgccggcgacgagcactcaccaggtccgctcctgaagaagactgggatattttgcatacacagaggatcatctgtgtagaggacattcagttttctccagttctccagttcctggatagcaatggcaaatgagtttcctgatgaagttcttaagtctgttttcccattgctggatggtaaagatctagtattctgcatgcttgtatgccgtcaatggcatgaaatcgcaagggatgattacttctggaaatgcatttgctcacggaagtggccgtccatttgcaaacagcccccttctggcgcaaactacaaaaagctttacttaaccttctctaagccacgggagatgcagaacctccctgtgccaaggcttacattcgaggatattgttttctacattgatatgtggctcgaaggatcgctcatcttttctcaagcagtttcaggccgcactctccgagcaggcctacagggcgctccccctcctggcattccagatatacttgcagcacatttgagttcccaagactgcatcttgatgctggaagtagagcccaagttggcagttcccatggggccagccatcactgtatctgtccttgccaaccgcaaggattcaaacaagatggcttgcatcataaacaagtcaacgtttgattacatcgatagtaatgcagcgcgggctctggcttatgagtatcttaggttttcgcccagacaccctttcacatccgacatccgggcatggatgtcgttacttttcctgtgcaaaggggcgaacaccattgaggtgtttggtatcgagctagatttctgtgacgccgcgaagtcagagaaagaaatcttgtggctcctagacatgcttgattggaaatagaagctccttatcccctttggggtttgacacatgtaaagcctgttcatggttagtcgttcctttcctgttggaccatgtacgctactactccctccgtttctttttagttgtcgctggatagttcaattttgcactattcagcgacaactaaaatgaaacggagggagtactgaactacataatctcctgagaaaatgtaataaatgtcacctgctactccatgtgctaacaaggcgaggttattttgtacttctttttcccttg

SEQ ID NO: 92946 - DNA, 1465 bp, Zea Mays
attctaaactctactgccgtacagtctatgcaacgcctgaagagcacggcgctgcccggagaaggatgcgtgtaaggtgtaactatcgcctactgcagctcaggttgtttctgatagtcttctcttctgccgtccatccggcctgcgcgctcgctctcctgctcttctgcgccaactgggcgaccgccgacgccaacgccgacgacctacgccaggtgctgggatttttgtcggttccttcggcagctttcgtcgcgtccttcgccggcgacgagcactcaccaggtccgctcctgaagaagactgggatattttgcatacacagaggatcatctttccgtttgatgaactcacgggaatggtgatgctcattttctaaaggaccggtcccctttttgtttaatttccaaaggtgtagaggacattcagttttctccagttctccagttcctggatagcaatggcaaatgagtttcctgatgaagttcttaagtctgttttcccattgctggatggtaaagatctagtattctgcatgcttgtatgccgtcaatggcatgaaatcgcaagggatgattacttctggaaatgcatttgctcacggaagtggccgtccatttgcaaacagcccccttctggcgcaaactacaaaaagctttacttaaccttctctaagccacgggagatgcagaacctccctgtgccaaggcttacattcgaggatattgttttctacattgatatgtggctcgaaggatcgctcatcttttctcaagcagtttcaggccgcactctccgagcaggcctacagggcgctccccctcctggcattccagatatacttgcagcacatttgagttcccaagactgcatcttgatgctggaagtagagcccaagttggcagttcccatggggccagccatcactgtatctgtccttgccaaccgcaaggattcaaacaagatggcttgcatcataaacaagtcaacgtttgattacatcgatagtaatgcagcgcgggctctggcttatgagtatcttaggttttcgcccagacaccctttcacatccgacatccgggcatggatgtcgttacttttcctgtgcaaaggggcgaacaccattgaggtgtttggtatcgagctagatttctgtgacgccgcgaagtcagagaaagaaatcttgtggctcctagacatgcttgattggaaatagaagctccttatcccctttggggtttgacacatgtaaagcctgttcatggttagtcgttcctttcctgttggaccatgtacgctactactccctccgtttctttttagttgtcgctggatagttcaattttgcactattcagcgacaactaaaatgaaacggagggagtactgaactacataatctcctgagaaaatgtaataaatgtcacctgctactccatgtgctaacaaggcgaggttattttgta

SEQ ID NO: 92947 - DNA, 919 bp, Zea Mays
attctaaactctactgccgtacagtctatgcaacgcctgaagagcacggcgctgcccggagaaggatgcgtgtaaggtgtaactatcgcctactgcagctcaggttgtttctgatagtcttctcttctgccgtccatccggcctgcgcgctcgctctcctgctcttctgcgccaactgggcgaccgccgacgccaacgccgacgacctacgccaggtgctgggatttttgtcggttccttcggcagctttcgtcgcgtccttcgccggcgacgagcactcaccaggtccgctcctgaagaagactgggatattttgcatacacagaggatcatctgtaagttaaatcttctgaaatctggatccaacatttgtaccatactggtgaatatccttgctttacttttgagtcatgtttgaattaacctttctttccccaccatgcaatagttccgtttgatgaactcacgggaatggtgatgctcattttctaaaggaccggtcccctttttgtttaatttccaaaggtaccatgattactaaataatgatttattagaaattaatgactgatggggtcaagatgtgtgaaactgttaagagcttgagatctgctgattgaccacacccaaaagggaaaatgaaggtggtcttttgaagatttgatttactttgtaaaagggcataattttgtgataactgggaatcattcctcaacaatactgataaaacttcaagtttttccttgatgttgaactgctacctccatgcctccattgtgccacagtggatatccatttggtgctctgtccctatcatctagttgtggtgatggggttcaggcattccctagtcgaaccccctcgctcacccacccaccctggttggaagactccgttgtgattatccataacttttggtt

SEQ ID NO: 92948 - DNA, 434 bp, Zea Mays
ctggcaactcctgttgtgtgaacttggaatctcataatgtcattggaacctagtgtccaaagtccaaacacatgtactgtaaacaataccaccattccacaactagtttgacgcttttcatctttactgaactagctacaccactaagaaacttatggaaattagcttcttaaatagtaatatagctaaaagattgaatggaggatggaaacttatatgcccaccttctccagcatgcggtgaatcctctcagtctccttctttgtgtagtcagagcccttgtccatgatcttctttgcagctgtcacatatatctttccatgcttggctgcagaaccactgagcttagcaacatcctcttctattttagagaggacttccttccgcttgtcatcagcagcattgagaaactccttcacaagagggttcaagct

SEQ ID NO: 92949 - DNA, 913 bp, Zea Mays
acactgcttctaaagaatcgtagagaatacaaacattaaaagtcataaagtatttatcaaaccgtctcgaatatcctacaataatagacgattacaataggaaaaccatcttatttaggtgactaataatggacgttttagaaaccgtcttatttaggagactgatattagacattttggtaaccgtcttattaagatttaaatgaaatgacttacacggcagtacattcttcaatttataatcattttttcagatatcatgttataataatttgaaagagaaatatacatacacatatattgaacaccattataattaatataatataaataagtaccattcaatatatcataaataagcattgtcaaacaacgcatacataagtgtactctaaatctaaactaaaatacaactgtttgcactaatgttaagcctaactttatatgaattaaagtctccacacttttgcgaccaccaaatttgaattctattctatgttttcctgtacaacaaataggagaaaactagacatagcaaaaagctccaagcagcatgtggatggtctcaaagctgccctgtgcttctccctgttcttgatgactcctacacgcccggtgttcctcctgccagtcaccatgaccacgttgccgacgtcaaacttgatgaagtccatgatcttgttggtctccaaatcgatcttgatggtgtcgttggccttgatgagcgggtcggggtggcgggagataagtcattggtagaaaacttgatgaagaccatagcaaaaagctccaagatgttccatatgccacaaagtctttacaaatatgtaacaatgtagggataaagggagataagtcatgcccaaaatattattttttgtaataaattacagaaatgaaatgctgccagaac

SEQ ID NO: 92950 - DNA, 614 bp, Zea Mays
atcaaccaatccataactcgaaaccttttcttgtgctctgttctgtctgtgtgtttccaaagcaaacgaaagaggtcgaggatgtcttgcagctgcggatcaagctgcaactgcggatcaagctgcaagtgcggcaagatgtaccctgacctggaggagaagagcggcgggggcgctcaggccagcgccgccgccgtcgtcctcggcgttgcccctgagacgaagaaggcggcgcagttcgaggcggcgggcgagtccggcgaggccgctcacggctgcagctgcggtgacagctgcaagtgcagcccctgcaactgctgatcctgctgcgttgtttcgtttgcggcatgcatggatgtcaccttttttttactgtctgctttgtgcttgtggcgtgtcaagaataaaggatggagccatcgtctggtctgactctggctctccgccatgcatgcttggtgtcggttctgttgtgcttgtgttggtgcatgtaatcgtatggcatcgttacacaccatgcatctctgatctctttgcgccagtgtgtgtgactatgtccctgtaacgattggctcagtgattgaatatatatacaatactgttttactaagtaa

SEQ ID NO: 92951 - DNA, 667 bp, Zea Mays
tatctcaacaagttgggcacataaactaccaacaaaaggaagtataaaatgtaaaggcattaatactgtaatagtacaaggggatctaaaccctagctcctttgtttggagtttaatgtagattttgatctaattttctgtttggattgattatcactttgtattatctaattaatttccatattcatccatgttaagtactctaattcactgactcttgatttcttatcttctgaaacctcgttggttatcctgctcttgcaatttaaaatttgctactgtcctgttaccctgattctattttaagctaggatgtgaattacaggttagggattgatgaggaacttgtggaactattggggcatcattcaccaatcccagtaacttatgctgggggtgtgtcaacaatggatgacctagagaggataaagaaggcaggcaaaagtcgagtagatgtaactgttgggagtgctctagatatatttggaggagatttaccctacaaagatgttgtcctttggcacaagaagcaaagtatggttggccaagtgtcaaggaacatgtggtagcgatcagtattgccagaatttattgtgtatcgctcgctaaaagcatatttattttcattacaaaacttcattgtgcgtttgaattactgagctttctt

SEQ ID NO: 92952 - DNA, 1467 bp, Zea Mays
aggagcccactcttgggcatacctcagttccaaaaagctcgcaacagccagccctaggtctgaactctctcggacgggtgacaggctgacagccgccgcccgccagctttggagagccacggtgacaggccgccagcagccatcgacggccctccctccacctcgccgtcgtccctcttcccccatctcgccgagccatcgtccctccacagcaggaccacctcaccgagccgtcgtccctccacagcaggagtgcaggaccgcatcgccgagtcgtcgtctctccacaccaggttcgccgtcgcggcgcggctacctcgctccggctcccagctcgtccggtccagctcactcgcggtcgcgaccatctccgtccacctcatccctccggcaagcagttgctaaactcatccagggtcagtggtggaggatggcatcgaaatacgtggccagggtaccgtctccatggtgggcgccacaacgtcgtttggttggttcatgggtttccgtctgctcggtaaaatgcggtgcattgggaggacgggatgttgtgtgcgctgctgttagcttcagaccatgcatcgacattcacaaggggaaagttaagcagattgttggttctactcttcgggattcatccaatgatggcatggaacttgtgacaaactttgaatcagacaaatctcctgcagaatttgcaaaatcatataaagaagatgaacttcttggaggacatgttataatgcttggctcagatcctgcaagccaggctgctgcactcgaggcactacatgcatatcctggtggcttgcaagttggaggtggaataaatttgcagaatgcaatgtcttaccttaatgaaggggccagtcatgtgatagtgacctcttatgtgcttagcgatggcaagatgaacattgaaaggctgacaaaacttgtcgagctggttgggaaacagaggcttgtgctggaccttagctgtcgaaaaaaggatggcagatatactattgtaactgacaggtggcagaagttcagtgatgtgtttgtggatgaaccggcattagaatatctcgctgccttcgcagatgagtttttggttcatggtgttgatgtggagggcaaaaggttagggattgatgaggaacttgtggaactattggggcatcattcaccaatcccagtaacttatgctgggggtgtgtcaacaatggatgacctagagaggataaagaaggcaggcaaaagtcgagtagatgtaactgttgggagtgctctagatatatttggaggagatttaccctacaaagatgttgtcctttggcacaagaagcaaagtatggttggccaagtgtcaaggaacatgtggtagcgatcagtattgccagaatttattgtgtatcgctcgctaaaagcatatttattttcattacaaaacttcattgtgcgtttgaattactgagctttctt

SEQ ID NO: 92953 - DNA, 445 bp, Zea Mays
tatctcaacaagttgggcacataaactaccaacaaaaggaagtataaaatgtaaaggcattaatactgtaatagtacaaggggatctaaaccctagctcctttgtttggagtttaatgtagattttgatctaattttctgtttggattgattatcactttgtattatctaattaatttccatattcatccatgttaagtactctaattcactgactcttgatttcttatcttctgaaacctcgttggttatcctgctcttgcaatttaaaatttgctactgtcctgttaccctgattctattttaagctaggatgtgaattacaggttagggattgatgaggaacttgtggaactattggggcatcattcaccagtgcgtacagacttcaaatttggacttccagttttcttttctggatcttcgtttcattctttatatatttt

SEQ ID NO: 92954 - DNA, 979 bp, Zea Mays
aggagcccactcttgggcatacctcagttccaaaaagctcgcaacagccagccctaggtctgaactctctcggacgggtgacaggctgacagccgccgcccgccagctttggagagccacggtgacaggccgccagcagccatcgacggccctccctccacctcgccgtcgtccctcttcccccatctcgccgagccatcgtccctccacagcaggaccacctcaccgagccgtcgtccctccacagcaggagtgcaggaccgcatcgccgagtcgtcgtctctccacaccaggttcgccgtcgcggcgcggctacctcgctccggctcccagctcgtccggtccagctcactcgcggtcgcgaccatctccgtccacctcatccctccggcaagcagttgctaaactcatccagggtcagcagatcagcagctcttgccttatcccgctggctggccgcagcaccggtggtgtggtggaggatggcatcgaaatacgtggccagggtaccgtctccatggtgggcgccacaacgtcgtttggttggttcatgggtttccgtctgctcggtaaaatgcggtgcattgggaggacgggatgttgtgtgcgctgctgttagcttcagaccatgcatcgacattcacaaggggaaagttaagcagattgttggttctactcttcgggattcatccaatgatggcatggaacttgtgacaaactttgaatcagacaaatctcctgcagaatttgcaaaatcatataaagaagatgaacttcttggaggacatgttataatgcttggctcagatcctgcaagccaggctgctgcactcgaggcactacatgcatatcctgggtaaagtattattgcaatccggtgctcgttttgttctctacggtcacagccaacagccttcttgtgatggagatttttacatcttccagtgtttcttctgttagtatggtttgtttctgcttt

SEQ ID NO: 92955 - DNA, 1530 bp, Zea Mays
ctttaaagcctccgcgttagtccttaatgtcttactgagacgcgctagaggggggaaaaaagacatatcaggactggtttggcagcccaaaatccagcgggtttcctggccttttctcctgggagaaagcccaccagaaaattgtcctcggattattcatgtgtgtcatttggcagcccaatctcgtgcagatattcgttccattttcccgtcggaaacaaccctggccttaggaggccaggcgattctccgccgcctcgtctcgtcttcgctatgcaccagcacctccgtcgctccaacgccctgagcgcctccgtcgtttgattccggtttgcttctggtttctgccgcacaagggcatcgacgtcgtgctcttcgcgccggacgacgccaaggccacgcagaccgccgacccgaacaggaagaagatcaagctccatgcagggcatcacccaaggccacgcagaccgccggacgactccaaggccggatctccgtgcagccgtgcagggcatcacccacaagaagaagatcaagctccggcgaggtcagtacctacctaccttcagatctggacctgctcctttgtgtcctagtcgtaccattacagattgctctgtacatcgtagattggcagtgttctgaatatctatagcaggcctgatacttcctatatttgtttcattgctacatacatattaattacacgaacattcgatctataaaaaaagtacaagtgatactgtaatatacgtgaggaagtatcggaggatactgcaatctgaaaaaaattgaaatatgatactaaaatatgagatttgcaattcatgtagattgatttgcaatctgaaaaaagattggggaggtgtgtagattaatttcacaactgatcgctagcaccaatcaatgccagttcatctagtggtcagaatgtattggatttggaggaaggcatatgggcttgtcggtgtccgtctggacatttcctattgacatggacattttcttcttcctgtgaacgcatatctccatatttttcttctatgtttttcattattcctagagctagttgccagtggctatattttggagataaggtagtcaaagtatgttaagttaggtgtcataagcttaacatccacttgtaggttccaatgattggaattttttgcataccgacttctgattgatttgttgcatgtttgttttaacactatgcttccttgcagtacctctttccatctcctgtcgctgcctctaccatatctatctaaaggaacaaatttgagcgcatcttctgttgacagtgactttagtttgctattggtgctccagtaagaaaaatagatgtattttgttgatggtggcttcacaatctggcacatgactcatgaaaagctttgtttgacaaactattgtgaaggaacaagtatactgtcttttactacttcagtttgcttgacaaactattgtgatgatggataaagtgtgatgtgatgatggataaaccaatttactatgcttcagttt

SEQ ID NO: 92956 - DNA, 837 bp, Zea Mays
ctttaaagcctccgcgttagtccttaatgtcttactgagacgcgctagaggggggaaaaaagacatatcaggactggtttggcagcccaaaatccagcgggtttcctggccttttctcctgggagaaagcccaccagaaaattgtcctcggattattcatgtgtgtcatttggcagcccaatctcgtgcagatattcgttccattttcccgtcggaaacaaccctggccttaggaggccaggcgattctccgccgcctcgtctcgtcttcgctatgcaccagcacctccgtcgctccaacgccctgagcgcctccgtcgtttgattccggtttgcttctggtttctgccgcacaagggcatcgacgtcgtgctcttcgcgccggacgacgccaaggccacgcagaccgccgacccgaacaggaagaagatcaagctccatgcagggcatcacccaaggccacgcagaccgccggacgactccaaggccggatctccgtgcagccgtgcagggcatcacccacaagaagaagatcaagctccggcgagtacctctttccatctcctgtcgctgcctctaccatatctatctaaaggaacaaatttgagcgcatcttctgttgacagtgactttagtttgctattggtgctccagtaagaaaaatagatgtattttgttgatggtggcttcacaatctggcacatgactcatgaaaagctttgtttgacaaactattgtgaaggaacaagtatactgtcttttactacttcagtttgcttgacaaactattgtgatgatggataaagtgtgatgtgatgatggataaaccaatttacta

SEQ ID NO: 92957 - DNA, 1245 bp, Zea Mays
atgtgggatgtggctgtgcttgctagcagcgccactcggcacagctgcaaggtgtgccggaagggcttcccctgcggccgctcgctcggcggccacatgcgttcgcattccctggccgacgagctggacgacgaggaggagcaccaacagcggcaaggccttgattgcgcgacggctccgggagcaggaggtcacgggctgagggacaagccgaagaagacacggcgcctctcgagcctcagcgactgcggtggccgcggtgacgtgttttcaccgtgtgagtcgaacgtcgattaccgccgcgcgcgaggcggtggcaaagcgatggaactggagcgtgattggaagcaggagggcttgatgccgccgccgaggcgtaggcgctctatgcgtgtgccggctcgcacgccgccgccgactgccttcgacaaggagccggaggatgtcgcactctccctcatcatgctgtcgtgcgacatcgtggaccgtcgcggttgctccacggccgtgggcgccaagtactcgccgggagaggacagcacgaggcgagattatcagtacgagtaccaccaccatgacgccgactccaacgacggcaccaaaatcaacaagaggaagctccatcacagcgacgttggtgacgagaagcggggccggtacgagtgccctgtatgcgggaggacgttccggtcgtaccaagcactcggcggtcaccgcgctagctacaagcggatcaatagtaactgtagcatcgccaaacctatccttgactaccaaccggagcccaagcccagcgtcgagaccaacactacctccatggttagtaataataggacgattaaattcgagtgtcgcatctgctttagggtgtttagctcgggacagtcgctcggtggacacaagcggtcacactcgatcgccggtgagctctatgagcacgtacattctgtcgatgacgatgacgttggtgacgatgagcaaccactgatctctgatgagtttcttgatctcaatctgccagctccaggagttgaggattgaaatttggctacttaagtcttgattttcagacgaagtatggatgtggtacctacatactagtgtgaactatagattcaggttcaatcgattcttcggagcttcaagttacgagtgatctagattcggtgagatgaacaatgattgctaatcttcttgggttcaaatttcacttatattatgcattttactagtttttttgttttg

SEQ ID NO: 92958 - DNA, 564 bp, Zea Mays
cctagttaacaaaacacacaaagaaacgctgccacatcactccaaaaccacaaaaaatgagcccaagttcaaaatcgaaacagcattgatagtcgagaggtcagacttagccagcactggagttgactgtcaaaatcagaggcagacaagcatgatacttgttccattcttttattggtcatctgatacacagggccgccataacgatcaaagtcgaatcgtgagcctattaatgaagcaaattcaatgaaacaacaactggtaccatatagaaggggccataaacttgagagtcttcaccaatttgaaagatcgtttggtgtagttgaaataacggaattggaacttgtttggtcgagtaacggaaactcaatcaaactcataattgtctcaatggaatcttttccttcttttttttctgaatattcagttaagaccattccaaggctccttttcgccatgcataaactaaaccaacaactaggataagcacaaaaatgaaagcttcgataaaaacggatacacgcatacattaaacatttgtcacccagggtagcataaata

SEQ ID NO: 92959 - DNA, 877 bp, Zea Mays
actgcctataaaaacccggaacacgacctagctctctcccatgcatctcatataagaataactaatcaagatcgatcgagaatggcgtttccgaagcctactagtcgtctagccgcgctagctgccctcgctgcggccatggcggcggcgatgatggccgcgaccgcctcggcgcagaacacgccgcaggacttcgtgaatctgcacaaccgcgcgcgcgcggcggacggcgtgggcccggtggcgtgggacgccagggtggccaggtacgcgcaggactacgcggcgaagcgcgccggggactgccggctggtgcactcgggcgggccgttcggcgagaacatcttctggggctcggcggggcgggcgtggagcgccgccgacgcgctgcggtcgtgggtggacgagaagaggaactaccacctgagcagcaacacctgcgaccccggcaaggtgtgcggccactacacgcaggtggtgtggcgcaggtccacccgcatcggctgcgcgcgcgtcgtctgcgccgacaaccgcggcgtcttcatcgtctgcagctacgaccccccgggcaacgtcaacggccagcgcccgttcctcactctcgacgcggctgccaagtagaggcagagagcccggctgcatgcagtgtgcgtacgcacgcatctgcgtgtgcatggcgtggctactcgatcgatcacgtactgcgtgtgcgcgcgcaccataataagtattgtgtgtacgtatatatccgcatctgcagtgtttgtgtcatatataaaataatcgtctgcgtgcgctatataatatctatagaacttcaataattttacatacggcaacttgctcactctctgtctcaaaaccaaaaaaaaaaaaa

SEQ ID NO: 92960 - DNA, 1531 bp, Zea Mays
aggccccttccatttgccactgtccatccacgcgaccacacccccgcaactgcagatccccaattcgtttatttcttcccaccgagccaagctgcgacgacggcggtcgcagcgtcgccttccctccctccgtaccgccgacgccgacgagcatattgggccgagcgcccgagcacctctcctgtcagcagcggcactcgccattccaagtacgaggtcgacgcgctgtggggcttgctgaaacgagcaggtctacccccaagtgaaatcagggtcttcaagatagcttactgagatgtggggttttgcatcaaacgcttgggcagctgggctggagaagaggagttccccaaaccgcacttcctcgagtgctgcttattctgacgacgaagcatcctcgtgcacaagcagggaagaaggcctggagtgcccgatatgttgggagtctttcaacatagtggagaatgtgccttatgcgctatggtgcggacacaccatgtgcaagaactgcatcctagggcttcaatgggccgtcatcaaagtcccaaccgtgccgatccagctaccgttcttcatctgctgtccctggtgcaacctcctgtcgccccgcgtactttacaaggggaacctcacgttcccacgaaagaactatttcctcctctggatggtcgaggggatgaacggcgagcgggccagatcacgcccagctattcgcagcgagcagcatactccgtggctctcaagcagcagcagcgtggcaaatggaaatgcaggctgttcaaatcccactcgacgccacctcccgccaccatctgttgacacttcgcccaccaacgcaaatcatgccaactacggggggtcccctctgctgaacgcagggagggtacaagcttcgctgcgcaaatccctgtcgttcctggtccacctgactgccaagtttcccctggtgttcgtcttcctcctcatagtgctgtatgcgatcccagccagcgcagcagtcctgttactgtatatccttatcactgtgctgtttgcgcttccctcgttcctgatactgtattttgcatatccgagcctggactggcttgttagagagatctttgcctgagattttttgttcggaaaaaaaaatctcaatgctgttgttggggtctgtgtaactgaattctccctagattttgttgcaagtgttgaagttattgccaagttttggttttggacccatgccgacatgtgatagatatgtttacctcaagtctccatggtatggaaggtcctctgttgctgtgttgcattgcaacacatcagcgtgctctgtgctgctgacatctgttatgttggcttgtatcgcttgagtgcttggaatggcagggattgacgaagtgtgggggtatctgaaaagaaaagttctttttttttctggatttggtatggcttctcgaaatatatttgtgtcaagctgcctaaccactttgttatccttagaagtggggggtagtgacaactgttttctgaaacaaaactgtttaac

SEQ ID NO: 92961 - DNA, 1312 bp, Zea Mays
aggccccttccatttgccactgtccatccacgcgaccacacccccgcaactgcagatccccaattcgtttatttcttcccaccgagccaagctgcgacgacggcggtcgcagcgtcgccttccctccctccgtaccgccgacgccggtgagtctccgacgccgagacctctcccatttctgtgattccagcgcttccccttacaaccattgcggccctgccccgctttgtttcagacgagcatattgggccgagcgcccgagcacctctcctgtcagcagcggcactcgccattccaagtacgaggtcgacgcgctgtggggcttgctgaaacgagcaggtctacccccaagtgaaatcagggtcttcaagatagcttactgagatgtggggttttgcatcaaacgcttgggcagctgggctggagaagaggagttccccaaaccgcacttcctcgagtgctgcttattctgacgacgaagcatcctcgtgcacaagcagggaagaaggcctggagtgcccgatatgttgggagtctttcaacatagtggagaatgtgccttatgcgctatggtgcggacacaccatgtgcaagaactgcatcctagggcttcaatgggccgtcatcaaagtcccaaccgtgccgatccagctaccgttcttcatctgctgtccctggtgcaacctcctgtcgccccgcgtactttacaaggggaacctcacgttcccacgaaagaactatttcctcctctggatggtcgaggggatgaacggcgagcgggccagatcacgcccagctattcgcagcgagcagcatactccgtggctctcaagcagcagcagcgtggcaaatggaaatgcaggctgttcaaatcccactcgacgccacctcccgccaccatctgttgacacttcgcccaccaacgcaaatcatgccaactacggggggtcccctctgctgaacgcagggagggtacaagcttcgctgcgcaaatccctgtcgttcctggtccacctgactgccaagtttcccctggtgttcgtcttcctcctcatagtgctgtatgcgatcccagccagcgcagcagtcctgttactgtatatccttatcactgtgctgtttgcgcttccctcgttcctgatactgtattttgcatatccgagcctggactggcttgttagagagatctttgcctgagattttttgttcggaaaaaaaaatctcaatgctgttgttggggtctgtgtaactgaattctccctagattttgttgcaagtgttgaagttattgccaagttttggttttggaccc

SEQ ID NO: 92962 - DNA, 3734 bp, Zea Mays
gatttagtttaaatatgaactagcggacggcaaatattaaatatctggaaatggaggtcgtattaattaggtttaataatttcttctcgttgtttagtcttcatctatattattagttttataactaaactatatttaatatctatttaatatctgtaattgacattcaaaatttttatatgatccatactataaacttttagttagggaccaaacacacactttaaacaatacaaaaaaaaccccaaagtcggctctctcgagtctgctcgaatcttgatccaccacaacacgcggttccccgagtcgaaggctcgaagcagcagagccagcagcgagccgccgcccgccgccgatggcgtccccatcgccggcttccgcgcggccgcagcgctctcctgacgaggtggaggacatcatcctccgcaagatcctcctcgtctccctgacgcccccggccaaccccagcccagccgtcgcctacctcgagctcaccgccgccgagctcctctctgagtcgcgccctctcctcgccctgcgcgatgccgccgagcgcctcctcatcgaccgcctctcgctcccggacccgcccgccgggtccccgacccctttcgcctacctcgtctccgctttccgccgcgccgccgacgaggcgcgtaagatctccaccatccgcgacgccgctctccgggcgcgcctcgcagcctccatagcgcacctccgggccctcatcctctcctacgcgcgcatcgtcgccgggaatcccgacaccttccccaccccgcccggcgcgcaacaccccgcctccgacctcctcgtattcctcctcgctgaggcagccgacccgctcgaccccaccccggcccccggggcgccgccgccgccgggcttcattgatgagttcttaggcagcgcggactatgactccatcgagccggccatgggggagctatacgagctccttaggcagagtgtcgataaggtttcggccctcggtgactttcagcgcccattgcggttgctcaggcggcttgtggggatccccaattgtgccaaggccctggttaaccatcctaagtggataccaaagaatcagatcatgctcattggggaagggagggtcatggagctatacagtgtactcggggccttcttccatgtaagcgccatccgagaccgagagttcgctagcaagcctgatgtggggcaacagtgtttctcagaggcatcttcacgtcggccagctgacttgttgtcatctttcacaacaatcaagagtgttatgaatggcttgtatgatggccttaaagatgtccttttaatccttctaaaaaatttggatactcgagaaaaggttcttgagtatatagcagaagtgataaataaaaatgcatccagatctggcatgcaggtggacccattaaaatgtgcgagttcaggtatgtttgtgaatcttagcgctgtgatgctccgtctatgcgagccttttctggataacatggaagcaaagaaggataagattgatgtcaattacctcttctgcaacaatagaattgatttcaaagatttgacagctataaacgcgtcttcagaagaagtctcgtcttggatagagagcataaacaatgagcatgctcaaaataatgccagtggagaggctcgatttgcggaatcacaggaagccacaagctctggcaaaaatagtacggcctcacaacttaggtgctcaaagaaggagaatttctcatttatttgcgaatgtttcttcatgacctcaagagtacttaatctcgggttgatgaaagctgtatcggacttcaaacatatttctcagcaactttcaaggttcgaagatgatttggaatcaaacagagcagtgagagatcaaggagggggttcaccgcagcttgagcaagatataactcgcttggagaaaattgtcgaaattttatcacaggacaaattctgttatgaagctcagatactacgggatggtgcattccttcaacgagcattatctttctacaggttaatgatactctggtcagttaacctagttggcggatttaagatgcctttgccatcacaatgtcccaaggagtttgcttgcattccagaacattttcttgatgatgcaatggatttacttgttctaacctctagaattccaaaggctttggaaagctttgtattggatgactttctcagcttcatcattatgttcatgggaagcacatcttacattaagaatccttacctaagagcaaagatggttgaagttttgaattgctggatgccacaaagaagtggcttgaattctacagcctcattgtttgaggggcaccaactgtgtcttgactaccttgttggaaatcttctaaagctttatgtggatattgaattcactggctcccatacacaattttttgacaagtttaacattcgacataatattgctgagcttctggagtatttatgggatgttcctagtcaccgaaacgcatggagacaaatagctaaagaggaggagaagggtgtatacttaaattttcttaactttctcataaatgatagcatctatcttcttgacgagagtttgaacaaaattcttgaactgaaagaaatagaggctgaaatggctaacatagttgagtgggagcgcagacctgctcaagaaagagaggagcggctgcgtgtatttcatcagtgggaaaatattgttcgttttgacatgaggctagccaatgaggatgttgggatgcttgcattcacctctgaacaaattccagcacctttccttctccctgaaatggtggaaagggttgcgagcatgcttaattacttcctcttgcaacttgctggtccccagaggaaatctttgactgtaaaggatccggagaagtacgagttcaagccgaagcagcttttgaaacagattgccaccatctatgtccatatctcaaggggcgacaaggaatctgtcttctcagctgcaatctcgaaagatggcagagcatacaatgatcagttgttttctagtgcggctaatattctgtggaagattgggggtgatcccaaaatcatacaggagtttgtgcaacttgctggtagggcaaaagctgctgcttctgaagctatggatgctgaggcaatccttggggacataccagatgaattcctcgatccaattcagtatactctaatgaaagatcctgtgacactgccatcgtcaaaggtcacagtagaccggcccgtaattatcaggcatctgctgagtgattctacagatccatttaaccgctcccacctcactcaagacatgctgataccaaacacggagctcaagttgcagatcgaggagtttgtccggtcccagcagtcgagaaagcgaactgctgcggcgttgttggagattggcgaagcggagggtactgatgatatggccgaatgaattgtgccaggagcaggggatggacacattttttttgtggggaaagagtgatggttaattcacatgaaatgtatcggtccatctgtccgtataaagttggtttcccggcttgtgtccctgttgcctcgattctttgtaaatattgtaggtgcacacctgatacaaatgtagttatagaggaagcctgtcagcccgtctcatcaacaatgtgttttacgatatccccactacaactttttttaacacgatattatcactataacttgatatgtgtgttgggctg

SEQ ID NO: 92963 - DNA, 600 bp, Zea Mays
atgaatagtgctgggcgtcaggatcgccacaacctcgggatgcatccgccctatatgattaggtgttgcctaggcatgaaatggcgtcaggaagacgcctatagaactgcagcggacgccagacatgaatctgcatggggacaggagtcaatcagtatgcaccgaattgaccgcaagaaatcgaccgcttggagctcacgcaacttcaaggagagaggaggagggaaaacgagaaggtggagggcagaactggagctcttggtggcaggcagcaaaggcagcagccctgattcgccgcttgggcgctcctctattgaagtacacctcctcaagtccatttcactgccggtcatccacacctgtgacccgctaccgtcagccacccgcactgcagttgtcctcgtgcttcaaatcgccgtcgccatccacaagtacatacgatacgcacctgcctccttttgtgatatacacacctgtccattcgcttcaggtgttgtgagggggagggggggggcactgcctcgccacaacgccttaaaaaccatgtatgagatgcaactggagaatagctacacgacttttgaagctaaaagacagtga

SEQ ID NO: 92964 - DNA, 802 bp, Zea Mays
aatcgaaccaggcgtcttcgttgctgcaccctacaacgagtccctctggctgtggtgccattccatctgcgtgaggtggaacgtcttggagtgctccgacttgccccggttggccgtctccacgtgcacgatctcgctcatggagaagccggtcatgcggcctctgctggcatcgcccagctgctgcgactggggcgcctccggcatgatggaccggcggctgtggactcgccgccccctggtgtagtacctcgccggcctcctgtgatcaagcgcggacttggaggtacaggaacccatggcggacacctgtgtgcggctgctgtttctgctactttttcagcgattcacctccagatcgccctaacacggtgtggagttacaaatgaaaacctaacgacctgcaatcacaataagcagacacaagtgagggcgatgtatgtaccaagaaatctggataagctgcacaatggattggagacttaccaggttgaatccaagaaagaaaaaaaaagcagacctacagaggaggagaggcagtggcgttggacggacggaagaacatgcagattgttctgctatatatagtgttcattataggctcgtgattgggggccgggtgtgctagtttatggagtgtatgtgctcgtcgtcggacgtcggtaggctggcattgtgcattgcagtttgcaggaactgttctaaatcacaccaaatgttcctggagagataattaggccgctctgaacttcagggaaggttcttgttcattatatgcataacgaagaaagatcttgctgat

SEQ ID NO: 92965 - DNA, 354 bp, Zea Mays
atggaccttgtcggtcagatcgtggagggggagaatcgaagtgatgactcacatgtccaggagcactgtatcgtcatcctctccggtggtaacgacgacctcatcgagctccatgatggtcgcaatctagggccggtgtcctcctcgacggtcttgccatggtcgtctaagcatggtgtcggatctgtggatctgatgagcaggtttgacttaccaaaggtggagtctccggtgagcaccaccctacgcgacgatgtcggcgagttcccaatattatgccttgtgagaaagaactcaagttcccatgttgaatggaatcaactgcgctacaaaaggttgtgttctgacaggtga

SEQ ID NO: 92966 - DNA, 857 bp, Zea Mays
cggacgtaacgttatattcgacgtctttctatagccttcaaacataagggattttaaacctgcgtgctcgaccgtgtcgttttatttcgcacgttcaccagccgcttcacagcacccgccgcccccgcaggcgctcgccccgcccccaccgcctcgccggctccaacgcccgcccgaggatagttattatgtcctcggaaataaggtaattttatatgatttagggttcgtgacaatgttttttttctatataatattgtattggtgtggtttattagttgaactacataataatttacgatggttctagttatccgtagtccatcgtagcgtcaacaaacgaaacctagatgtcacctgtttcgggccaagacacctcacatgcgacacatgtgaggtgtgttgggttgaaattgtccttttattggacagtctcggggtgaccgacatatcccatgtttatgacaaaggcatattctcctgcgtagttttgggagtataacccctctgttttccaattgcaccattttcaggcgtgcgagtggagaacaacaggattatgctgccaaaattccgcacgagcacatgccttgtcctaaacatgggctcctcagtcactcctgggtgggtttaggacctctcttttcttatagatgtagggacgtgatttacttaactaatcaagttaacgtctcgtatctaatagggaggaggatcgtggatgcatatatgaaggttggaagaaaagatatgctctatcaagtgagtgagttgtcaagattgttgcgtttctcgatcaagaaggatcgtcgatggatgtacgaagggccgtcggacataaaatagtattatatcct

SEQ ID NO: 92967 - DNA, 354 bp, Zea Mays
aagtgttccctgtacagcaggccgaggatgccattggggttgcaaccatgacccctagcattctccacaaccatccaagacctgtccaagtgataaataaaaaatattagtttatattatgattttgaacacatgatatgaacaagcatggagaacataaagttacatgcctctccccatccggctgaatcagcggccgcctgtcccgaagtatgggacgctgagggagactcgcgggatctcgcaggtagacgttcctcgaacctgaggcgccagaacctgaggcgtcctgctgagcgtcgtcgtcgtcatgctgcgccgcctgctactagtcgtcgtcgtcctgctgcgccg

SEQ ID NO: 92968 - DNA, 109 bp, Zea Mays
attttcctattttctagtttcaatttcaaactcaaactagaattcatgtctaagtttagcaattcaaatataaatgggcaaacagaacaccagcatgatgcaaaaatac

SEQ ID NO: 92969 - DNA, 1235 bp, Zea Mays
gacacccttcctctcgtcgcccacggcccacctcacagtcacggacgccttcgcggtgagccgcgacggctccctaacgtaaacgccggcggcgcgcgcggaaagctgcacggcagcacgggcgcggcctcgtctccgcgcctgggctgcaagggcggcggctcggcgcggtgggaggcggggggcggccatccggtcaggtccagcccaggactccaggtgaccaggtcggcaggtccgcgctccgcaacggttctggcgttctgcggctgagtacagacgacagaggaattggggatttacattagcgatttacaaggcaacttggaagacaagcagggtttcatcccgcaatgtcagctcccaacagcgatagcaacatgcagcagctagtccctatagcaccaccaggaaaggcttctggtggtgacagtgagaaggggctggttgtggtggatcttgcaggtaagagatcaggaggtgtaaaactacgagaggatgaggaagacctggaggtgaagctcaggcgcatcatggagaatgtccctgtgcgtgtcagtaacacatcagggtcctctgctggctctggctctggtgatttccaccagtatcggcaaatgaggaggagagagcaggaccggctagctcgaatggatgctgactaccagaagagaaagaagatggctgagttcgaactgcggagggaggagaggatgaaagcagctgaggagcggacagccaagaagcgcctgaaacggcaaaagaagaagcagcgtaagaaagagaagagagctaaaacgggtaataacggtggtgatgaacctaacagagtggagtcttctgatgacgatcacggttcggatgacgatgatgagtccaagcaatgacacgtcagttgcatctgaagatgatttcggacactggttgtctgggcattgaactaacgtctgtatggccgttgtaacaggttacaggccgaatctggtgctctatctgtaagaggacgtgatattttgagcagagaatgatagcactagataatttcatgttagtgttcatcattaaggtcttattcgtttacacaaattcagctctacattagcatggattgatgtgaggtatggatttatctaatctaaacctagattaaatctatgatgtgattccataccttgtaaccgaacaagtcctaagagagctagaatcatatcgtgtgcctgcgcgcttagtgggaa

SEQ ID NO: 92970 - DNA, 713 bp, Zea Mays
ctaatctggtacttatctgttacaaccatatcctatatattaggaactctaacaaactggaacccaaatctgttacatgatagatctaatctgggtgtcgtttggttcacgaaatgtaacgtaaattgtaatggtaataattcacactcgaataccggcgtaacaaatttgaataaggcggcatccatttatattgtggtatcgattacggttgggcttaaacaaacacgacttaacgttatcggttacccattacgttaccaatatgtgaaccaaatggcactctggtacttatctattacaatcctatcctatctattaggaactctaacaaactcgaatctagaactagaataggtaacaatgatgcaagatccggcaagtggaataataaaaaaataggaggaaaaactcatgtgggttgtgttccttaagtggccgaatagataagccttttatttgttatttttttattttttatttctagatttaattatcccaattaaaatatggttttaaactttgaaaccatatttatatgcacaaccaaaacaccaacatgaatgcaaatattttacatttatttactccttatttactttgctcaaataagtatttgtatgcatgcaatttaataagcatggaattcacaaagttatataacccaataggactaatttatatagaataactcactatcctatttattatag

SEQ ID NO: 92971 - DNA, 1548 bp, Zea Mays
atgctgctgctgctactactactaggtgcgaccaatcaagcggcgaacgtgacgctgcaccgcggtctagtcggacgacgggcgagcagctggcgcccagtgcggcggcgccgggctgaagtggcgcgacacgacgcgggagtcgagcagctccacgatgggcgggaaggagacgcagcggggcaccttgtactggttgatggacgcgccgcgggaaatggcgtagtccatgagctcctcgaacgtgcccgaccggaccacccggatctccagcggcccgatggatccgtccgccacgcggctctgtcgatacaccgagttgagcgcctcctccatctccaggcagcagcgctccagcacgtcgcccgccacggcctgcgccgccccctgcttgctggccttggtggtggccagcagctcccagtagatgacgtagtggcccgggatgctgcgggtgcaggcgtggctcgtgtactccaccaccgccgcgccgccgccgcagcgcgcgcggagcagcgccgacgcgcggtccacggcgcgctgcagctccgcctcgtcggtcttgtcggactcgatggacagcagcacgttcttgcggcgcacgaaccggaactgcggcgccgcgttgtggaagccggccacgcgcaggatgtcgccgacgcggtaccggtacagccccgcgtacgtggtgatcaccagctcgtactcgcgcccggcctccacgcgggccaggtccaccagctgcgccgcgtcgccgggggccacgccgctcgcctcgtccacggggaggaactcgaagtagcccatgttgggcatgatggtgtagcacacctccgacgggcggcacatgggccggaggttcagcccgaagtagcactcggaggaggcgtacattgtgcacgccatggggaggccgccgctgtagtactccagggtggggatgtactgctgcatcgcgccggtgacgatcacgtccaggtaccgggtgttgggccacacgcgggtgacgatgcccgcccagtcgccgcgggagcactcggcgcggacgaagcgcgccagctccgggtccccgcggagcacgcgcgcgacggcgtcccggacggacgggtcggccacgcgcggggtcagcgacccggactcgatgtcgtcggcgagctgctcccagtgcagctgcaggaagcggatggcgcgcagcaggcccgacgcgaagacggcgcccacgcggagcacgtcgtggcgctggcacagcccgcacaccatctgcgcgtacatgctctggaacgcgtcggcgcacaggatggccgccgtggggctcgtgtagtcgtggtacgggtcgaacggccggttcttgaagtgctcgctcttgtagtagctcgtcagcacgggccgcgccgtcagcccgccgggcgtcgtcgtctccgacttgacgaacaggaagtagagcgccttgcccttgtccagccccggcaggtacctgtgtgtgtcacgtcgaattatcatcatgccatccctccgtgcgagtataattcgctactggctgacgagtag

SEQ ID NO: 92972 - DNA, 115 bp, Zea Mays
acaacagtagtcccataccattcctaaaattgagttatttgttcaggaatgaactgaaaacaaaaaaaggcatacaatctaccacatggtcagtttgttcagtttactaaacact

SEQ ID NO: 92973 - DNA, 1154 bp, Zea Mays
attaggcaggggcgagagagtagtcggcagatctaccgtagcaatggcagagacggtcgggtccatcgtcgtcggcgaggtggtgaaccggacctcctccttcattctcagcaagcacagggagcgtctgagcacgcgcgaaggcatcgagcgcctggagatggcgtacgtaaagatggaggccgcgctggagctgtccagccgccccggccgttggcagcagcaggccaccgccaccgccaccgacgcgtctctgctccgctggcgccgcagactgcggcgcgccgcggacgagtgcgacgccgcgctgcgccggttgaagctgcgcgagctgcaggaggaggacgcccgggcgaggctggcgcgggcgccgctcccgcgccgcgtcgcgcgcgcgctcctgtgcctcgcgtcggcgctcctgctgctcgcccgcggcggcggcgacgacgagcactcccgcgcacgcgccgccgtccagaggttcgagcggctggccggcggtgccgccgagttcctcaggtgcgcacagctcggcgttgcgccgcggaggtgcggcggcggcggcctgtcgttgggaggctcgctggtgaacgcgcgagctacgtctacgagaggctgcagggtggtcctcagtcagcatcggcaccgcttcttgggcgtcgggcccgcgagtccggcggaggtttgggtggacagcgagccctgccgtgcttaaggctgcccgcagtcacgcgctccacgcaaaactgtattgagattgttaagaacccattgctaccgagtgtagtccaagggctgcttaactgaataatagtagaacacaaggagacaagagtgtagagaggaactgattctttgttactatatggtgctgctctcaaaggttacatgatatggggatctcctctctatttatagacaaaactagggtttcaggcatatgggccacatgggccttcctggcccaagaaaggtttcttaacactcccccttggcccaatgccgcgagatgcatatgttccaaaactccataaaaacccagtgggaaaaaattggagaaagagtacatagctcacgcttgttgtgtcgcatgaattgcctcatcaaaaccttagtgagaaactttcatgaaaactcacataaaggaaaaa

SEQ ID NO: 92974 - DNA, 933 bp, Zea Mays
ataccatgtagctgcacaactaaatgatttatcatggcatccctttcaagatggagaatgtgtgtgttgtgctggattaaattaggcgtgcacatttaattcaaaatcaagtatactggaagatcatgaagttttctaaggatgtatgggtattcactttattgttttggatttttgtattcttacgagtagtgcttggtgacaaaatcgtgtacatattcctagcttttccctaactataacatttaccttcattttttgttaaatacacttggtgcagataacttacataaggatagtggttagccataatattttggaatatcatcttccttataaaaacaggtatacgcaaactttcagtgataacgtttgcatatattttttcattcaaaatatccatctcctagtgtgtgaatgagtttgacaaatttgtagcaactagcacaggcccaagggatacacgtcccggtgccccccaccacccgttcattatccttggtcttcacctccacctacacctacatctccatctaccgaacatcagacccctccaactaccttgccgacgcatgaacgagaagacgggttaggctttgtcgaaaccctcttcgctagtggaggtatcgaccatcactcgtcactgtaacccgatggtgatcggcgaccgtgagcttccatgttttgtgttctgatacttgagacttttattatgactatgtataagatattgtctcttattagtattggatgatgagatgtatcttattatgactatggatgagacttttgtgatgtaattgatgagactatggatttaaatattgttatgtgattgtgtgtgagatgttttatgtgaaaaatatgttgtgctatataggtgttgatatatttgttatgttgtcgaatgtggcgtaaaataaaaataaataa

SEQ ID NO: 92975 - DNA, 1467 bp, Zea Mays
tctataaataaatgttgtagacctgcacgctgcacctgcaatacctgctcccccttgaatctgcaggttttttggtcggcgtacagcaatgagcttgagctggtggtggacacggtctgtcggcgcagtcagagagcgcaaagatgagctcgccggcgtgcctgagcattccttccagagcgtggccctcgtcgttggctccaccggcatagtaggcgcctccctcgtggacatcctcccacggtcggacacccccggcgggccatggaaggtatacgcgctctcccgccgtccaccaccgccctggtccctgccgtcatcctcctcgctgacacacatacacgtcgatctcaccgacttcgccgccgtcgccgaggccctcacgccgctcaccgacatcacgcacgtcttctacgtcgcctggtccccgcgcgccactgaggcggagaaccaggaggccaactccgccatgctccgcaacgtcctctccgtcgtcgtccccaactgccccgccctcgcccacgtctcgctccagacgggcaccaagcactacctgggaccgttcgagctcattggcaagatccccactccggacccgccctacaccgaggacgtgccgcgcctggactgcccaaacttctactacgaccaagaggacgtcctcttcgccgcagtctcccggcgcggcggcgccgtgagctggtccgtgcaccgccccaacctcatcctcggcttctctccgcggagcttcttcaacgtcgtgtgcagcctgtgcgtgtacgccgccatctgccgcaaggagggggtcgctctgcgctggccggggtgccttggctcctgggagagcttcagcaacgcctccgacgcggacctcatcgccgagcagcacatctgggcggccgtcgaccccatggccaagaaccaggcgttcaacagcaacaacggagacctttacaactggaagacgctgtggccggtactcgccgctcgtttcgggctggagtggaccgggtacgacggcgaggagaagcagttcaaggtgtcggaggccatggccgggaaagaggcggtgtgggcggagattgtcagggagaacgggctcgtggagacacgcctccgcgacgttgccgattggtggcttatcgacgtcgtggtctatgagcatggcgccaactggaagcttttggatagcatgaacaagagcaaggagcacggattcctcggcttccgcgacacagtgaagtccttcaacaagtggattgacaagatgaaggcctgcaagattgttccttgaatgtaccttggattggatgtttatactggtcagtttctttgataacgctggctgcgacatcttttcagtatcaggtatatatcaaactgttcccgaggaatcaaataaagatgaatacgtttgttcttctgtcccttgtattgtgaaataaacatgaatctattcacatgtgt

SEQ ID NO: 92976 - DNA, 723 bp, Zea Mays
agaataaaacaaaaagtcatgacgcgattctacaacaaacagaaggaacttaaggattttgtaggcaccatttgtccaaatattaggaagaaaatatctaaatttgcggatctagcgaatgtgtgctatgtgttaccttctggaagtgtgattttccaagttgtggacagagatcaccagtatatagtagaccttgcagctaagacttgtgattgtagagagtggaatttgactggaattctatgccagcatggtacaaacatcatgccatgcaaagatatgaccagttgggagaaagttgatgcccctacagtctcacctcctatctatgttagaaaacctggaaggccgaagagatgcagaaggaagcagcctcatgaaaaaattggaaagtatggcccaactctatcaaggcatggtgtgaaaatgacttgcaactattgtaaaggggacgaccataatgacaaaggcttccccatcaagaagctaggtgtcagtccaaaacctaatcatcttgagatgacaatcaagttgtcacccaagataacagtcaaggggccaccaatggaccagatgacacaagatggtgatgaaccccattattgcaatttgatgatagaaatgagctcaacgatgctacttcaaatgatggaacaggttggtcctagtcaactactttcacaggaacctaaacaagctgtgtcgaatgtaaattcatcatag

SEQ ID NO: 92977 - DNA, 1462 bp, Zea Mays
tctataaataaatgttgtagacctgcacgctgcacctgcaatacctgctcccccttgagtctgcaggttttttggccggcgtacagcaatgagcttgagctggtggtggacacggtctgtcggcgcagacagggagcgcaaggatgagcttgccgccgtgcctgagcattccttccagagcgtggccctcgtcgttggctccaccggcatagtaggcgcctccctcgtggacatcatcccgcgggcggatacccccggcgggccatggaaggtatacgcgctctcccgccgtccacccccgccctggtccctgccgtcatcctcctcgctgacacacataaacgtcgatctcaccgactccgccaccgtcgccgaggccctcacgccgctcaccgacatcacgcacgtcttctacgtcgcctggtccccgcgcgccactgaggcggagaaccgggaggccaactccgccatgctccgcaacgtcctctccgtcgtcgtccccaactgccccgccctcgcccacgtctccctccagacgggcatcaaacactacctgggacccttcgagctcattggaaagatccccactccggacccgccctacaccgaggacgtgccgcgcctggactgcccaaacttctactacgaccaagaggacgtcctcttcgccgcagtctcccggcgcggcggcgccgtgagctggtccgtgcaccgccccaacctcatcctcggcttctctccgcggagcttcttcaacgtcgtgtgcagcctgtgcgtgtacgcctccatctgccgaaaggagggggtcgctctgcgctggccggggtgccttggctcctgggagagcttcagcaacgcctcggacgcggacctcatcgccgagcagcacatctgggcagccgtcgaccccatggccaagaaccaggcgttcaactgcaacaacggagacctctacaactggaagatgctgtggccggtactcgccgcgcgtttcgggctggagtggaccgggtacgacggcgaggagaagcagttcaaggtgtcggaggccatggccgggaaggaggcggtgtgggcggagattgtcagggagaatgggctcgtggagacacgcctctacgacgttgccgactggtggtttatcgacttcgtggtctatgagcacagcgccgactcgaagcttttggatagcatgaacaagagcaaggagcacggattcctcggcttccgcgacacagtgaagtccttcggcaaatggatcgacaagatgaaggcctacaagattattccttgaacgtgcttggattttattatggttaagtttccctgataacgctggctgcaacctgttttcattctcaggtatcaactgtttcccaggaatcaaataaagatgaacacgtttgctctctcctccctagcatctcgtattgtcgaataaattaagatgaacctgttattc

SEQ ID NO: 92978 - DNA, 556 bp, Zea Mays
tcgccgccgtacgtggtcgatggccaccacccacgacgactgcgtctccctctgtctcatggcgctcgcagccgcgggaggcggaggaatgacgacgcagtcgtacgctccgagcacggctgcctggacgacgcaagagtgcgagctccgcttccggtgctccgtctgtggcaaggccttcgcgtcgcaccaggcgctgggcgggcacaaggccagccaccgcaagccgacgcacctacagacacagcaggcgtcgtcgtcgtcggtgacgacctcgtcggccggcagcggcggcgggcaggggaggcacaggtgctcggtgtgccatcggagcttcgcgacagggcaggcgctcggtgggcacaagaggtgccattactgggacgggctctcggtgtcgctcaccgcgtcggggtccgggtcgaccgtcaagggtttcgatctgaatttgatgccggcgacgaggtggggagaggaggaagaggtgcagagccccttgccgatcaagaagaggcggctgtccggcccgtccttggaccttagtttaacgatttag

SEQ ID NO: 92979 - DNA, 1683 bp, Zea Mays
agcaggctgccaggcaggcaacacgcggacacccaattattcacccaagacccaacacccgcccaggcagcaagacaaggacaagggtctccaccgcttcccctcccctcccctgctctgctcctcgcctcctccctcccgaatcccgatcccagcttccctccttcctcccgcccacgccgccaaatcgagccccagccgcgatgagttggtggtggacgggcgcgatcggcgcggtcaagaagcgccaggacgagcaggcggccgccgccgagccctcctaccagagcgtcgccctcgtcgtcggatccaccggcatcgtcggcacctccctcctcgacatcctcccgctcgccgacacccccgccgggccgtggaaggtctacgccgtctcgcgccgcccgctcccgccctggtccccggcgccctccccggccgtcacccacctccacctcgacctcgccgactccgccgccgtcgcggaggctctccagcccctcaccgacatcacccacgtcttcttcgtcgcctggaccaaccgccccaccgaggcggagaaccgggaggccaactccgccatgctccgtaacgtcctctccgtcgtcgtcccgaactgccccgcgctcgtccacgtctgcctccagaccggccgcaagcactacgtcggccccttcgaggccatcggcaaggtcgccgccccggacccgcccttcaccgaggacatgccgcgcctcgactgccccaacttctactacgacatggaggacatcctcttccacgaggtctcccgccgagacggcgccgtcagctggtccgtgcaccgccccaccaccgtcttcggatactcccctcgcagcgccatgaacctcgtcggcagcctctgcgtctacgccgccatctgccggaaggagggcacgacgctccggtggcccggctctcgggtcacttgggagggcttcagcgacgcctccgacgccgaccttatcgccgagcacgagatctgggccgccgtggatccgttcgccaagaacgaggccttcaattgcagcaacggggatctcttcaagtggaagcagctgtggccgatactcgccgaccatttcggcctggaatgggctggctacgaaggtgaggagaacaggttcaagctcgaggaggccatggccgggaaggaagctgtctgggcagagattgtcagggaaaacgaccttatagccacggagcttgacgagatcacgaattggtggttcgtcgatgccatgtttgctgtggagacccagcttctggacagcatgaacaaaagcaaggagcatggcttcctcggcttcaggaacactgtcagctctttcaacacatggatcgagaagctgaaggtcttcaagattgttccctaataataattcatccttgctattcacttctatactgttgttctgcatccttattatcctgctcatttatcagcaccagttctcctgtaattcaaacatcttgctatctgtgccaggtttgcatgttatatactagggaccaataaggatcaacacattgcaaaataggttattcttgtccagcatgggtttgattgaaattgtttgtgtattgaattactagctgaaaccgttcttgtttactagcattgctttatctgtgaatcggttggtgcatcaatcaattatctcc

SEQ ID NO: 92980 - DNA, 942 bp, Zea Mays
gacgaacgcgagatcgatcgagctactgaaggtgcaaggccacgacacgtgcctgttgttctcatagtcatagctagccatggtggccggactggaagatcccgccattgacccgaccacgctctcccttgcgctctctgcatcggcgccggcgctcaacaaggaggactacatcgccatctgcctcgccgcgctcgccggaacccgcaagttcgggctcggtcgggagcaggaccagcaccagcacacaaagtggtgcccgacgacgacgacccacgcgccatctacgcagcaggagcttcggttccggtgcgcggtctgcgggaaggccttcgccacctaccaggcgctcggcggccacaagtccagccaccgcaagccgccgacgccggagcggtacgccgccgcccttgccgccgcggcgacggcggcggcggcccggggcgaccactccgacgagacgacggcgtcgtctctgtcggggtcggcggctagcggcgggccacaccggtgcagcatctgccggaggggcttcgccacgggccaggcgctcggcgggcacaagcgctgccactactgggacggcatgtccgtgtccatctccttgtcgtccgcggcgtccgggatggcgtcgtcgtcgggcctcagtaccgtcaggaactttgacctcaacctggcgccactgccggagaatggcgacgccgggatgatgaagaggtgggccgaggaagaggaggtgcagagtccgttgccgatcaagaagcgcaggttgtcggactgactactcaccgatgccgtcgtgtctatcgtttcatgtaaaaatggatctacgccatcgttgtgtcgttaatttaatttgttttaattaggttctgttttttctggacataaattcgttcaattcattgattcgtcacttcctttgtttccacacctgttaaa

SEQ ID NO: 92981 - DNA, 971 bp, Zea Mays
ccagctctatcaccccgcacaggcctcagacctagaagtccgtccgagaacgttaaagacgtgcgccgccagctaactatagtttcctcctcatcacctgtcgtcgccatcagcaaggtagccatggccgccggtttcgaagcgcttcttgactccaccgcgctctcgctcgcgctgccagtgccagtgccgacgatgacgctcctggggctgaagaagctcaacagcgaggactacctagccatctgcctcgccgcgctcgcgggcacccgaggaagaagcggcctcagcaaggccgccgccgccgccgctggtttcgggcggcaggagggcggcggcagtcgtaagcagtggtcgtgcccgccgccggcgccggcgcgcgaggaggaggagctccggttccggtgcgcggtgtgcgggaaggccttcgcgtcctaccaggcgctcggcggccacaagtccagccaccgcaggccgcccacgggggagcagtacgctgctgctctcgccgccgcgcagcaggcggcagaccactccgaggagacgacgacgacgtcgggtgggccgcaccggtgcaccatctgctggagggggttcgccacgggccaggcgctcggcgggcacaagcgctgccactactgggacggcagctccgtgtccgtctccctgtcggcgacggcgtccgctacgggtacggggacggggtcatcaggcgtcaccgtcaggaactttgacctcaacctgatgcctgtgccggagagcgatgggatgaggcgatgggtcgaagaggaggaggaggtgcagagcccgctgccgatcaagaagcgcaggatttcgaatccatcattaactctcgctacctgcgactgagatcatatgtccatcgattcatgtaaaaaggaagatgcgtgatgattgtttcatcgattatcaattgattctagtaaactgaagtgactacttaattgccc

SEQ ID NO: 92982 - DNA, 517 bp, Zea Mays
atggcgacgccacggaagccgatcaagctcacgctgccgtcccacgagaccaccttcggcaagttcctgacgcacagcgggacgttcacggacggggatctgcacgtcaacaaggacggcctccgcatcgtctcgcggagggagggaggcgaggctcctcctatagagccactggatagtcaactgagcttagatgatctagacgttataaaagtgatcgggaaaggtagcagcgaaaatgtgcaattggtccgtcataaatttactggccagttttttgctctgaaggtatttctgacgcaatcattctttgatgctgcttatttatggttctttacagtcaagactttaaaacgatctctgcattgtactccctccattcttttttatttgtcgcggtttagttcaaaaataaactagcggacgacaaatattcgacaacggaggtagtactacctccggtctcgaatatttgtcgtccgctagtttatttttgaactaaacgcgacaaataaaa

SEQ ID NO: 92983 - DNA, 544 bp, Zea Mays
gtttcctcctcatcacctgtgttgacgcctttttggaggcgccaatcacttcaaaagaaccagcggcggtgcactttggtcaggcgcggacggtccgcggcacagggccggacggttcgcgacctgacacgagacggcggtgctctctggtcagccgcggtcggtccgcggcgcagggccggacggtccgcgacctggtgcaggaatccgagttccctgcctgacggccggacggtccgcgcgtgcgcagaggcggcggaagatcgccgacggcgcctggatctcgctcccgggagggaccctgtcggggagtagagatcctaggttgtgtctaggctcggcctggccgacctagactcctctaatcgacgtagagccgaagaaagacgaagaatttggggattggatagctaaacctaaactagactagaactactcctaggataaaatgcgaaatagaagttgtattgattcgattgatgattacaaatcggccgtatacctctctatttatagaggaggggggctggaccctttacaaact

SEQ ID NO: 92984 - DNA, 1467 bp, Zea Mays
accaaaccgccccgccgagcgacccagtccgtcagcgagcacccctgtcgccgaagcccaggcagcagcagcgggcaggggcgtccgtccggtccgcgcgcgttcgttcccctccccgaccggcagattccccgtccacgcccccgccttaaaacgcccgccactaatcccgtttctcactgcccttccgcggctgtgctgtgctctgctctgctctgctccccgtctttcctcctctcccggtctttcctcctctccccttcccgcccagcgcgtccccacgaggaaccaaccccgcggcatggggatcgtggaggaggcgcacaacctgcgagtggtgggcgaggggaagcgcggggtcatcgtgctggcgcacggcttcggcaccgaccagtccgtgtggaagcacctggtgccgcacctcgtcgccgactaccgcgtcgtgctcttcgacaccatgggcgccggccccaccaacccggactacttcgacttctcccgctacgccacgctcgagggctacgcgctcgacctcctcgccatcctccaggagctcggcgtccgctcctgcatctacgtcggccactccgtctccgcggtcatcggcgcgctcgcctccatctccaggcctgacctcttcaccaagctcgtgctcctctccgcgtccccaaggtacctcaatgatgtggactactatggcgggtttgagcaagatgagcttgatgagctgtttgaggcgatgcgatcaaactacaaggcctggtgctcaggttttgcgcccctgtgtgttggcggagacatggaatcagtggcagttcaggagtttagcaggacgctcttcaatatacgtccggacattgcgcttagtgttgcccagacgatcttccagagcgacgtgcgcagcctcctcccgcacgtcactgtcccatgccacattgttcagagcaccaaggatctcgcggtgccggtcgtggtgtctgagtacctgcacaggcaccttggtggcgactccatcgtggaggtgatgccctctgaaggccatcttccccagcttagctctccggacattgtaatccctgtcttactccgacacatccagcacgatatcgcagtctaggttggtcaatcgttcctccaagacgatgagcatccgaagctgtctacttgtctgtttgtatcttgcttaattgttcaacgtaggatcgcatctatttgatgttctaataaggtttcaaaggtgttatgtagtgttggcggtggaaagtgtagcatatatgtatgtgttatccattggtcgtctaatgtaggctaccatgttggatgctctgacatctgaagtccttcagaagctcttcatgtcatttgtgttcttttttttcccgtatgaaattaccatcttgtatatgttggtgtcgatgatcatcatttggggctgtaggatcgatgtgcttgtatagttctgggttc

SEQ ID NO: 92985 - DNA, 1201 bp, Zea Mays
ctaggattctgatgtatgggtgatgttcttgtactttcttgattgatggcgaacacagaaggtttttgcctcgtgagatgtctaaattgtctcaacattctcccagaaccacataacgttacagtctacaagtgcggtggatgtggcaccacccttcgtgctaaaatttgtgctagcaatggccaacatgttgctgcaaaacaagctcgccaagactctgacagttattcggtcgctatagctgtgagcaatgggcaaccatttcaaacaaagagcaaggctcagagagctccttcaatgctgatgctcctagcatcgagcatggaagcaatatgacaaggaagggtgaaaatggtgatgattatgcaagatctcgagcagaaggaagtaggcggagccggaactgaacatgcaactgacaagaagggttattgacaatgtctatccttggattcaacgagtttatgacactattgatgaatccactttacgtgtttgccatatttgtgatttatcttgttggaaaagccctttgggtgaaatcagaaaatggtagggaattccaacatggatttcttcctaccatcctttcactgtccacgaaatttgttccctctataatgaacatcttgaagagattagctgacgcgggtcaagaacctgcaacagcccccgagaggcaaagagagatgaagatccaaccaaaatccaccaggaacagttcttcatacagcaaggtaacatcaccagggtcattcaacataaccactttggagattggacctgaatattcaaacttggtggcgcaatgattttgctaatctttagcttttggctggcaacctactccaggagttgaggaaaatagggtgcctcaagaacatatgaagactttggtgccttgcagtttttgtaatcctgcccttcccaaactgattcaaggtgatgaggtggcactgccattccttgttattcaaggaattttgagggtgggggttgtttgtaagggcattgtaaaataacttgttttaaattttttggtttctgtaacatgaatacatgacatgtgatagttgtatagaagatcttccggtagcagcaagagacctagagagatagattattttttccttttaatcccacttttttgggattaagattaggacatattaaaaaatacaggtgttaattttgtgttgct

SEQ ID NO: 92986 - DNA, 1487 bp, Zea Mays
aatcaacagatcgcaggaacatctcggccggccggagtgtcggagatggtggtgatgacgacctgggagctgccgaccacgctctgtacctgtggagggtacgcagatctgaaacggcggcgaccagtacttaccaaccaccgtgccgccacccgggatggacggcgcagcgcatgttgtactcgtggcccggacgacgcgaaaagacggcgaggaccctaacccatgatgggctaccccaccccaccaaagcagccgttgcacgagaaaaggacgcacgcacctaccctaccccccggtcacccaaaatgcctagtaaataaacacaccactgaccaacttgcctacttctagtgccacccaccaacttccccttccccgtcgcatcgcatcgagagcggggctgtaccgtgcgagactctactgctcgatcgccatggccgccgcgctcaggtgcccggcctccgtcagggtctcgggccccgccgccgcggggctcgccaaggtgcgccaggcgtccagagtcgtcgcggtgagcggggcccggcagagccgcggcggcggcgtcgccgtgcgggcgtcgctgttctcgcccaagcccgcggcggccaaggacgcgcggccgaccaaggtgcaggagctgtacgtgtacgagatcaacgagcgggaccgcgagagccccgcgtacctgcgcctcagcgccaagcagacggagaacgcgctgggcgacctcgtccccttcaccaacaaggtgtacaacggcagcctggacaagcggctgggcgtcaccgcgggcatctgcgtgctcatccagcacgtccccgaccgcaacggcgaccgctacgaggccatctacagcttctacttcggagactacggccacatctcggtgcagggcccgtacctgacctacgaggagtcgtacctggcggtcaccggcggctccggcgtcttcgagggcgtctacggccaggtcaagctcaaccagatcgtcttccccttcaagatcttctacaccttctacctccggggcatcccggacctgcccagggacctgctctgcacgcccgtcccgccgtcgcccaccgtcgagcccacccccgccgccagggccgccgagccgcacgcatccctcgacaactacaccaactgaactgatgattgatgaatccattatcatccatctctgctctgtctgtcgcggctgtcagaacttgacgagacaagctcccctgctactcatcagtactcctcactcgtagccgtagtttggctactcttatgtgtgtatggctggtttcttcaattcgtgagtgcgtggtagtaccaataagcaataagacgcagagggatcgatcaagctgtgtgcttcacttggctgcttctgattacaattgatcaatggtaacgtaaacggtaaagctctgtttagtgtttagatgtgtttaaacggagttaaatggttttagcatcattttagcaagatt

SEQ ID NO: 92987 - DNA, 1131 bp, Zea Mays
aatcaacagatcgcaggaacatctcggccggccggagtgtcggagatggtggtgatgacgacctgggagctgccgaccacgctctgtacctgtggagggtacgcagatctgaaacggcggcgaccagtacttaccaaccaccgtgccgccacccgggatggacggcgcagcgcatgttgtactcgtggcccggacgacgcgaaaagacggcgaggaccctaacccatgatgggctaccccaccccaccaaagcagccgttgcacgagaaaaggacgcacgcacctaccctaccccccggtcacccaaaatgcctagtaaataaacacaccactgaccaacttgcctacttctagtgccacccaccaacttccccttccccgtcgcatcgcatcgagagcggggctgtaccgtgcgagactctactgctcgatcgccatggccgccgcgctcaggtgcccggcctccgtcagggtctcgggccccgccgccgcggggctcgccaaggtgcgccaggcgtccagagtcgtcgcggtgagcggggcccggcagagccgcggcggcggcgtcgccgtgcgggcgtcgctgttctcgcccaagcccgcggcggccaaggacgcgcggccgaccaaggtgcaggagctgtacgtgtacgagatcaacgagcgggaccgcgagagccccgcgtacctgcgcctcagcgccaagcagacggagaacgcgctgggcgacctcgtccccttcaccaacaaggttggtctcgtctcgcctcgttcccccctctgttcctagtcaagcaagcaagcctctagcctctgctcatccgtccatctctctctccaccaccccaacctgcaggtgtacaacggcagcctggacaagcggctgggcgtcaccgcgggcatctgcgtgctcatccagcacgtccccgaccgcaacggcgaccgctacgaggccatctacagcttctacttcggagactacggccacatctcggtgcagggcccgtacctgacctacgaggagtcgtacctggcggtcaccggcggctccggcgtcttcgagggcgtctacggccaggtcaagctcaaccagatcgtcttccccttcaagatcttctacaccttctacct

SEQ ID NO: 92988 - DNA, 1649 bp, Zea Mays
ccgtgtccctatatacggcaaacgcacaagagataactagcgagcgagagcgtgagatcgaggagaagaaggcaagcaggcagagaaagagagagagagatggatgaggagtacgacgtgatcgtgttggggacggggctcaaggagtgcatcatcagcggcctcctctccgtcgatggcctcaaggtccttcacatggacaggaatgactactacggaggagaatcttcgtccctgaatctaaccaagctctggaacaggttcaagggcaacgacagccctcccgagcacctgggcgtcagcaaagagtacaacgtcgacatggtgcccaagttcatgatggcaaacggcgcgctggtccgcgtcctgatccgcaccagcgtgaccaagtatctcaacttcaaggctgttgacgggagctttgtgtacaacaatggcaagatccacaaagtcccggcaaccgacgtggaggccctcaagtcgaacctgatgggcctgttcgagaagcggcgcgcccggaagttcttcatatacgtgcaggactacgaggaggacgaccccaagtcccacgagggcctggacctcaacaaggtcaccaccagggaagtcatctccaaatacggattggaggatgatacggtcgactttatcgggcatgcgctagcacttcaccgggacgacagctaccttgacgagcctgcaatcgacactgtcaagaggatgaagctctatgcagaatcactcgcacgctttcaaggagggtccccttacatctaccctctatacggtctgggagagctccctcaggcctttgcccgcctgagcgctgtttacggtggcacgtacatgctgaacaagccagaatgcaaggtcgagtttgatgagagtggaaaagcgtatggagtcacttctgaaggggagaccgccaagtgcaagaagatcgtctgcgatccttcgtatttgccagacaaggtgaagaaggttggaagggtggcccgcgcgatatgcatcatgaagcatccgatcccggacaccaaggactcgcactccgtgcagatcatcctccccaagaagcagctaaagcgcaaatccgacatgtacgtgttctgctgctcctacgcccacaacgtcgcgcccaaaggcaagttcatcgccttcgtctccaccgaggccgagaccgacaagcctgagatcgagctcaagcccgggatcgacctgcttggccctgtagaggagaccttcttcgacatctacgacagatatgaacccgtcaacaaccctgacgacgactgctgtttcctcacaaatagctatgactccaccacccattttgagacgacggtcaaggatgtgctcgccttgtacaacaagatcactggaaaggagcttgatctctcagtcgatttgaacgctgctagtgctactgagcaagaagctgcttgaacacccggcggcctctttttttgcagctctacacaatagctatttcttcgatttttttttaaatgttccatagatggataagtttattgatgaaatccattattgtatgttttttggagttccattttttgtcacatgcatgtaatgaacaacggtggcaatgatttataaaggttccattattcgctggcgaaaagatagattaa

SEQ ID NO: 92989 - DNA, 2665 bp, Zea Mays
gcatgcaatcttattagtcattcttaccagcactttttttttggttttgggggttatttactcatgtttgctcaggcacaacgaagccctcagacaaacccaagcaactattctttatcaggtcaagtttctggtcagcagactgctcccagtggttctgtgacaggagatgaacagaagggatatccaggggctcacaccatccctatgagacaagctattgccagcactcgaccacctcaatttcggccttcctcgtctggccaaatgcggagtaatacgggttatccaccttcacaaaccaatttgcataaggctaatgaaatgggaaacatgtcagatgggaaaggggtccatatgttacaaactcgtccacccaataactccataccagtacaaacaatgcagcatcatgtgcagcgaccacaaacatcttcaccagtgtttggggcaaatagtattcatgcacgtccatttccgcggccacttggaggtccagctgcaccatttagaccacaaatggcagattccaatccaaaagcacaattgattcagggagctgtgaccacagtatctgggagtgtgccaacacgatccatagtgtctggaaatgcgccaggtaatcaatctacaaggcaacaatcagcaaacaaggagcaaaaaactatttcttttactcgaacagcacatatgaataatgaaactgttagccaaaactctgaattctcacagaattcttttgctgtgatgcatgcaaaacaagtcaatcaagccttgggatcttcaaaagtcagtgctggcatggaaagccagtcacaacaattgagtgcgcctaagcctttagctgcaacaagcttaagtcagactcaatctcatggcattcaagaagagcctaaaattcagatccaatcttctgtgcaagcacctcctgcagcagcttctaaaacacctcagaggaaggcatcttctggacagaagaagcctttggaagtcttaggctcatcccctccaccatctagcaaaaagcagaaggtatctgggggtttccatgaacaaagcattgaccagcttaatgatgtcactgcagttagcggtgttaatctgagggaagaagaggaacaccttttctctgctccaaaggaagagggtcgagtttcagaagttgctcggaaagttgttcaactagaagaagaaaagctcattctgcagaagggacctctgacccaaaaattagcgggaatcatgagtaaatgtaatttgaaggtcattggcactgatgtggaacgctgtctgtccatgtgtgttgaggagaggttacgggggtttataagaagtataataaggttctctaaacagagggttgaggttgaaaagtcaagacatcatttttatccattatcctcagatgttcgcagtcatattatgagagtgaatcgagaagcaagagaacagtgggagaaaaagcaggctgaagatgctgagagaattaggaaacaaaatgatggagatggcaatgcaaatgttgatcttgaaaaagacagaatcgagacccgtggtttgtcaaagcatgcaaagacttacaaggaggacgatgataagatgcgaactacagctgcaaatgttgctgcacgagttgcagcggggggagatgacatgctgtcaaagtggcaattactagctgaacggaataagcagagaagtgagggaggtgatggttcttctggctctgtaccaggtaacatgttgcaacacaggccatcactgaaatctgggaaagacttaagggaagaacatgaagttgaaaagagaggatactccacaatgcttggatctggtggtgttagaaggtcaccgctaacaaaagtggcgcggagtatttctatgaaggatgtggtagcggcactcgagcgagagcctcagatgtcaaaatcctcattacttttccgcctatatggaaggccattgacagaaccatctgcaaagtaatttggaggataatcattgcagttcatattacagaggggcaacttttggtcaatatatgaggaggcccaatcaccaagcgatggggctgattggtcgacgatcaattttgcggggatttagcgattacttggaagccagcgtttccctggagccatttttgttttttcaagggaacagtctgcagatgtttcttttttttcaatgtttttttctctatataatcatgtgttgatcacaatgcccagccagcttcagctggtatgaacatcgtgatcgtttttgtatagcagatggagtaggatgttccttgagatgcttatgacttgctaagtgtcctattctttaatcgtgcgattttgttgtacagaaaacatgaaatgtatgtattggaggctcaaatttattcatgaacaatatgtgccctcgtttcagaacagtttgttttggtttgcaaaatatcaacacaagggcataaaagcagctattctgaatgcacacagaatatcaggacttgctatgccacccttatcaaatctagtcttaatatcatacatatatatagtcacgacattcttgaagctaggtttctattgataatactatcttgtctttccccctttcaactggggaaggtggtacattgttgatcggcatctaacatccaaaatcataaggaacc

SEQ ID NO: 92990 - DNA, 2506 bp, Zea Mays
cgaagccccggcggagaggcgaggtgagctttctcggagaggggacctcgcgccaccagccgcccgagcttcccgcgccatggatcccatcatgaagctactcgaggacgacgaggatgagagtctgcactcgggtgccgacgtcgaggccttcacggcggcgctgaaccgcgaggtggaggccagcgcgagcgccagcgccagcaccagcaccagcgttcccgccggctcctcgtcccagcccacggatcacggtgctggacttttacctcaggaacacaagtcactattaaaccatgatcctggtcagtggcaagatcctgtaaagaatgaaattgtaaaccaggagagtcagcaacaggaacagacacatgcatttagaaatgatcacccgtcaagacctgaaatggtttctcaaggttctaataactgcccccttcccactaatacaccaaaagaatgtgatttactgaaggcaaaacaagaacctggaagtacatctcaacaaggtattgttgctcagcatcagcctatgcagcaaatgaagagtgaacaaacaccaattgtcagtcagcagcagtcgatgcagcaaatgaagaatcaacaaacaccagtcacaaaccaaacaaatagtgcaactacaacagcaaaagctccagttgttacatttcacatgttaattccaattttgagtcgctacctagacaaagccagggacatagaagtgcagtccattttcgccaagttgcggaaaaatgaagtcagcaaggaatacttcttaaaaactgtaaggaatattgttggtgataaattgcttaagcaagctgcttcacaatatcaaatgcaggcacaacgaagccctcagacaaacccaagcaactattctttatcaggtcaagtttctggtcagcagactgctcccagtggttctgtgacaggagatgaacagaagggatatccaggggctcacaccatccctatgagacaagctattgccagcactcgaccacctcaatttcggccttcctcgtctggccaaatgcggagtaatacgggttatccaccttcacaaaccaatttgcataaggctaatgaaatgggaaacatgtcagatgggaaaggggtccatatgttacaaactcgtccacccaataactccataccagtacaaacaatgcagcatcatgtgcagcgaccacaaacatcttcaccagtgtttggggcaaatagtattcatgcacgtccatttccgcggccacttggaggtccagctgcaccatttagaccacaaatggcagattccaatccaaaagcacaattgattcagggagctgtgaccacagtatctgggagtgtgccaacacgatccatagtgtctggaaatgcgccaggtaatcaatctacaaggcaacaatcagcaaacaaggagcaaaaaactatttcttttactcgaacagcacatatgaataatgaaactgttagccaaaactctgaattctcacagaattcttttgctgtgatgcatgcaaaacaagtcaatcaagccttgggatcttcaaaagtcagtgctggcatggaaagccagtcacaacaattgagtgcgcctaagcctttagctgcaacaagcttaagtcagactcaatctcatggcattcaagaagagcctaaaattcagatccaatcttctgtgcaagcacctcctgcagcagcttctaaaacacctcagaggaaggcatcttctggacagaagaagcctttggaagtcttaggctcatcccctccaccatctagcaaaaagcagaaggtatctgggggtttccatgaacaaagcattgaccagcttaatgatgtcactgcagttagcggtgttaatctgaggtgtgttgaggagaggttacgggggtttataagaagtataataaggttctctaaacagagggttgaggttgaaaagtcaagacatcatttttatccattatcctcagatgttcgcagtcatattatgagagtgaatcgagaagcaagagaacagtgggagaaaaagcaggctgaagatgctgagagaattaggaaacaaaatgatggagatggcaatgcaaatgttgatcttgaaaaagacagaatcgagacccgtggtttgtcaaagcatgcaaagacttacaaggaggacgatgataagatgcgaactacagctgcaaatgttgctgcacgagttgcagcggggggagatgacatgctgtcaaagtggcaattactagctgaacggaataagcagagaagtgagggaggtgatggttcttctggctctgtaccaggtaacatgttgcaacacaggccatcactgaaatctgggaaagacttaagggaagaacatgaagttgaaaagagaggatactccacaatgcttggatctggtggtaccatgatattagtagttgagacatttctcaatgataagatgcctattctgctatttgttcatacagactgtatttcaaacttatag

SEQ ID NO: 92991 - DNA, 240 bp, Zea Mays
atggatcaggatagctcgtggacggcagcggccacatattccagcgtgagaggcggtgcggaggatggtggaggtgtcatcgtcgcggcggcaatcgtcccagatttgaactgcaggtcactcgaaacttggaaaaccgtgcatggaaaaatgatatccatgctacttagcacaagttacgaccgatttcaggagcggaccaaaaacttcgagcaccatgcccactcaacatggccgtga

SEQ ID NO: 92992 - DNA, 1359 bp, Zea Mays
atatctccttccccggcagcgaaccagccgttctcttcgttccgtctcgcagtggtagcaccgcagcagagagaagagagatcttctagcctagtagtagcatctacttactagtgagtgagtaggagtacttggctaggacgggggggccgtgacgacggtagcagcatgagctgcaacgggtgccgggtgctgcgcaaaggctgcagcgaggcctgcgtgctgcgcccctgcctccagtggatcgacgccgccgaggcgcagggccacgccaccgtgttcgtcgccaagttcttcggccgcgcgggcctgctctccttcatctccgctgtcccggacgcgcagcggcccggcttactgtggtccatggcacctcctcgcagccctgttccagtcgctgctgtacgaggcggcggggcggaccatcaacccggtgcacggcgcggtggggctgctgggcacggggaactggcacctctgccaggccgccgtcgacaccgtgctgcggggcggcgccatcggcccgctgccggagcttggcgccgggacgggccacctgtacgggccccccgccgccaccgacaagcgcgccggcggctggtccaccttctccacggcgaagcgggcgcggaaggccgccgccggtgccggggcgccgcccgcggcggaggcggcggcgtactgcgacctagggctgtgcctcagcagcagccccgggtccccgccggcgacggcggacgggaggagggcccccctcctgcggcccggcacgccgtccatgagctcggacgagtccgtcacgaccacggccggcggcgacagggagcccgtgctgctcaacctttttgcctgatgaagccgccggtcgacgacgcaggccaaaccaaaccaaaccacacgcgcagcggctctcttgattggccgccgtgtgatgtgatgttttgtctggacgatctgtcccggcggccaggcgttttctctcgtcgccggcgacggcaaggccgtttttcattcgtttctggctgcggccttagattttatttttggttgcgtagtagcggtagtagaaaagaaactaccagtagcagccggagccggcctcgaagccccgtttgcgtgtgggcgaagatgagactatgagagcgccggtggccaccccaccaaagtataactgttttttccccctgttctttttttccccttctctcctttattgaacaattactataatataaataaaatactatagcaccaccactacatctgagcttcggtgggtcgaccgaccgactgtgtgcgtttgtgcttgtacgtataactggtgtgtgtgtggtttattactgttgtgattgacatgat

SEQ ID NO: 92993 - DNA, 1328 bp, Zea Mays
atatctccttccccggcagcgaaccagccgttctcttcgttccgtctcgcagtggtagcaccgcagcagagagaagagagatcttctagcctagtagtagcatctacttactagtgagtgagtaggagtacttggctaggacgggggggccgtgacgacggtagcagcatgagctgcaacgggtgccgggtgctgcgcaaaggctgcagcgaggcctgcgtgctgcgcccctgcctccagtggatcgacgccgccgaggcgcagggccacgccaccgtgttcgtcgccaagttcttcggccgcgcgggcctgctctccttcatctccgctgtcccggacgcgcagcggcccgccctgttccagtcgctgctgtacgaggcggcggggcggaccatcaacccggtgcacggcgcggtggggctgctgggcacggggaactggcacctctgccaggccgccgtcgacaccgtgctgcggggcggcgccatcggcccgctgccggagcttggcgccgggacgggccacctgtacgggccccccgccgccaccgacaagcgcgccggcggctggtccaccttctccacggcgaagcgggcgcggaaggccgccgccggtgccggggcgccgcccgcggcggaggcggcggcgtactgcgacctagggctgtgcctcagcagcagccccgggtccccgccggcgacggcggacgggaggagggcccccctcctgcggcccggcacgccgtccatgagctcggacgagtccgtcacgaccacggccggcggcgacagggagcccgtgctgctcaacctttttgcctgatgaagccgccggtcgacgacgcaggccaaaccaaaccaaaccacacgcgcagcggctctcttgattggccgccgtgtgatgtgatgttttgtctggacgatctgtcccggcggccaggcgttttctctcgtcgccggcgacggcaaggccgtttttcattcgtttctggctgcggccttagattttatttttggttgcgtagtagcggtagtagaaaagaaactaccagtagcagccggagccggcctcgaagccccgtttgcgtgtgggcgaagatgagactatgagagcgccggtggccaccccaccaaagtataactgttttttccccctgttctttttttccccttctctcctttattgaacaattactataatataaataaaatactatagcaccaccactacatctgagcttcggtgggtcgaccgaccgactgtgtgcgtttgtgcttgtacgtataactggtgtgtgtgtggtttattactgttgtgattgacatgat

SEQ ID NO: 92994 - DNA, 1343 bp, Zea Mays
atatctccttccccggcagcgaaccagccgttctcttcgttccgtctcgcagtggtagcaccgcagcagagagaagagagatcttctagcctagtagtagcatctacttactagtgagtgagtaggagtacttggctaggacgggggggccgtgacgacggtagcagcatgagctgcaacgggtgccgggtgctgcgcaaaggctgcagcgaggcctgcgtgctgcgcccctgcctccagtggatcgacgccgccgaggcgcagggccacgccaccgtgttcgtcgccaagttcttcggccgcgcgggcctgctctccttcatctccgctgtcccggacgcgcagcggcccggtacgcttccgtcccgtcccgtccccatgcatgaactatcacacaccgaccatgatccctagctagcttattattgcttaccaggcttactgtggtccatggcacctcctcgcagccctgttccagtcgctgctgtacgaggcggcggggcggaccatcaacccggtgcacggcgcggtggggctgctgggcacggggaactggcacctctgccaggccgccgtcgacaccgtgctgcggggcggcgccatcggcccgctgccggagcttggcgccgggacgggccacctgtacgggccccccgccgccaccgacaagcgcgccggcggctggtccaccttctccacggcgaagcgggcgcggaaggccgccgccggtgccggggcgccgcccgcggcggaggcggcggcgtactgcgacctagggctgtgcctcagcagcagccccgggtccccgccggcgacggcggacgggaggagggcccccctcctgcggcccggcacgccgtccatgagctcggacgagtccgtcacgaccacggccggcggcgacagggagcccgtgctgctcaacctttttgcctgatgaagccgccggtcgacgacgcaggccaaaccaaaccaaaccacacgcgcagcggctctcttgattggccgccgtgtgatgtgatgttttgtctggacgatctgtcccggcggccaggcgttttctctcgtcgccggcgacggcaaggccgtttttcattcgtttctggctgcggccttagattttatttttggttgcgtagtagcggtagtagaaaagaaactaccagtagcagccggagccggcctcgaagccccgtttgcgtgtgggcgaagatgagactatgagagcgccggtggccaccccaccaaagtataactgttttttccccctgttctttttttccccttctctcctttattgaacaattactataatataaataaaatactatagcaccaccact

SEQ ID NO: 92995 - DNA, 2063 bp, Zea Mays
caggtctctgttcctgtggcgggacggacgactctgctgcttctcgttgacaaatcacaaggaaaacaaggggggaagaaaaacaagccagaaaagtctcctcttccttgctccgttcatccgcccctcaccgtcgcccaatctcacatggctcggcgtctccacggccaatccgacctcaacgacggcgcgcgcctccgtttctccacctccaactccagctccagctcttcctcccggttcctcctcgccgccccctccgacgacgcctccctctgtcggatccaccgctgaccgcgcgccgctacgcctgcgcctgatcaccggctggttcttggcctcttcgcttcctggaccgcccagacgtctccatgggcaagagtaagaggaacaagggcggtcgaggtggtggtggtgccgatgacaagcttgacggtggtggcgatgccgatagcgtgacctccatgtccagtgggctgtctgaccttcagttcgcgcaggccacagagcatattagctcgcaggaattcgttcttgacaagggatccacaagagaggaagcattgggctctcttaccgatgcttttgaaagttttgtgcttcttggtttagtggaaaacaaatatgtcacactattgagccagttcatcaattcaattaaaaggggatctgtaaaagaggtgtgtctggcttgtcgctgcattggcttactggcaattacactaggtgctggaagtagttcgcacgaaataatggatgagtcacatccacatcttttgagagttctccaaacttggcctgacgcacaaaagatgatctctgcacttgattgcttagcagttgtcacatttgttggtgcaactgatcttgctgaaactcagctgtctctgaaagccatctgggatgtgatccatccaaaatcaggatcaaatgtcggcgtagtcagaaaaccgaagcctcctttgttagcagctgccgtatctgcatgggcatttcttttaacaactattggttcatctagaagaaatactgattcttggaaagagccaattacatttctctgtagccttctagaagcagaggaccgtgctgtgcggattgctgctggtgaagcattagctctgtgttttgagctaagaatgtttgatgtttcctctagtgacgaagctgatgttgacagttacactggagaggctggtggttctaagcatcaacttttcttgaatatgcaagcattgaaggccaaactatctggtctagtctatagtctatctatggaggcggggggcaggggtgctgacaagaaaaatcttaatgatcagagagacctgttccaacgaatctcagattttattaagagtggtgagtgccctgaagaatcacttaggatttcaggcaagaatggcattttaagagttacatcatggcgtgaatcaatacagttgaactatatgaggcggtttcttgggcggggattcctgaagcattcacaggacaacgatttgctgcatgaggtctttgacatcaaaattgatcgtactgaaaacatgtcagccaccgaaaagaaaatgttcagatctggagaagagaaaggaagagctctgaagttgaataaagagcgtcgtctagctcaggagaggaagcagcagaatatcttgaacgagcaatatggatagaacctacccggaagactggagttttgtacagtggaactgttaccagatggtgagtgctgtgtgtgtatgtgacggtattgatgcatttgaggtgtattgctccggtggcggtactacagcgacatgtttgaaattgctccgaaatactattgagttttgtagaaagtgccatgttccctgcactccctagtgtttcctctgcatgcgcaaaggagatcttgagttcagttaatcacaattgtacagttccatagggtagagatatgaggtgattgtgaataacacagaggtcgtctagcctaagggcaataattggcgaactcttcctctagccgcaataattggtctgcaagagatttcgaaatgcgttcgctctctttcgtcctg

SEQ ID NO: 92996 - DNA, 2069 bp, Zea Mays
caggtctctgttcctgtggcgggacggacgactctgctgcttctcgttgacaaatcacaaggaaaacaaggggggaagaaaaacaagccagaaaagtctcctcttccttgctccgttcatccgcccctcaccgtcgcccaatctcacatggctcggcgtctccacggccaatccgacctcaacgacggcgcgcgcctccgtttctccacctccaactccagctccagctcttcctcccggttcctcctcgccgccccctccgacgacgcctccctctgtcggatccaccgctgaccgcgcgccgctacgcctgcgcctgatcaccggctggttcttggcctcttcgcttcctggaccgcccagacgtctccatgggcaagagtaagaggaacaagggcggtcgaggtggtggtggtgccgatgacaagcttgacggtggtggcgatgccgatagcgtgacctccatgtccagtgggctgtctgaccttcagttcgcgcaggccacagagcatattagctcgcaggaattcgttcttgacaagtacgtcgacgctctctatgagaagaggggatccacaagagaggaagcattgggctctcttaccgatgcttttgaaagttttgtgcttcttggtttagtggaaaacaaatatgtcacactattgagccagttcatcaattcaattaaaaggggatctgtaaaagaggtgtgtctggcttgtcgctgcattggtgctggaagtagttcgcacgaaataatggatgagtcacatccacatcttttgagagttctccaaacttggcctgacgcacaaaagatgatctctgcacttgattgcttagcagttgtcacatttgttggtgcaactgatcttgctgaaactcagctgtctctgaaagccatctgggatgtgatccatccaaaatcaggatcaaatgtcggcgtagtcagaaaaccgaagcctcctttgttagcagctgccgtatctgcatgggcatttcttttaacaactattggttcatctagaagaaatactgattcttggaaagagccaattacatttctctgtagccttctagaagcagaggaccgtgctgtgcggattgctgctggtgaagcattagctctgtgttttgagctaagaatgtttgatgtttcctctagtgacgaagctgatgttgacagttacactggagaggctggtggttctaagcatcaacttttcttgaatatgcaagcattgaaggccaaactatctggtctagtctatagtctatctatggaggcggggggcaggggtgctgacaagaaaaatcttaatgatcagagagacctgttccaacgaatctcagattttattaagagtggtgagtgccctgaagaatcacttaggatttcaggcaagaatggcattttaagagttacatcatggcgtgaatcaatacagttgaactatatgaggcggtttcttgggcggggattcctgaagcattcacaggacaacgatttgctgcatgaggtctttgacatcaaaattgatcgtactgaaaacatgtcagccaccgaaaagaaaatgttcagatctggagaagagaaaggaagagctctgaagttgaataaagagcgtcgtctagctcaggagaggaagcagcagaatatcttgaacgagcaatatggatagaacctacccggaagactggagttttgtacagtggaactgttaccagatggtgagtgctgtgtgtgtatgtgacggtattgatgcatttgaggtgtattgctccggtggcggtactacagcgacatgtttgaaattgctccgaaatactattgagttttgtagaaagtgccatgttccctgcactccctagtgtttcctctgcatgcgcaaaggagatcttgagttcagttaatcacaattgtacagttccatagggtagagatatgaggtgattgtgaataacacagaggtcgtctagcctaagggcaataattggcgaactcttcctctagccgcaataattggtctgcaagagatttcgaaatgcgttcgctctctttcgtcctg

SEQ ID NO: 92997 - DNA, 2090 bp, Zea Mays
caggtctctgttcctgtggcgggacggacgactctgctgcttctcgttgacaaatcacaaggaaaacaaggggggaagaaaaacaagccagaaaagtctcctcttccttgctccgttcatccgcccctcaccgtcgcccaatctcacatggctcggcgtctccacggccaatccgacctcaacgacggcgcgcgcctccgtttctccacctccaactccagctccagctcttcctcccggttcctcctcgccgccccctccgacgacgcctccctctgtcggatccaccgctgaccgcgcgccgctacgcctgcgcctgatcaccggctggttcttggcctcttcgcttcctggaccgcccagacgtctccatgggcaagagtaagaggaacaagggcggtcgaggtggtggtggtgccgatgacaagcttgacggtggtggcgatgccgatagcgtgacctccatgtccagtgggctgtctgaccttcagttcgcgcaggccacagagcatattagctcgcaggaattcgttcttgacaagtacgtcgacgctctctatgagaagaggggatccacaagagaggaagcattgggctctcttaccgatgcttttgaaagttttgtgcttcttggtttagtggaaaacaaatatgtcacactattgagccagttcatcaattcaattaaaaggggatctgtaaaagaggtgtgtctggcttgtcgctgcattggcttactggcaattacactaggtgctggaagtagttcgcacgaaataatggatgagtcacatccacatcttttgagagttctccaaacttggcctgacgcacaaaagatgatctctgcacttgattgcttagcagttgtcacatttgttggtgcaactgatcttgctgaaactcagctgtctctgaaagccatctgggatgtgatccatccaaaatcaggatcaaatgtcggcgtagtcagaaaaccgaagcctcctttgttagcagctgccgtatctgcatgggcatttcttttaacaactattggttcatctagaagaaatactgattcttggaaagagccaattacatttctctgtagccttctagaagcagaggaccgtgctgtgcggattgctgctggtgaagcattagctctgtgttttgagctaagaatgtttgatgtttcctctagtgacgaagctgatgttgacagttacactggagaggctggtggttctaagcatcaacttttcttgaatatgcaagcattgaaggccaaactatctggtctagtctatagtctatctatggaggcggggggcaggggtgctgacaagaaaaatcttaatgatcagagagacctgttccaacgaatctcagattttattaagagtggtgagtgccctgaagaatcacttaggatttcaggcaagaatggcattttaagagttacatcatggcgtgaatcaatacagttgaactatatgaggcggtttcttgggcggggattcctgaagcattcacaggacaacgatttgctgcatgaggtctttgacatcaaaattgatcgtactgaaaacatgtcagccaccgaaaagaaaatgttcagatctggagaagagaaaggaagagctctgaagttgaataaagagcgtcgtctagctcaggagaggaagcagcagaatatcttgaacgagcaatatggatagaacctacccggaagactggagttttgtacagtggaactgttaccagatggtgagtgctgtgtgtgtatgtgacggtattgatgcatttgaggtgtattgctccggtggcggtactacagcgacatgtttgaaattgctccgaaatactattgagttttgtagaaagtgccatgttccctgcactccctagtgtttcctctgcatgcgcaaaggagatcttgagttcagttaatcacaattgtacagttccatagggtagagatatgaggtgattgtgaataacacagaggtcgtctagcctaagggcaataattggcgaactcttcctctagccgcaataattggtctgcaagagatttcgaaatgcgttcgctctctttcgtcctg

SEQ ID NO: 92998 - DNA, 734 bp, Zea Mays
ccgcaaacatctgggcagctttctcatgctgttggctgaatctttagacacgccagcacgaaaacgaccagatacgaattccattatcatgacagtcaaccttgacaagagcatctttcatttaccacacgcacatgacatagtatgaaccttccttccaagatacaagcaacctcaacgtatgtaaactgtagtgtacgcttcaccgttgtgaagtattcatgaataaaaataccttcaattctcacaacaaagatcaaaatacaaacgcgtaataggaatcctctacagagctgtagctctgcaagaactactttcaactgtcggtgatgcacccgcgagtccgcgacctaatccaagctagaagggaaattctggtgcaaggtaggaaaaatgctttgctggcatggcctcgcctgctcaaaggattctgtccaggtcgctgatgaaattggaggcgaaagatgtcagcttctttccagtctctccagctatgtccttgagtgaagacagatcctgtgacgcctggaaagatattatgttgatgagatctgcatcgcttaggtccaggttagaatcgtccacattggtacggccaaaaagatcagagcttgaaatggatgaagaaccctgttcaaaacagatgaaatataagaaggaagcaaacttctgaaaatggattattcaaacagatgaaatggatgcccttcaacaatagattcagtttgaatatc

SEQ ID NO: 92999 - DNA, 2221 bp, Zea Mays
gcacaagcccatttgcaccgtatgcatgttgttgttgttgctggctccggtgggttagatggacacactgtttagattggttagcctccaccaacatcaccaacaacatcaccaacaggcagcagcagcagcagcgtcctcctcgccggaccagcaccaccaccaccagtccccctacagctcccgctccacgtcccgcagcaacgacacctccaccggctcacgctcctctccctcctcctaccacacccacaaccaccactaccactcttcccacccccactcccactacagcagcgccagctactactacgaccccgcaggcagcggcagcggcagcgccggctactactactacgaccaccaccagccgccgccgccgccgccgtaccaagaagaatgcggcaacgaccacggcttttacatggatgaagacttctcctcctcgtcctcgtcccggtcccgccacttccagtcgtcctcgcgcgccccgccctcgtcgtctcccacgccaccgcacgcccagccccagcccccgcccgcgtccacgtcgtccggcgccggcgccggcgccctgttcgaggcggccgacttctcgttcccgcaggtggacatcgacctcgacttcagctcccccgcctcgtcctccggcgccgccgcctcgtcctcgggcggcggcggcgccgggaggtgggccgcgcagctgctgctggagtgcgcgcgcgccgtggccgcccgcgacagccagcgcgtgcagcagctcatgtggatgctcaacgagctggcgtcgccgtacggggacgtggaccagaagctggcgtcctacttcctccagggcctcttcgcgcgcctcaccacctccggcccgcgcacgctgcgcacgctcgccgccgcgtcggaccggaacacgtccttcgactccacgcgccgcaccgcgctcaggttccaggagctcagcccctgggcgtccttcggccacgtggccgccaacggggccatactcgagtcgttcctggacgcggcggcggcggcggccgcctcctcgtcctcctcctcgcagcacccgccgcggctgcacatcctggacctcagcaacaccttctgcacgcagtggccgacgctgctggaggcgctggccacgaggtcgtcggacgacacgccccacctgtccatcaccaccgtggtgcccaccgccggcgtgccgtcgtccgcggccgcgcagcgcgtgatgcgggagatcgcgcagcgcctcgagaagttcgcgcgcctcatgggcgtgcccttcagcttccgcgccgtgcaccacgcgggggacctcgcggggctcgacctcgacggcctcggcctcggcctccgcgagggcggcgccgccacggcgctcgcgatcaactgcgtcaacgcgctgcgcggggtcgcgccggggggcgcgcggcggcgcgacgcgttcgtcgcctcgctccgccgcctcgagccgcgcgtggtcaccgtcgtggaggaggacgccgacctcgtggcggcgtccgagccgtcgtcgtcgtcggccggggaagccgacgcggaggcggcgttcatgaaggtgttcaccgagggcctccgcttcttctcggcgtacatggactccctcgaggagagcttccccaaggcgagcaacgagaggctcgccctggagagggcggcggggcgtgccattgtggacctcgtggcctgcccggcgtccgaatccgtcgagaggcgggagacgggggcgtcgtgggcgcgccgcatgcggtctgccggcttctctcccgtggcattcagcgacgacgtggccgacgacatgcggtcgctgctgcgccggtaccgggagggatggaccttgcgcgagccaggcgcggacgacggcgcggcggccggggtgttcctcgcgtggaaggagcagcccgtggtgtggacgagcgcgtggaggccatgatcatgaaccagatcgtgagctccatcgtatcggcagcagaacaagatgatgcgtgctccatgcatgcatgtgtatgctctagctagcatgcagcgtagggcatgcattgcttcgctggatcgtgtgagtggcggcaacgacgcgcacggggatcaggtagcgtgctttttttccaattataaatcggatgatggatcttagcactgtttaccacattacttaggttttttcgagaggcgtaagtatgtagggatcggagaagctgaagat

SEQ ID NO: 93000 - DNA, 2225 bp, Zea Mays
cctgctccccagatcgattcacccagcgggaaaagcggcgcgcagtggggtgcagcaggcgcagcgggctcggcgggcggcgagcggctagcggctagccgcgacgggcggccaatctacagcggaaggcggtgggcggctaccggtggcacatcgacctacggaaagtagaaagggttgcaatctagcacatattacacatcagtggctgataagaaactgcatccagtggatgtaaatttcattggatttgagttttggttgagatggcagttggattgacatctcagctgttccaaagagtaactgctactgacatcttttgccaaaggaacaaatttaggagttctgagatgaggagttctcttcccttgccatccacctcgtttccttcagttgctgataggcgagactgttggggtcgcaatgtgttagagagtagctgcatgcccatgctttatacacctcgcagatatagatctttgggctttagatcttttgccttgccaattcctttgaaggaaattcctcttgtcaagaacacatcattagcactaactaggtcatgtgatgctttacttgcaaatcctgctacctcacttgtggtccctgcaatcgggattattgtgtttgctctgtggggttttttgcctctaatgcgggatattagaaaccgttttgatcatggaggcaactggaagaagagtcctacatatttgatttcttcgtcgtaccttcaacctctacttctctggacaggagcaacactaatctgcaggggtttggatccagttgtcttgccttcagcagcaagtcaagctgtgaaaacacgtctgataacttttgtgagatcattatcaactgtcctggctgttgcatatattctcacaagcttgattcagcaggtacaaaagtttcttatggacatgcgcaatcccaatgatacaagaaatatggggtttgattttaccatgaaagctctttatactggtgtttggattgcttctgtttctctctttatggagttgctgggtttcaatacccagaagtggataactgctggagggtttgggacagtgttgcttacacttgctggtcgagagatttttactaacttcctctcaagtgtcatgatcaatgcaacacgcccatttgtagtcaatgaatggatcgatgcaaagatagatggtgttgatgtctctggcattgttgagcatgttggtttgtggtctccaacactcattagaggtgttgatcgagaagcgatatacattcctaaccataagtttacagtttctatattaaggaataacactcagaggacccattggcgtattaagacctatcttgctattagccacatggatgctggaaaaattgggactatagttgctgacatgaggaaagttttggcaaaaaatccgcatatagaacaacaaaagctgcacaggagagtattctttgagaaaattgatccaaaaaatcaagcacttatgattttcatatcctgctttgtaaagacatcacattttgaggagtatctcaatgtccaggaagctgttatgttggaccttcttagaatagttgggcatcacaaagcaaggcttgctacccaaattcgaacagttcagaaatcatatggcaatgcagacttcgataacattccttttggagaggacatgtatagtcgagtccgtggccggccacttctgattgatacatctgcaaggatcagtgatgacaaacccaggcctcgacctgtatcatcacgtgaggagcagaaagtcaagacaaatggctcggtagatattaagtccagttcccctgaaaatgctagttcaagcaactctgaaaagcaggaaccgaaaaaaatggtgcctgaagatactcgggtgaagaacattaagggtgataatgtgatgccagtaacaccatctttagatcctgctacgtcaacttccaaggctggtaaagggaagacacgggaaccagagcccactgagcggcaaggagatgggtcagtctcggtggctaatccaaagaaagaatctagaccagtttttgaagataacattgttctgggcgtagcccttgagggttccaggaggacactgcctattgaagaaggaaatcctcatctatcactatctgagactgaggtggacaccgaagaggcggcttcatcaccgaaggataagataggccaaagcccaaaactttgaggt

SEQ ID NO: 93001 - DNA, 1200 bp, Zea Mays
aatccctctcctgaatctaccgatcctcggccgcgtcggggctctaggcgtcctcgctgtcacgtccccgcagcggccggttacaggaccactcgccgtcacccttcctgatccgccgctgccgccgccggtttctagggttgcaatctagcacatattacacatcagtggctgataagaaactgcatccagtggatgtaaatttcattggatttgagttttggttgagatggcagttggattgacatctcagctgttccaaagagtaactgctactgacatcttttgccaaaggaacaaatttaggagttctgagatgaggagttctcttcccttgccatccacctcgtttccttcagttgctgataggcgagactgttggggtcgcaatgtgttagagagtagctgcatgcccatgctttatacacctcgcagatatagatctttgggctttagatcttttgccttgccaattcctttgaaggaaattcctcttgtcaagaacacatcattagcactaactaggtcatgtgatgctttacttgcaaatcctgctacctcacttgtggtccctgcaatcgggattattgtgtttgctctgtggggttttttgcctctaatgcgggatattagaaaccgttttgatcatggaggcaactggaagaagagtcctacatatttgatttcttcgtcgtaccttcaacctctacttctctggacaggagcaacactaatctgcaggggtttggatccagttgtcttgccttcagcagcaagtcaagctgtgaaaacacgtctgataacttttgtgagatcattatcaactgtcctggctgttgcatatattctcacaaggtgcacatgctacatcctcagaaaaactgcagttgttttttgtaagttgtagctttaattcgatcatgcccatctaagttatgtacaggtaatgacaacatttatgcagtcaagtagtactcaagataactgtaactgcaaaagcacatgttggagattacaaattacaattttggccatggacggttcttttctccccaactttagttttgtctatcatcttgaaatacaaatggttggtttgctggctacgtagcttgaatgacaatgcatagttctggcacaactagataaactaattacatattggtgattgaaatattagtgatagtatgtaaaaaataa

SEQ ID NO: 93002 - DNA, 1844 bp, Zea Mays
ctgaacatgaggcgtagatccaccacccatccccttgtcgcatcaccttttctactgcagaggggcacaaaaggtcctctaaaccccaccagcagcttcccctccgatctcaccccacagccgccggcgagatctccaggatgccgttggccgggcggcgggacggccccctaatgctgcgaggcggcggaggtgggaaacccctgtcacgcgggtcccgcatcgcggtggccgtcgctgtcggcgtcgcactcggctgcgtctgcgccttcctctaccccaacggcctcttcttccgcccgtctgcctctgccctccaatggacgcaccaggttgattcaactgcttgcgaatcatcaagacgagttaccaaccttaagtcccaggtgtcatcattggagagagagaatgttgaacttaggaggcagattaatgaattatccatgaagcttcaaatcgctggacaagggaaaaatgagactttgtacaagcctggtccttttggagctgtcaaggctttgagaacaaatccaactgtaatccctgataactctgttaaccccaggttggccaagatattggaagaggttgctgtgaaaaaggaactcattgttgcgttggcaaacaccaatgtgagggagatgcttgaagtttggtttagcaatatcaaacgagttggtattccaaactacctggttgtggcattggatgataatatagaaagcttatgcaaatctaaaggggtgccagtctaccggcgtgatcctgatgaaggcatcgacaacattgcaaaaactggtggaaaccatgccgtttctggactcaagtttcgtgttttaagggagttcttgcaacttgggtatagtattctcctatctgacattgatattattttcttgaggaatccatttgatcatcttcatagagattctgatgtggagtccatgagtgatggccacaacaacatgacagcgtatggtttcaacgacgtgttcgacgaaccttctatgggttgggccagatatgctcacacgatgcggatttgggtgtacaactctggatttttctatataagaccaacggttccttctattgaacttcttgatcgtgtggctggccgtctttctcgtgagccaaagtcatgggaccaggcagttttcaacgaggagctgttcttcccgtcccatcctggttatgaaggcctccatgcatccaggagaaccatggatttttatcttttcatgaacagcaaagtcctcttcaagacagtgaggaaagacgccgggctcaagaagctaaagccagtgattgtgcatttgaactaccaccctaacaaactagagcgaatgaaagcggttatcgagttctatgtcaacggcaaacaagatgcactggatcatttccctgacgggtcagaatgaggaaattacagatagttgcgggtaaagaaacctataccctctgtatcctactcattttggggtgttctggcgtttggatctacatgtctcagatgtgggatctccacacgtgcgagaatgtttggcgagtgcaacatggatggatgcattggctttgaggtatttggatatctccttggtctctagtccctactaacctcaaccgttctgtagcaaatttgtacaagcttagatagatggctcatcacgttttttccctttttccgtacaattttttgaggttcgaattttggaagtcgaggcggtttgttctggactggtgatacttttgatgctggtgtttcttgtgtggtggtttattgcttgtggtttgagaagcttttacggtttcattttttaatgaaacaatgttgtgggcaggat

SEQ ID NO: 93003 - DNA, 1593 bp, Zea Mays
atggaagcgttccatcccctgctcgtctccgccattgccgccgtcgcactagtgcacatcctcaggcacctgctgcggaggcccagcaaggccagcagacacccgccgggcccgtggaagctgccggtgatcggcagcatgcaccacctggtgaacgtgctcccgcaccgcgcgctccgggacctggcccgcgtccacggcccgctcatgatgctgcagctgggcgagaccccgctcgtggtcgcgtcgtccagggagatggcgcgccaggtcctcaagacgcacgacgccaacttcgccacccgccccaggctcctcagcggccagatcgtgctctacggctgggccgacatcctcttctcgccgtccggcgagtactggcgcaagctccgccagctctgcgccgccgaggtcctcagccccaagcgcgtgctcaccttccgccacattagggagcaggagatggcgagtcacgtggagaggatccgagcagccgggccatcgacggccgtggacctcagcgagatgttctacagcctggcgatcagcatcgtctcccgcgcatccttcggcagcaagcacaggaacgccggcggcttcctgacggcgatgaaagccggggtcgcgctgtccagcgggttcaggatccccgacctcttccccacctggcggcccgtgctcgccgcggtgaccggcatgcggcgcacgctggaggacgtgcacaggacggtggactccaccctggaggaagtcatcgaggagaggagacgtgcccgggacgagaagcagcaggcgaggtctggttctggttctgtccaaggcggccaaacagccgacgaggacgccgacgacgacgagaacctcgtcgacctcctcatcggcttgcaggagcgagcgtcctccgggtcgttccaactcaacaggaacagcatcaaagcgatcatattcgacatgttcacggcggggacggggacgctggcgtcgaccctggactggggcatgtcggagctgatgcggaacgggagggtgatgcgcaagctgcagcgcgagatccgggaggcgttccgcggcaagcagccggcgggcgccgacgtcacggaggccgacatccaggcggctagcctgccgtacctgacgctggtgatcaaggagacgctccggctgcacccgccggtgccgctgctggtgccccgggagagcgtcgacgcgtgcgagatcgagggctacacgatcccggcgaggtcccgggtcgtcgtcaacgcgtgggcggttggaagggaccccaggtactgggaggacgccgaggagttcaagcccgagcggttcgagggcaacgccaccgacttcatgggaggtagctacgagtacataccgttcggtgctgggcggaggatgtgccctgggatctcctatggcatgcctgtcttggagatggcgctcgtgcagctcctctatcacttcgactggtccctgcaggagggcacccgtgaggttgacatgacagaggcacatggcctcggtgtccgccgcaagtcgcctctcctgctctgtgctacctccttcgctcctggaacagcaggggtggaaagttaa

SEQ ID NO: 93004 - DNA, 801 bp, Zea Mays
atgttctgcgagtgcggcacgggcagcttcaatcacgtcgacgaggacccggaggatctcggctgcacgggcggatcgcccagggagaggaggaagcacggcggcaaggtcaaccccttcgcggagcgcgggctggacaggttctccatcgtgctctcggagctcgagacacggcgagccaagatcctgcgccgcgtcggctccgacgacaccaccggcctcgtcttcgtccgcttcgtccagtccaacggcggctggacgcccgtcatcgtcaagctccccgaggagccaccgtccaagaaggccgccgccaccaagaggccgagggcggcagcgtcgaccgctgcgcctttgccaccaccgggtcctgcttcaccccgcagtccgctggaccaggccaccagcccgaggaagagggactgcgccagcaccagctccaccgccaaggtcgtcgtcgccaccaaggtgccggcgaggaaggcatcattctcgtgggggaggaggatgcggcggccgtcgagctactggccgtccgtcatcgtgctgacgctggtgagcctggccgtgttcgggcgggtgttcgccatctgcctcgcgtccatatggtggtatgtacttcccaccttaggcagcggccgctgctataacggcagcgccggtgaggacgcgcgccgggccgggatgaggatttccatggagaaaaagaaggtcgtgtcgccgctgccacaccaacacgccaagaaaggcagcatcagcggcgcgtacgagacggtcaggccgccgaaagggaagcgaggctga

SEQ ID NO: 93005 - DNA, 1085 bp, Zea Mays
atgccgccgctgatgcccactggcgccgcggcgaccagcgtgctgtggcgggcgcgcaagcgcggccgcgacgaagaccgtctccttttgtcccctccgctgtcaaagagggagacggagagggaggcggcgggggcgtcgtcttaccctaaccctcaacctccagcctcggcggcccccgtggcggcgacgaggagaggacgacggtacgtgcctatgcccgagggtcttcttacaggctgtgaggagcggctccggaggctctcgctcgtggcggggtcgtctccagcggctgccttgccgtggccggctgcggcggcggcgccatcgtcatcggacgcggcgacgacgaggcgggtgttccccgtggagcgcgacctgatctcgaagctgcaggtgcccaaggtcatcaggcctcgccccgctcgccctctgtggaccaccatctgcatcgactccagcaacatcgccgtcgtcggtagcggcccggagacggcggcgtctgcgtccaacaagacggcgagggaggtggaggccgaactggagctcccgggcgcgctcccggccgtcgtgtcgggcccccgcaaccgtgtccacctggtgaacgacgcgtacaaggctatggtgggacagcccgtgtgcccgtggctcgacgcgctgccgggcgccggcgcgtcgaggaggatcaacggcatcgtggcgctggacgtgcggacgttcggcccggcgccacgcctgccgaagaatgccgggtcatcatcagacgccttcccatgcaccgcaaggatcacgtgggagcacggtggcggcagcgccatcgcctccctcaccgtgccgtgcgccgtcgagcacctggccggcggatccggtgactatcgcttcatctggaggtttgactccagcagagcgtccatcatctactgcatcgcgtgacaaactagctagctaggccatttatttacgattcatgctttgtttccatcgcatgggctgttatatatgctggtcactgaagctgcaaaatagcgcgttaggtgatggatcgttggttcgttttgtctctagctagcgcgccagtgttgatt

SEQ ID NO: 93006 - DNA, 1398 bp, Zea Mays
atggacgacggcgccgcaaccacaatcgtccaaggcggcgacgcgcacgtcctgctcctgccgttccctgggatgcagggccacgcgaacccgatgctccagcttggccggcggctggccttccacggcctgcgccccaccttggtggtctcccgccacgtcctctccaccacctccacctccaggtcgtgccccatccccgtggccgccatctcggacggcttcgacgacggcgggatctcctcgtgcccggacaccgcggaatacgtgcgccggatggaggccgcggggtcggagactctggcggagctcctggacgccgaggcccgcgcggggcggtccgtccgcgtgctggtgtacgactcgcacttgccgtgggcgcgccgcgtggcgcgggccgccggcgtggccgccgccgcgttcatgacgcagatgtgcgcggtgggcctcgtctacggcgaggcgtgggccgggcgggtggccctgccgctggcggacggggccgcgctgcgcgggaagctcgccgtggagctgggccccgacgacgtgccgccgttcgtggcggcccccgagtggtacccggcgttcacggagtccgcgctgagccagttcgacgggctggagcacgccgacgacgtgctcgtcaactcgttccgtgacctggagccaatggaggcggattacctggagtcgacgtggcgcgcgaagaccgtcggcccgacactgccgtcgttctacctcgacgacggccgcttgccatgcgacaagacatacggcgtggacctcttctcgagcaccgactccgaggcggcgccgtgcatgacgtggcttgacaagcaggagccctgctccgtcgtcctcgcgtcgtacgggaccgtcgccaacctcgacaaggagcagctggacgagctcggcaacggactgtgcgattccggcaagcctttcgtttgggtgctgaggtccaacgaggcagagaagctgtctcgacagctcggtggcaggtgcaaggagaggggcctcattgtccccttctgtcctcagctcgaggtgctggcacacaaggccacaggttgcttcctgacgcactgcgggtggaactcgacgattgaatccatcgctagtggtgttccaatggtggcgatgccgcagtgggcggaccagccgacgacggccaaatatgtggagagcgcgtgggggattggggtgcgcatgcggaagggttccttggtgaggaaggaggtggagaggtgcataagggaggtgatgggtggggagaggaagcatgtgtacgggaggaatgccgctcgttggatgcacaaggccaaggaggccatgcaggaaggaggaagctctgacaagaacattgcagaattcgcagccaagtatttaccaaagtag

SEQ ID NO: 93007 - DNA, 903 bp, Zea Mays
atgcttcctctccccgcccatcacctcccttatgcacctctccacctccttcctcaccaaggaacccttccgcatgcgcaccccaatcccccacgcgctctccacatacttggccgtcgtcggctggtccgcccactgcggcatcgccaccattggaacaccactagcgatggattcaatcgtcgagttccacccgcagtgcgtcaggaagcaacctgtggccttgtgtgccagcacctcgagctgaggacagaaggggacaatgaggcccctctccttgcacctgccaccgagctgtcgagacagcttctctgcctcgttggacctcagcacccaaacgaaaggcttgccggaatcgcacagtccgttgccgagctcgtccagctgctccttgttgaggttggcgacggtcccgtacgacgcgaggacgacggagcagggctcctgcttgtcaagccacgtcatgcacggcgccgcctcggagtcggtgctcgagaagaggtccacgccgtatgtcttgtcgcatggcaagcggccgtcgtcgaggtagaacgacggcagtgtcgggccgacggtcttcgcgcgccacgtcgactccaggtaatccgcttccattggctccaggtcacggaacgagttgacgagcacgtcgtcggcgtgctccagcccgtcgaactggctcagcgcggactcggtgaacgccgggtaccactcgggcgccgccacgaacggcggcacgtcgtcggggcccagctccacggcgagcctcccgcgcagcgcggccccgtccgccagtggcagggaacggcaggagcaggacgtgcgcgtcgccgccttggacgattgtggttgcggcgccgtcgtccatggctccgtattcgtcgcgttgcaacttgcaattga

SEQ ID NO: 93008 - DNA, 1863 bp, Zea Mays
ccctgccgccgctctgctcaaaatttttctcaccgtcgttgcctcgttcccatccgctcggccaccctggataaaaatcccatcgcggtgtccatcttctgctcttagacgagtgcccctgccctgctccctaccgagcccccatggcgcggtcgcctctccctggtgactcgcccagcctctgctcctcttctccccggcgcctggtcggatgtggattctctgctcgaagctcccagcgccggattccctgcaagcttcagcttcctgcgcgcccagcctttccacttctccagcgcccagccccaactcccagccgagctcggccgcccggcccccaacgccgctctcttccccagcgcccctcccctctgttcgcttgtcgccatggccgccgtagctcagctcgaccgctcggcttcccctagcctcttcccctgcgagctcgactcctgctcgcccatggagttcgcccagctccctgctccggtgactagcgctcggcgtcctgctctctatgccctgctcgtccctgcgcacgcgccgcggtttccccgagctccctcgccgtggattctttctgcgcgtcctctccggcgctgcggtgccccagcttggcctctgcccattcctcagtcgcaccctgctccagtcgctcacccatctgacgctacacgctcgcctctgctcgttccgtgggtgcgcactgccttctctgtccatggtgcgccctcacctctacttctctgctggccggcgtttttccagccgtggatctccttgtgtgccgcgtccggctccctaacgtgccgcagtgcccgtcgccctgcgcgcgctctgtttcctcgcgcggcttcgtgctcgcttggccgttgtcttggatgcgcaggagtagtgtaggtgcttgcagtcggtggatcctcgatatcgagctgggattagagaagacagtactgttccgtgcgtcgcttatctgatgctcgacggaatgtccaactgggaggtgatagcttcgtgtgtcggcgagccgtcgttttcctcgttcagtgtttgcgcgggcttgcctgaaccgtgctgccatctcccgaccgttggcccttgcccactgcacgggcttgtcgtgctagtcaaccccgcctcgatcctcgtcgtcgatactgcgcttgctggtggccaaagctcgcgctaacctgctcgatcacacctcgtcagctcgcttcatactcaatctcgtcgtcgcgtcgtgtgtgcatcactcgccagccatatgtgatcaaagacgtcaaccgggaaccatcctcgtgcttgcaactatcgcgtcgaattagtcagggtaagttgattcatattcccgttaactaggtctataaatagattaaatagaattgttggtcacagtaaatattatgaatttagcatgcgtatattgtgatgatcgatttagatagctcgctaaatcaagtaattaagttacacagtttagagagttaataaaaagctaggaataaaaatagattttctagtgttattaggtcaatttggttaatgaatgtagtcgatgctctgctatgatatccatggtgcttaatgcttgattttaagtgtttcatcctttttagtatagagtatctatcttatactcgttctacttgtgctcatacatgtgcatcgtgcatctcatgaggtacgataaataatcatgtgatgcggaagacgagccaagtcgaccccaagcacgtgctaaatccgcaggatgaagctgatggaccaacctgaagatggttaaattaagcaagtgctcggtcgagggatactcgtcaagcggacatcgtctaacaaacactaacgtagtgttattccagg

SEQ ID NO: 93009 - DNA, 382 bp, Zea Mays
ctaaattcataaggttcaattgaatttaaattgctagtttgaacttcatgccttcaagtatcaaatagaattccactatgaatgatactacatctttttttaataattactacttatttattgttaaaaaactattaactatcctccccctttaactctatttctcctattttatttggggctctaatttgaattcaaagctaggcttgtcttaattacaattttgggtttgatgcacaaacaaaaagaagtccagcatgatgcatgggtttatgtttttttttatttggcatttatttgaaataaaaggtgtctcatgctcacatcatctcgtcaaaagagcactttattatcttcaatgacaaaggtcattaatactctc

SEQ ID NO: 93010 - DNA, 781 bp, Zea Mays
cccctcgccctcgcccgcctgtttaaacctgactgtctataacttaccgccggtccgcacccgcccaccgtccctgtccccttccccgtctaagcactcggatcctctgccgccgcgatgagctactacggccagcagcagccgcccgtcagcgcgccgccggcgcaaggttatcccgggaaggacgcgtacccgccgccgggctacccgcccgcgggatatcctccgccggcgcagggctaccccccgcagggctacccgccgcagggctaccctccgcagcaggggtatccgcagcagggatacccgccgcagtactcgcagccgccgccgccgccccgccagcagcagagcagcgggccctctttcatggagggatgcttggccgccctttgttgctgctgcctattggaagcctgcttctgagatctaagctgcgcacaacttgttctacaaacaccacttcaatttgcacggttgatataactggggattggcttgttagcgaagaaccgaagataccatgggttcttatgcaaatcacagttctcctagttctttctatcgttctgattgtccgttgcgatgtttggtgtacctagtagtatcttaattatataccttacactgtttacctttccaatggaattcttggtctagctaacattgtgagattatgtcacttttctcgttctctgtagtcattgcattttgctcctggtgttgtcttctttgtgggatgtccaatcttttgtggcctatacaagagcttgtttggttg

SEQ ID NO: 93011 - DNA, 749 bp, Zea Mays
cccctcgccctcgcccgcctgtttaaacctgactgtctataacttaccgccggtccgcacccgcccaccgtccctgtccccttccccgtctaagcactcggatcctctgccgccgcgatgagctactacggccagcagcagccgcccgtcagcgcgccgccggcgcaaggtatgtcttttctcgtgctccctccctgtttccgcgaccgattgcgcctcgttcctccttcgacgtggatccgtgaacactgcaggttatcccgggaaggacgcgtacccgccgccgggctacccgcccgcgggatatcctccgccggcgcagggctaccccccgcagggctacccgccgcagggctaccctccgcagcaggggtatccgcagcagggatacccgccgcagtactcgcagccgccgccgccgccccgccagcagcagagcagcgggccctctttcatggagggatggtacgttctctcctctgtccgccccctcacctccgattccatgcggttgcagatattggagccgtcgattcgttttcagttttgccggagacgacgccctgggcggtggcgctagtggccgcctagtgggcgtgttgtgtggcgcagacgtgatcgcggtcgcggactcgcggttggcctgccactgtcagcgccaatcggcgagcggttggatgggtcgtggtcgtggagggtccaggccaggcgccctccgcgcccgtgaagttgaccgcgccctgcgctcc

SEQ ID NO: 93012 - DNA, 414 bp, Zea Mays
atggtggtggtgcggaccacggcggctgcgctggccgcagccatggtgttgtacatagcagggttgaggacgaggaccgggtcgaccgtaccggttccggtggcggcggtgactacagccgcgatggtctgtagggccatgacagcggctgcgtcgatgagggaggccatcaggcgtaggggagagccggcggcggcggggaagaggatccgacacggggggcgacgacgaggaagaggaggtccgcggccaaccggcgacaggcaagaagatctggcgcaggaaaccgatgacagcgaagaagagggccacattcgatggtggggcgcgggggagcgggccagtggcttggggaagagggaccaacggttgagagattctgatatttgccatcagcaagaaacaggtttgtaa

SEQ ID NO: 93013 - DNA, 2354 bp, Zea Mays
tgatgaggagttttttgcatctaacattgttacttgtgttggtcagatcattggaattgttgttgctgatactcatgataatgcaaaaactgctgccaacaaagtacatatcgagtattgtgagctcccagcaattttatctatagaggaagctgtcaagattggaagctttcatccaaataccaagaaatgccttgtgaaaggcgatgtagaacaatgttttctgtctggtgcatgcgatagaattgtatcaggacaagttcatgtcggaggtcaagagcatttttacatggaacctcagtgcactcttgtctggccagtggattctggaaatgaaattcatatggtctcatctactcaagctccgcagaagcatcagaagtatgttgcaagtgttcttggtcttccacaatcaaaagtcgtttgcaagactaagcgtattggtggtggatttggtggaaaagaaaccagatcagcaatatttgctgctgcagcatctgtaccctctttctgtctgagaaggccagtaaagcttgttttggacagggacgttgacatgatatcaactggacagaggcacagtttccttgggaaatataaggtgggatttaccaatgaagggaagatactggccctagacctggaaatttataacaacggtggccattcacttgatctatcccttgcagtactggaacgtgctatgtttcattcagaaaatgtctatgacatagaaaacatcagaatcaatgggcaagtatgctttacaaacttcccaagtaatactgctttccgaggttttggtggtccacaaggcttgttgattgcagagaattggattcaccatatagctacagaactccaacgaagtcctgaagagataaaagaacttaattttcacaatgatggagttgtgctacattatggccagttgctccagaattgtacaataagttcagtttgggatgaactaaaagcatcttgtaattttgtggaagctcgcaaagccataaataattttaacagtaataaccgctggaggaagcgaggaattgccatgattccgacaaaatttggcatatccttcactgcaaaattcatgaatcaggctggcgctcttgtgcaagtttacactgatggcactgtcctggtaacacatggcggggtcgagatgggacagggtttgcacacaaaggtagcccaagttgctgcctcgtcattcaatatccctcttagctctgtatttatatcagagacaagtactgataaggttcctaatgcatcaccaacagcagcctctgctagttcagatctgtatggagctgcagttttggatgcttgtcaacaaatcaaggttcgaatggaacccattgctagcaaaggaacccacaactcgtttgcagagttggctcaagcatgctacatggaacgtgtggatctctctgctcatgggttttatgctacacctaatattgggtttgactggacgattggcaagggaactccattcaattatttcacgtatggagctgcatttgcagaagttgagatcgacaccctaactggggatttttacacaaggacagctgatattgttatggatctcggattttcaattaatccagcaattgacattggccagattgaaggagcttttatccaaggattgggctgggcagccatagaagagctaaaatggggggatgataaccataagtggattcgacctggacacctcttcacctgcggtcctggttcttacaaaataccctctgtaaatgatatacctctgaatttcaaggtttctctattaaagggtgttccaaatccaaaggctattcattcttccaaagccgtgggagagccaccatttttcctaggttccgccgtcttatttgcgataaaggatgcgatctctgcggcaagggctgaggaggggcacttggactggtttccactcgacaacccggcgacaccggaaagaataagaatggcatgtgtggattccattacaaagaaatttgccggtatagattatcggtccaagcttagtgtatagcggctgctgggctggtcacgggagaataaattggaaacagaagcccgcatttgtaaagtttcatgccctttgtgctaaaaagaatgggagggacggtttagtgttacttgtgggaaactttaaccctaacaaaggattgggtgatgtattaatagactgagttagttgggtctgacatacacatggatgagaagataattatacggtaaaccctaaggccctgttcggtttttagggattggagccccggattgattcctagccggattacttctctaatttatatagattttga

SEQ ID NO: 93014 - DNA, 1661 bp, Zea Mays
ggccttcgagggacaaagcttggatgtggtgaaggtggttgtggagcttgcactgtcatggtctcttgctatgaccgaattacaaagaaatcactgcattttgcaatcaatgcatgcttggctccactttattccgtggaaggaatgcatataatcacagttgagggaattggagatcgtcagcgaggtttgcacccagttcaggaatgtttagccaaggcacatggttcacaatgtggattttgcacccctggttttgtgatgtctatgtatgcactgctgagatctagcaaacagcctcccactgaagaccagattgaagactgccttgcaggaaatttatgtcgttgtactggctaccgaccaattatagatgccttccgtgtgtttgccaaaacagataatttggcatacaccaattcatgttcagaagatgcaaaggaccaagctatctgcccttctactgggaaaccatgttcctgcaggaatgagacagatgtcaatgttaatgagtcctcgttatcatcgtctgtggaaagatattcaccttattcatacaatgaaattgatgggagtgcatacaatgaaagggaactcatcttccccccagaacttcagttgagaaaagttatgccacttaaattaaatgggtctaatgagatcaagtggtataggcctcttaaactaaagcaattactacatttgaaatcttgctacctggatgcaaagcttatcattggtaactcagaagtgggagtcgaaacgaagtttaagaatgcccaatataaggtcttgatcgcagttactcatattccagagcttaataccctcaaagctaaagaagatggcatacacattggttctgctgtaagacttgcacaacttcaaaattttcttaaaaaggttgtagcagaacatgatttgcctgaaacttcgtcatgccaggcaatagtacgtcagttaaaatggtttgcgggtacacaaatcaggaatgttgcatccattggtggtaacatttgtactgctagtccaatatcagacctaaatccactttggatagctgtaggtgcgaaattccatataatagatgtgaacggtaatgttagaactacccttgcaaaggacttctttcttggttatcgtaaagttgatataaaaccagaagaaatattgctttctattatactaccatggacaaggccttttgaatatgtcaaagaatttaaacaggcacatagaagggaggatgacattgctttggttaatgctggaatgcgtgtgtatttacaagaaactgaacgaaattggataatatctgatgtttcaattgtctttggtggggtagcagcagttccacttagtgcttcaagaactgaaaacttccttactggaaagaaatgggactctgggttgctggatgatactttcaatttattgaaagaagacatctctatttcagagaatgcacctggtggaatgattgaatttcgcagatcgcttactttgagtttctttttcaaatttttcctgtctgttacccatgaaatgaaaataaaagggttgttagcagatggattgcatgcagatcatctgtcagctgtacagccttacagtaggcctgttactgttggaactcaaagttatgaattagtaaggcaagg

SEQ ID NO: 93015 - DNA, 519 bp, Zea Mays
atggacgtgaagagcgctttcctcaacgggccaatcaaggaggaggtgtacgtggagcaaccctctggctttgaggatgaacggtaccctgaccacgtgtgtatgctctctaaggtgctctatggacttaagcaagccccaagagcatggtatgaatgccttagagattttctgattgctaatgctttcaaggttgggaaagccgatccaactcttttcactaagacttgtgatggtgacctatttgtatgccaaatttatgtcgatgacataatatttggttctactaaccaaaagtcttgtgaagagtttagcagggtgatgacacagaaattcgagatgtcgatgatgggcgagttgaactacttccttgggttccaagtgaagcaactcaaggacggcaccttcatctctcaaacgaagtacattcaagacttgctcaagcggtttgggatgaaggacgccaagcccgcaaagactccaatgggaaccaacggacatgtcgacctcaacaaatga

SEQ ID NO: 93016 - DNA, 1230 bp, Zea Mays
aagaggcaagcccattctcgccgtctggaacagccggacaggaccacgccggccgcggagttaacggcacagcgtcgtttcaaagctaacctcccgctctttcctttctctgaatcccctgccttctcctgcctccccgtccaagatccccaaaactaccgccgcgccgccgccgccaccatgcctctgtcacaccggaacctcctcctcttcattccctctgtcatcgttctcgttgtcacctccgccgccgccctatccgtctccaccccggttgagctcacagtcacctcgcatccgccggcctccgtccacctcccgcacgcgcgacccctcgccggtggcggtaccgccgggccctactgcacgcgtgttctcctccaaggccgcccctcccgcatccgcgacccgtctcgcttcttccacgcgcttcgactccgcgccaacgccacccgcccccacggcctcgagctctgcttccacagaaatgccacagtggggccatgcaagtgcgccgcgtcccaatggcagaaaatgcccaagagcgggctctggatgcaggtcatctcaccatacgactaccggattcttgatttccgaatgcctgctgacccttcgaggtctgttgtggtgtccactgaggaagaattcttgctccacagggtggtgttctttgtcgtaggattggtgctcatggtggtggcacacacattgagcgagtctgtagtgttctactatggtggagcaatgactattggcattttccttgtgatactgattatactctttcagggaatgaagcttttaccaactggtagaaagagttctcttgctatttttgcatactcctcagtcgttggcatgacgacatattttcttcactatttgtcgggtatgctgcgctcagttcttgtggaaattgggattgctgaagacatgcataatcctcttggaatattcgctctagtatgtgtcgtcttagctggagcctggtttggttactggggtgtccgtaaacttgtcctggcagaagatggatctgttgatgagggtgtggcttattttgttgagtgggctatcttgattgtttcagctgttatgatcctccagagttctctggactatctctttgcctttgcagctctaatcttctgtgtaatcatcaaagcgattgcaagaattgaaggaaagtcaaaagttttacactatatattcgggtatgataaactc

SEQ ID NO: 93017 - DNA, 1493 bp, Zea Mays
ggacggtacgagagaggggcatggggtgcgagtacgacaggcgtcacgggaatcccccggttcccgtcgcctcgtcacacggtttccgaagaggggaataaatgacaattgttacgtactccagtattcctctttttatttcttaacggaaaaggttgaaaggattcgtcgtccatttaagtgccgtggcccagaaccgtcttggacgccaaggaaacagtcacgtctcccagatctaactgccccccgactcacgaatcccaaagcctccatggcgacgcaccgccactgcctcccactcctcctcctcgtggccgccgccctcgccgccgtccctgctcgcgcggcgctgggcggcgggcgcggcccgctgctgggcgggtggaacccgatccctgacgtgagcgactcgcacatccaggagctaggcgggtgggcgctggggcaggcgaagcaccagaagctggccgccgacgggctgcggttccgccgcgtggtgcgcggcgagcagcaggtcgtgtccgggatgaactaccgcctctacgtcgacgccgccgaccccgccggccgcaccgtgccctacgtcgccgtcgtgtacgagcaggtctggacccgcacccgccagctcgcctccttcaacccggtgccccgcgcccactgaaaccatacgcacacgggtgggccgaagcgacgttctccgtcaattacgtgtcgagctaatcttattattgtttctattattataataatgcttctccctgttcctatggacctatagtagtatactagtatgttgcgagggagcgagtagaccgtgtgtttcgctatcgtgggactagaataagccatgtcaatgaacatgagccgaatagaggctacgtactgttattgtatcagtactagtaccatatatatatatgggcgcactacagtctgtgatgtaatggattgtgctagtatttgactcttgcttttgtacagaattattattattttatatggtgttctaggatttactgcacggggttttagttaacctgcacatgagatcttttggaacgtgtttcttactctctgttttgttttagttgtcgctagatagtgcaaaattgaactatccagcgataattaaaggaaacggagtagcatttttgtagatggattctgtcaaacaggacaggaatcctgcagcagctgcggcctcgctggatccctcagtttcctaggcacgtgaacccctgatcatcagatatggtactgtgtgtgtactagcgtcgaacagctggatcgcgctggactgatggagcgatttggatgtgttcacgtggatgcctgctctgcacggctgctatccataaacaattccttggtccttcgatgggagggactgacgaaagaggaaagactccacctgtagccaatcctttttctgtttggttcaaatattaattgtatactgtaagtataatattttattacacatatctggtaag

SEQ ID NO: 93018 - DNA, 805 bp, Zea Mays
gcgccggcccaaaccaaaccaggggctcccctcccccagatgaccctgctgctgctcacgccacgccagctagcctggtcaaatttcggctccgcgcctgacgccaataaatcccagcgtcccgcttcgttcgccccgacatgtcctcctcctcctccttcccgcacgtcagacgtcgtcacacacaatctagcgcgtacgtacgtcccaaaccaaaccatgtccgcgagagctcttctcctgacgaccgcgacgctgctcctgctcgtcgccgctgcgcgtgcggggcagccgctcgccggcgggtggagcccgatcaggaacgtcagcgacccgcacatccaggagctcggcggctgggcggtgacggagcacgtcaggcgggccaacgacgggctgcggttcggcgaggtgacgggcggcgaggagcaggtggtgtccgggatgaactacaagctcgtcctcgacgccacggacgccgacggcaaggtcgcggcgtacggggccttcgtgtacgagcagtcgtggaccaacacccgcgagctcgtgtccttcgcgccggccagctgacgaccagctggacgtaattaatcagcggcgccgcaatgtgtctttggagtaacgtgtcattaagcaaaatacaattaccatagtactacactaggacctcgtatcatgaagacatactcttgtgatcttgtcacggactcacgggtcctcacttaataagccgtcttggcattatctgtactgctatatcaacagatcattactgtttttctcgattgcaaatcccctttttttc

SEQ ID NO: 93019 - DNA, 673 bp, Zea Mays
gcccgccctcccatactgctatcactcaagcctattctccattgtggaaccaacaaatctccaagctctcccaatttagaaacgagagatggccatgacgatgaccctcggttccatgctcatcgccgccgccgcagttgtcggcctgtgctccgtcgctcccgctgcatcagcgcgcgaggagccactacagccgcagatcgtcggcgggtggaaaccgatcaagaacgtgaacgacccccacgtccaagagatcggccggtgggcggtttcggagcacatcaagacggccaacgacgggctgggcttcggcagggtggtgagcggcgaggagcagatcgtcgccgggaaaaactacaggctgcgcattcaagcgacgaaggtcggcgggcagaaggcgatgtaccgtgcggtggtgtacgagcagcttaccaacacaaggcagctcctatcgtttgatccggcgaactgatctaattatggcgtcgctggacaacaacggttcgagtcgccttctaggatttcagattaaaattctgcaagtaccgcgtgtaacaaaccaactgatgtgttgccctagtcatatcgtggaattagaataagatccagcctatctttatctgtttttaatgttaaaaggaaataatgaactcagagtcgagataaaattata

SEQ ID NO: 93020 - DNA, 1609 bp, Zea Mays
ggaatgggaaagcgaggaaaaataaaataaacccagtaaaataggcagtcggcagaccacgggccccttcgtccacctccggccgagcagtgccgactgccgccacctctgaaaaaccctagcaaaaaaaaaaaaaaacattgcccaatccaaatccccattccctccactcccaaaatttcgaactccgaatcgaagctatcatgtgcgagcgctcacctaccccacgttgactagaagaaccgtccgacttcaacttcccaattttgcctccaaaaaattcaaaatattattcgaccccgccgccatcccgtccgccctacaaatcccgccagcatgcgctccatgttcgccactaggtcgcttctcgccgctgccgcctccgcccccaccgtcctccgcgccagcgctttcccatcgcgttcgctgctcctctctctgcctttccctcggggtcgtgctgccagaaatatgcttggcgcggcgaggtcgatctcttcggccgccccgtcgcgagtcggaggccgtgcggctatggaggtccgggcggctcagtccggcgagatccatgtcatcgtgggccccatgttcgccggcaagaccaccgcgctcctccgccgggtccaggccgaggccggcaacgggaggagcgtggcactaataaagtccgacaaagacaaccgctatggattggattctgttgtgactcatgacggtacaaagatggcgtgctgggccttgtcagaactgtcaagttttcatgacaaattaggaattgaggcctataataaggtagatgttataggtatcgatgaggcccaattcttcgacgatctttatgatttctgctgcaaagctgcagatcgtgatggaaaaattgtagttgttgctggcctagatggtgactacaaacggagaaagttcggttcaattcttgatattgttcctctggctgactcggtcaccaagctaacagcacgctgtgagctatgtggtcgccgggcgttctttacactgaggaagacgcaggaaaccaagactgaactaattggaggagcagatgtgtatatgcctgtgtgcaggcagcactacatggatgggcagattgttattgaggccacaaggattgtgttggaccttgacagatccaccgtgacggcgaaagccttgaaataggccaatacctgacttctgcatgcagatttgcagtgtgtaacgatttatttatgatgacattggttgctgtcgagtgttgaagacgcacaccagttggtgaaaagctgttggccttgagatgctgccaccagcgagggaagccaaatgagttgatcccacaaagtactgttgagaagtttgtaaatatctaacagtgtttgggtttaaaatgcggacatgtatcgcttttcttatgcaattggcattgtcatttttattaagcaatcagatgcttggaatcagctgtacgaatttgtaccacaaaggaattgcattcaagtttgaaagtaaactaaggctatctccatcatgtaaatggatgtgtaaagtactgtttttcactgtagatcgtactgattgtagagtgtgtaatttgaaatggagattgagacat

SEQ ID NO: 93021 - DNA, 819 bp, Zea Mays
ctttttgttagccaattgcattgactaggttgtctgcaaaacatgtaccgcagaagtataaatctaaaaagtgttacgttagtacttagtgatatgcattaagttcagggtttgatctagctaccgcactacatccaaatatgcagtatgcacttacatttcttgtttgttcaagcttttcatcatgctaaaatattttcctattgagtcaaaagggaggcaacaaaagctgtaagtagtcggcagagttgccaccatatgtttctgttgtttctcggcacaatgcataatgatgtgcttcaatgcatttgacgaggaagctgacctcgatgttcttgaccatccagttctgaatttgttctattacctggtatgtatgaagtttgcaaagcacgaaattaagtctcctgctccagtatggcaacttcgaattgatacttactataactctaatgttccactgttcttaccatcgtttctgcagcttgtggagattctcccttcatctcttgtcctgtacattctaaggaggattcctgcaaagctacggctatcccagtatcaccccgtcagcagcagctagagacgaggcattaccatctgctgagccaaaaatggtgactgctgtcaagctatgaaaaatcaactgcaacgccctctatataatatttgtattggtagcctctctgcaaaatatatatagcctcttttcttttcatttcttcccatttatatttcgatgttcttgttgccccctttttttatgttacatacttgcgatgcagctctggagcccttcttcagcgcagctgctactca

SEQ ID NO: 93022 - DNA, 3033 bp, Zea Mays
atggcttctttcagtgagtcctgccatgaccgtatagataaagatgagcaatggaatttatttgcccatggggaatgaacctgcaaagattttggaagagttgtctcctattgatgagtctagcacagatactcaatctgatttgtgtagaagcacagaaatgaatttcacttcacttgagggggttgtacggatggaggctgagggccaattggattcaatagtctgctgtggtgtaagaccaaagcatatgttactagatatggaaattggacatacagccactggtacattcacctttgacaagactatcgacttagctcatcctgccaattttgttgcacaagatggaaggctagaaagtatagtatatgatgttttgaataatcatgcacaaaggacaacctctaaaagtaaatcttctgttggacttccagatactgctgtgcttcagagctcacttattgagttcactgacaattgtctggaagataaaagggcttcagatgataaattttcacatcccaataatgtggacttgccattgaaggatacgttaaattctacaatagactatgacatttgtagatctattaataatgaaggatcagaagaagaaatagtgcctcaacatcagttataccagtcatgtagtgataagttcaaccttagcagtgtcatgccagagatctctaatgctgaaaaatcacaaaaattatctgctggaactcaaaattcttctgctacttctttggaaactgacggacgaattaaaaggccaaatttttttgtggatgaggaatcaattgaagaacatgctccaaaagtattactgtccaagagaaagattatgtcaccaacgtctcaggagaagctttacagtgctgtgactggtattgatttgtgtgatggagtccaaagatcgaatagcaaaatcattattgaagattgtgacaaaactacaatatcattgcctcagccagcacacatgcaaggcaaatcaatgttccacacagacaggagacttaaggacaggacatctgtctcccctacaagcaaaggacttctgaagtcaacaggatccccgcccaatcaacagacttgttcttgcatgagaagttcgccagtggtcttagacactgagaaagctgttgagttttcacaaagacagatgcatgatatagaaaatattgctgcaaagcttatcaggagcttgaaacacatgaaaagtatagtggatgaaagtttgtcaacagaagcatactctttacttcctaattttaacattgcccagagcagcctctgaggatgcattagaagtggagaggactacgaggaaatggctgtcgataatgaacaaagactgcagtcgcttttgtaaaatattgagcctagcaaagaagaatgatgtttctcatcctgaagcgccaaggaaacaaagaaaaataacgtttgcagatgaagctggaggaatgctctgccatgttaagttttttaaggatggacaagcctctctttctgaatgccagagtgatttataggcactaagctggtcttcatcatgaaatttgatcagaaaggaaaccttgttgacaacagaatataatcaaacaagctgctcagctcagatggaccaaaataatgaacgcacgcacagtatattgaaccaaaatagtgaacgcacagtagaaaacagacggagaagttagcgcatgttgaacgcacagtatgtattttactgtaaattaattgatgacattgttgtcccaactcaggtattatccttgtatgttgagttcaagagtccatgtaaagcggcaatttttacaatgttcgctgaggccacaagtatttgtaacccagaattgtagcctctgtaatacaattattggatactgttggtccaaagtgctttatttgaaggaactatttaagtttcagtaataggaatattctcttttaagttatactaagttttagattagtacgtaataaaaataaatctctactactaattataagcataacgtaggcgtccacacccccacggtggtgcacgttctgccgcccgcgcatcccgcccgcggccgcaccttgccccgcatcacgcagtccaggcgcaattcctgctcgcgaaggtttcgggaaaggttgaacaccgcatttcgcctccggtgtctgtctgcctgcctggctcgtgctcctcggcgtcgccctcacccccatctcgaggccgccaccccgccgccatcctggctcaccccacgacgcaaatctgtgtgccgcccctcccctcccatatcgccatctctcctcccctccccggtcaccacccatacctcagccacctcggcggttgtgctaggggcgatggtggtggaggctgcggtcgcagctgtgttagtggaggagatgtggtggcggcagctagacagcatcgtgagcgcggtgtcgtttgggctcatgtccatgttccttgccattgccatcctcgagcacttcctccgccccctggcccacacgctcgagcacgcgccgccccgggggatccgccaccgcctcctcctcttcctcagccgtggcggtgagcgcagcgccgcccccagtttagatcttgaggcggcgacgaagcttcaagcccacgcgcccctcgagatggggccgatgcggacgcggatccgaaactggaccatggggccgacggggtggccgcgtggtgggtgtgggtcgcgctcaccgtctgcgttgatgtcgtcggcgtcggtctcgcgctcgtcgggttcctctactgaacaaggtttctagggattccccggtttctaggaattccgtcgtcgcttggcgctgccctgttatcgtaggtgtcgccagctgccggtcctgtggcccgtgcaggtgcagccatgcccttccatggtgtgccacaccagctctcggaggtgcacaagaagcgcacgctctaccatcccgagttgccctctgcctccaggtacgcacctcctcgttacggcggtcgaaatgttcatgaacgcg

SEQ ID NO: 93023 - DNA, 3388 bp, Zea Mays
actatatgaaataaaaactgaagatacaaattattctgaatttggaacttctatgtgttccataaagaatcctgatcattcatcctttgagctgcaacagaagctggtggatgatgatgactgtgtgcctccattttgtttcatgacccgaccagctcaattagctgatgtttctgatcattcctgcgaacaaacctgcagttccaaagaaaacaattctgatgacattacagctgcaaaggcaactgatgttgtttcttcattggatctcactgatgaagtgagaaatcatcagaaaacatctgaaaatataactaatttagatgtggataagtcttctactgcaaatggacttatggcttctttcagtgagtcctgccatgaccgtatagataaagatgagcaatggaatttatttgcccatggggaatgaacctgcaaagattttggaagagttgtctcctattgatgagtctagcacagatactcaatctgatttgtgtagaagcacagaaatgaatttcacttcacttgagggggttgtacggatggaggctgagggccaattggattcaatagtctgctgtggtgtaagaccaaagcatatgttactagatatggaaattggacatacagccactggtacattcacctttgacaagactatcgacttagctcatcctgccaattttgttgcacaagatggaaggctagaaagtatagtatatgatgttttgaataatcatgcacaaaggacaacctctaaaagtaaatcttctgttggacttccagatactgctgtgcttcagagctcacttattgagttcactgacaattgtctggaagataaaagggcttcagatgataaattttcacatcccaataatgtggacttgccattgaaggatacgttaaattctacaatagactatgacatttgtagatctattaataatgaaggatcagaagaagaaatagtgcctcaacatcagttataccagtcatgtagtgataagttcaaccttagcagtgtcatgccagagatctctaatgctgaaaaatcacaaaaattatctgctggaactcaaaattcttctgctacttctttggaaactgacggacgaattaaaaggccaaatttttttgtggatgaggaatcaattgaagaacatgctccaaaagtattactgtccaagagaaagattatgtcaccaacgtctcaggagaagctttacagtgctgtgactggtattgatttgtgtgatggagtccaaagatcgaatagcaaaatcattattgaagattgtgacaaaactacaatatcattgcctcagccagcacacatgcaaggcaaatcaatgttccacacagacaggagacttaaggacaggacatctgtctcccctacaagcaaaggacttctgaagtcaacaggatccccgcccaatcaacagacttgttcttgcatgagaagttcgccagtggtcttagacactgagaaagctgttgagttttcacaaagacagatgcatgatatagaaaatattgctgcaaagcttatcaggagcttgaaacacatgaaaagtatagtggatgaaagtttgtcaacagaagcatactctttacttcctaattttaacattgcccagagcagcctctgaggatgcattagaagtggagaggactacgaggaaatggctgtcgataatgaacaaagactgcagtcgcttttgtaaaatattgagcctagcaaagaagaatgatgtttctcatcctgaagcgccaaggaaacaaagaaaaataacgtttgcagatgaagctggaggaatgctctgccatgttaagttttttaaggatggacaagcctctctttctgaatgccagagtgatttataggcactaagctggtcttcatcatgaaatttgatcagaaaggaaaccttgttgacaacagaatataatcaaacaagctgctcagctcagatggaccaaaataatgaacgcacgcacagtatattgaaccaaaatagtgaacgcacagtagaaaacagacggagaagttagcgcatgttgaacgcacagtatgtattttactgtaaattaattgatgacattgttgtcccaactcaggtattatccttgtatgttgagttcaagagtccatgtaaagcggcaatttttacaatgttcgctgaggccacaagtatttgtaacccagaattgtagcctctgtaatacaattattggatactgttggtccaaagtgctttatttgaaggaactatttaagtttcagtaataggaatattctcttttaagttatactaagttttagattagtacgtaataaaaataaatctctactactaattataagcataacgtaggcgtccacacccccacggtggtgcacgttctgccgcccgcgcatcccgcccgcggccgcaccttgccccgcatcacgcagtccaggcgcaattcctgctcgcgaaggtttcgggaaaggttgaacaccgcatttcgcctccggtgtctgtctgcctgcctggctcgtgctcctcggcgtcgccctcacccccatctcgaggccgccaccccgccgccatcctggctcaccccacgacgcaaatctgtgtgccgcccctcccctcccatatcgccatctctcctcccctccccggtcaccacccatacctcagccacctcggcggttgtgctaggggcgatggtggtggaggctgcggtcgcagctgtgttagtggaggagatgtggtggcggcagctagacagcatcgtgagcgcggtgtcgtttgggctcatgtccatgttccttgccattgccatcctcgagcacttcctccgccccctggcccacacgctcgagcacgcgccgccccgggggatccgccaccgcctcctcctcttcctcagccgtggcggtgagcgcagcgccgcccccagtttagatcttgaggcggcgacgaagcttcaagcccacgcgcccctcgagatggggccgatgcggacgcggatccgaaactggaccatggggccgacggggtggccgcgtggtgggtgtgggtcgcgctcaccgtctgcgttgatgtcgtcggcgtcggtctcgcgctcgtcgggttcctctactgaacaaggtttctagggattccccggtttctaggaattccgtcgtcgcttggcgctgccctgttatcgtaggtgtcgccagctgccggtcctgtggcccgtgcaggtgcagccatgcccttccatggtgtgccacaccagctctcggaggtgcacaagaagcgcacgctctaccatcccgagttgccctctgcctccaggtacgcacctcctcgttacggcggtcgaaatgttcatgaacgcg

SEQ ID NO: 93024 - DNA, 1587 bp, Zea Mays
cgcggagtgcagtaatacggcacgccgttcaatctaccgggacggcgagacggagaatagaagacgtcagcactcagcagttcagcactgacccgtcggccgtcgccctcccggctcgcaaccgcatctctctcggcttctggcctcttcctagttcctaactaccaccgccacctctaccactggcctcaatctgcaaaccctagccctcgtcgccggcggccatggccgagaccgtcgacgacaaggtcagctactttcaggccgtcaccggcatctccaacacggacctctgcacggagatcctcgccgcgcacaactgggacctgcagctcgcggtgtccaccatcaccgccaacccctcctcgccctccgcttcggcctccacctcctcgcgtgacccggccccttccgctccgttggcggtagatgcggagtacgtcgcgcccccgccgccgctgccgctgccgctgccgccccagcagcagccggggatcgcgtggaagctggtgacgctccccttccacgtggtctcgggtggggtcggcctcgtcgccggcacgttccgccttggcgcctgggtagccgggggcgtgctgtcccgctccctctccctcctcggcctcgcggggcaagccggcagcggtgaccgcctgctagagttgccgccgtcagctgccgaggcggccgacttcgtcgctgagttcgagcgcgagttcggcgctggccgcggcccgcgcttcgtggccgaggggttcgctgatgcgctgaagcgagcgcagcgggaattcaagcttctgttcgtgtacctccactcccctgatcacccggatacccctgccttctgcggtggctgcctctgcgctgaacccgtcgcggcctttatagatgagaacttcgttgcctggggcggtagcatcagaaggactgaaggattcaagatgagcaacagcctgaatgcgtcgagatttccgttttgtgctgtggtcatggcttctacaaaccagagaatcgtgctattgcagcaggttctcataagattcccaactggagagcgcagagagcggagattctacagttctgcaaccgtcgcttccctctatgactatgtcgattctctagactgcatgaaagcggagaagtacaccctagtttcgaatttcccacgcgttacatatggtccagaaaagcaatccctgacgctggaggaagcaggcttgcatctgcaggcgagcttgtttatcgagatagaacaatgatgctgtaagctaaagaaaagccgaaactaaagtacagacgctcctttttcgaagttgttcagcgacagttaaggatttccagatggtaatacaccacaggtgcatgcttcttgtgtacttttgtcatgaactaaaattcgcttccaccaatatcagttggctgcagccaggtcttgtaatatgttgtgtgacttacgtttctcagccactatactgcagtgcttcagggaggtaggcaaaactggaaggcttgtagccacaccgccatacatatgatttgctcccgttgtcgttgagcagccggagatccttatgtgttgtggattct

SEQ ID NO: 93025 - DNA, 1879 bp, Zea Mays
gaagacgtcagcactcagcagttcagcactgacccgtcggccgtcgccctcccggctcgcaaccgcatctctctcggcttctggcctcttcctagttcctaactaccaccgccacctctaccactggcctcaatctgcaaaccctagccctcgtcgccggcggccatggccgagaccgtcgacgacaaggtcagctactttcaggccgtcaccggcatctccaacacggacctctgcacggagatcctcgccgcgcacaactgggacctgcagctcgcggtgtccaccatcaccgccaacccctcctcgccctccgcttcggcctccacctcctcgcgtgacccggccccttccgctccgttggcggtagatgcggagtacgtcgcgcccccgccgccgctgccgctgccgctgccgccccagcagcagccggggatcgcgtggaagctggtgacgctccccttccacgtggtctcgggtggggtcggcctcgtcgccggcacgttccgccttggcgcctgggtagccgggggcgtgctgtcccgctccctctccctcctcggcctcgcggggcaagccggcagcggtgaccgcctgctagagttgccgccgtcagctgccgaggcggccgacttcgtcgctgagttcgagcgcgagttcggcgctggccgcggcccgcgcttcgtggccgaggggttcgctgatgcgctgaagcgagcgcagcgggaattcaagcttctgttcgtgtacctccactcccctgatcacccggatacccctgccttctgcggtggctgcctctgcgctgaacccgtcgcggcctttatagatgagaacttcgttgcctggggcggtagcatcagaaggactgaaggattcaagatgagcaacagcctgaatgcgtcgagatttccgttttgtgctgtggtcatggcttctacaaaccagagaatcgtgctattgcagcaggttgaagggcccaaatcacctgaagagatgataacagttcttcaacgtgttgttgaagaatgtgctacatcacttgttgctgctaggattgaagctgaagagagactaaacaaccagcgattgcgtgaggaacaagatgctgcttacagagctgcacttgaagctgatcaggccagggaacgtgaaaggttagaggaactgaaaagacgtgaaagagaggctgcagaggctgagaaaaagcgtaaagaagaggaggaagctgtagcaagggcatcccaagaagcagctgagaaggaagctgctcttgcaaggaggaggcaagagaaggccatggctcttggagctgaacctgagaaaggaccaggtgttactcgggttctcataagattcccaactggagagcgcagagagcggagattctacagttctgcaaccgtcgcttccctctatgactatgtcgattctctagactgcatgaaagcggagaagtacaccctagtttcgaatttcccacgcgttacatatggtccagaaaagcaatccctgacgctggaggaagcaggcttgcatctgcaggcgagcttgtttatcgagatagaacaatgatgctgtaagctaaagaaaagccgaaactaaagtacagacgctcctttttcgaagttgttcagcgacagttaaggatttccagatggtaatacaccacaggtgcatgcttcttgtgtacttttgtcatgaactaaaattcgcttccaccaatatcagttggctgcagccaggtcttgtaatatgttgtgtgacttacgtttctcagccactatactgcagtgcttcagggaggtaggcaaaactggaaggcttgtagccacaccgccatacatatgatttgctcccgttgtcgttgagcagccgg

SEQ ID NO: 93026 - DNA, 1867 bp, Zea Mays
actctcgaatctcgactgtcggtgctgaactcgattactcatcactactcgtccttcgccgtttacctgtctcaggagtagtacgcagagtcgctggacggtggacgctagcccaattgactgcttcagaatttacagcctgctttcgattggataatgatcagcccattccgtattcaagttccaagcccaaatgcaaatccgatgcatgggccatgaccaccaatgggccttcgccgagcatcgagaagcctccgcgcccgccgcacgccggaggaaaggaactccccccgtccccaaattcccaaagacagtaccgccgagaaggacagagagtcagagactgagagactggaagcgcccgcgcgtgccggcgatggagagggacgtcgtgctctccgcacccgaggccgctgggtcctcgtcctcccccgcctcctcgtcgtactcctccttcgccgagaccagggtcatctgccgcgtgtgtcagaagcagttcgcgcagtacacttgcccccgctgtaacgcccggtactgctcgctctcgtgctacaagggtcatagtgttcaatgcactgaatccttcatgcgtgagaatgttatggacgagcttaagcagatgcaacctgaggatgaatcaaagaaaaagatgctagatatcctcaagcggctccacttggaagaagagatggcatcagatggtgaagatgagtccatgctatcagaggagcttattcaaaaagttatgtctggggaagagataaagctggaagacctctctgattgtgaaatcaaacgattccgtcaagctctggcctcaggtgagctcagtaagatgattgaaccgtggacaccttggtggaaaaaaccctcagccagatctatttcccttggcccggatggaagccagcttatcagacaagtaaacgcagaagacactgctgtaccatatccagatgcaaatactgaccaagaggctagcatcaacgaaatccctgaagggccagaatctcctctcccgtcactgaaacagttaacaaggacagagccatctcctttgcttgctgtccacttggttgacattctgtacagttactgcttcacacttcggctctacaacggtgattggcactcagatcctttgggtgcttccactgtcgccctgtcgatgtcgaaagtcatgggccaggatgctaaacctgagactgtacctgaagcactcgcagcctgcatcgaggagacatgctcaccagcttacaggcatactggtggtttcaggtttgctattggactcgtggacgatatcatcgccattctctccttgggacagaacgcacttatttgtgccctatgcgacttccatcgactcgttgaagttggtaagagcatgctcaaagtggagaaggtgggcaagacggagagggcacagggctctccaaagcttcgcagtgcagctaggaagctattcttcatgacttgttgggtccatgagcagccagatgaggcgtggccatctttagctcacatcgtccaggtgcagaaagcatctatggaggagttggagaccgggaattggaaggcggatagaaagagcaaaccacaatccgcggttcttatcgaggagctgtaggcatatggatgtaccactggaaactggatcgcgaagctctgtacccttgtgtatcgctcaggatgaatccaacgagagaccttgtccttgtaatgcagttagttgcttttgtgtacacttttttttttgaaaaaaattgtatttgttgaaatcctggttgaagcgatcctgctttactttgcttgttaagttgcgggctgatttaatccatgcgttggagcttatgcagttcagata

SEQ ID NO: 93027 - DNA, 1950 bp, Zea Mays
actctcgaatctcgactgtcggtgctgaactcgattactcatcactactcgtccttcgccgtttacctgtctcaggagtagtacgcagagtcgctggacggtggacgctagcccaattgactgcttcagaatttacagcctgctttcgattggataatgatcagcccattccgtattcaagttccaagcccaaatgcaaatccgatgcatgggccatgaccaccaatgggccttcgccgagcatcgagaagcctccgcgcccgccgcacgccggaggaaaggaactccccccgtccccaaattcccaaagacagtaccgccgagaaggacagagagtcagagactgagagactggaagcgcccgcgcgtgccggcgatggagagggacgtcgtgctctccgcacccgaggccgctgggtcctcgtcctcccccgcctcctcgtcgtactcctccttcgccgagaccagggtcatctgccgcgtgtgtcagaagcagttcgcgcagtacacttgcccccgctgtaacgcccggtactgctcgctctcgtgctacaaggcttgcagcaggtagggtatggtaatgtcgcactggtgtcaatagtcttccctgacgacatcttggcaccccctggctctgataccacttgtcaggaaccacgccggagagacaaccttcagcaggttgccgacaaactcctacctcccagggtcatagtgttcaatgcactgaatccttcatgcgtgagaatgttatggacgagcttaagcagatgcaacctgaggatgaatcaaagaaaaagatgctagatatcctcaagcggctccacttggaagaagagatggcatcagatggtgaagatgagtccatgctatcagaggagcttattcaaaaagttatgtctggggaagagataaagctggaagacctctctgattgtgaaatcaaacgattccgtcaagctctggcctcaggtgagctcagtaagatgattgaaccgtggacaccttggtggaaaaaaccctcagccagatctatttcccttggcccggatggaagccagcttatcagacaagtaaacgcagaagacactgctgtaccatatccagatgcaaatactgaccaagaggctagcatcaacgaaatccctgaagggccagaatctcctctcccgtcactgaaacagttaacaaggacagagccatctcctttgcttgctgtccacttggttgacattctgtacagttactgcttcacacttcggctctacaacggtgattggcactcagatcctttgggtgcttccactgtcgccctgtcgatgtcgaaagtcatgggccaggatgctaaacctgagactgtacctgaagcactcgcagcctgcatcgaggagacatgctcaccagcttacaggcatactggtggtttcaggtttgctattggactcgtggacgatatcatcgccattctctccttgggacagaacgcacttatttgtgccctatgcgacttccatcgactcgttgaagttggtaagagcatgctcaaagtggagaaggtgggcaagacggagagggcacagggctctccaaagcttcgcagtgcagctaggaagctattcttcatgacttgttgggtccatgagcagccagatgaggcgtggccatctttagctcacatcgtccaggtgcagaaagcatctatggaggagttggagaccgggaattggaaggcggatagaaagagcaaaccacaatccgcggttcttatcgaggagctgtaggcatatggatgtaccactggaaactggatcgcgaagctctgtacccttgtgtatcgctcaggatgaatccaacgagagaccttgtccttgtaatgcagttagttgcttttgtgtacacttttttttttgaaaaaaattgtatttgttgaaatcctggttgaagcgatcc

SEQ ID NO: 93028 - DNA, 1250 bp, Zea Mays
actctcgaatctcgactgtcggtgctgaactcgattactcatcactactcgtccttcgccgtttacctgtctcaggagtagtacgcagagtcgctggacggtggacgctagcccaattgactgcttcagaatttacagcctgctttcgattggataatgatcagcccattccgtattcaagttccaagcccaaatgcaaatccgatgcatgggccatgaccaccaatgggccttcgccgagcatcgagaagcctccgcgcccgccgcacgccggaggaaaggaactccccccgtccccaaattcccaaagacagtaccgccgagaaggacagagagtcagagactgagagactggaagcgcccgcgcgtgccggcgatggagagggacgtcgtgctctccgcacccgaggccgctgggtcctcgtcctcccccgcctcctcgtcgtactcctccttcgccgagaccagggtcatctgccgcgtgtgtcagaagcagttcgcgcagtacacttgcccccgctgtaacgcccggtactgctcgctctcgtgctacaagggtcatagtgttcaatgcactgaatccttcatgcgtgagaatgttatggacgagcttaagcagatgcaacctgaggatgaatcaaagaaaaagatgctagatatcctcaagcggctccacttggaagaagagatggcatcagatggtgaagatggtatgttctgcgtgcttcatgttcctatgccattgatctatcttactttctttaataataacactagaggtgcacataattgcattttttttatattgtgataactgctaatgaggacaaaactacagatacctccatgccagtggtggattcagacatgagacaagagaggagctaaatataattgaacacttaaaatcttattaacgtaaactaaaagctataatttgtataataaagaacataaataactatgtaaattaacattgttcaagcaacatgtaaaatatttttcagctgcgagagagggagaggctggctgtgtcgtcgttaggtcgggtggggctgggccttcaaacctggaatttccctgggctgctgaggtgaaaattacagggggtattctcatttttcttgggctcaccccgggatgagcaccccctaccgcttgggccctagggctgctcctgctccatgcgcagtatgctacacttacgattttactgtttggtacattaagttttcctgtttataggtagt

SEQ ID NO: 93029 - DNA, 4092 bp, Zea Mays
ggaggaggcggggcaatgggcagcagcacggcggagaagttcaggttctgcattgacaggggcggcacctttactgacatctatgccgaggtacccgggagaagagaaggctacgtcatgaagcttctctccgtcgacccgtcgaactacgacgacgcgcccatcgaagggatcaggaggatcctggaggagttctctggagagaggatcccccggtcggccaagatccccaccggcaggatcgagtggatcaggatgggcaccacggtcgccacgaacgccctcctggagaggaagggcgagaggatcgcgctttgcgtgacaagggggtttagggatttgctccagatcggtaaccaggctcgcccgaacatattcgacctcaaggtgtcaaagccgtcgaatctttacgaggaggtgattgaggtcgacgagcgagttgagctcgttcgggatggtgacagagatgagtcatctgttgaagggatctctggggaactggtgagggtgtcaaaacctgtcgatgtccaagcactgaagcctctgttgaaaggtttgcttgacaaggggatcagatgcttggcagtggtgttgatgcattcgtacacttatcctcaccatgaactcctggttgagaagttagctctggggatgggattcaagcacgtatcattgtcttcgtctctgacaccgatggtccgtgcagtgcctcggggcctgacggcaagcgtggacgcgtatctcacaccagtgatcaaagagtacctatcgggattcatgtcgagatatgaagggggctctgaacaagtgaatgtgctatttatgcagtcagatggaggactagcaccagagaggcgattctctgggcataaagcagtattgtcaggccctgcaggtggcgtggttggctattcgcagaccttatttggacttgagacatccaagccactgattgggtttgacatgggaggtacatccacagatgtcagccgctatgatggaagctatgaacaagttctggagacacagattgctggggctattattcaagctccccagcttgacataaacactgtggctgctggtggcggatcaaagcttaagtttcaatttggcgctttcaaggttgggccagaatctgttggagcacaccctggtccagtttgttaccgaaaaggtggtgagctagcaattaccgatgccaatttgatcctaggaaccgttattcctgaatacttcccatcaatatttggtccgaatgaagacatgcctcttgattatgaggctacaagaaaggcctttgaaaatcttgcacttgaaatcaactctcaccgaaagagtcaggacccatcagcaaaggacatgacaattgaagaggttgcacttgggtttgtcaatgtcgcaaatgagacaatgtgccggcctatacgccaactgactgaaatgaaggggcacgatacaaagaaccatgccctcgcatgctttggtggtgctggtccacaacatgcatgcgcaatggcaaggtctttgggcatgtctgaggtacttgtccaccggtactgtggaatactaagtgcatatgggatgggtcttgctgatgtcattgaggatttgcaagaaccatactctgctgtttataataccgattcttctgcagaagcatctagaagagaagcccttttagtaaaacatgtgaaagaaaagctgagggagcagggttttggagaggagagcatcaggacagattcatacttgaatttgaggtatgagggaactgatacagccataatggttagacagccagagcaaggatctggaaatgactatgctgatgagtttgaaaaattatttcagcaagagtatggcttcaaattgctaaacaggaaaatactcatatgtgatgtgagagttcagggtgttggtactacaaacatcctgcagcctcgtgaactgacgcaaatatcaaccaaacctgtgcaagaaagttcatgccggatttatttttcaagtggatggcaagatactccgctgtacaagcttgagaatttgggttatggccatctattggagggtcctgcagttattatgaatgggaatagtactgtgatcatagaaaaagactgtaaagccataattacaaagtatggtaacataaaaatagatatcaatgcagctccaagcactgtatcgatatcagagaaagttgcagatgtggtccagctttctattttcaatcaccgattcatgggcattgctgaacagatgggtcggacacttcaaagaacttcaatttccactaacataaaggaaaggctagacttctcttgtgctctctttggtccagatggcggccttgttgcaaatgcacctcatgtccctgtgcatctaggagccatgtctagtactgtgtgttggcagcttaacttttggggtgagaacctcaatgagggtgatgttcttgtaacaaatcatccatgttctggggggagccatcttccagacataacagttgtcacaccagtttttgatcacggtaagcttgtcttttttgttgctagtcgaggccaccatgctgagattggtggcatcacgccaggaagcatgcctcctttctcaaagtgtatttgggaggaaggtgctgccatcagagcatttaaacttgtcgaaaggggtgttttccaagagaaaggaataatccagctgctgcagtcaccttgctctgatgaacttgctggctataagatcccaggaacacgtaggatccaagataatctttccgatctccgtgctcaggttgcggcaaaccagagaggtatagcacttatcaaagaactcataaatcagtacgggttgatcactgttcaatcatatatgaaccatgttcaaaagaatgctgaggtagctgtcagggagatgctcaaaacagttgcgtctagagttgcaaaggagaatggatcatgtgttgtcgaggatgaagattatatggatgacggctctgtcattcacttgaaactcacccttgatgctattaaaggtgaagctacaattgacttcgagggtaccagtcctgaggtctatggcaactggaatgctcctgaagcagtcacaacagctgctgtcatatactgcctacgctgcttggtggatgttgatataccactaaatcaaggctgcctagcgcctgtgaagatcctcattcctaagggctctttcctctcaccaagtgacaaggctgctgttgttggtggcaatgtgctgacgtctcagagagtgaccgatgttatcctaatggcgttccaagcctgtgcctgctctcagggctgcatgaacaatttgaccttcggggacgacaccttcggttactacgagaccatcggaggtggatgtggagctgggccgacatgggacggcactagcggtgttcagtgtcacatgacaaatacaaggatgactgaccctgagatctttgagcagcggtaccctgcccttctgcacacatttagcatcagggagaacagtggaggttctggtttacacagaggtggtgatggccttgtaagggagattgagttccggcggcctattgttgtgagcgttctatctgagagacgggtgcatgctcccaggggactcaaaggaggacgagatggagatcgtggtgcaaactatttagtcagagaagatggtagaaagatttaccttggaggaaagaacactgtaacggtcagtgctggtgatatccttcagattttcacgcccggtggcggtggctttggctgtccttgatggcacttcctgcagacgcggaccttcctccatttgtttcctacctttgtacaccagtagctctatttagatcgcgattaaaataaaacgtaataaaaccgccaacaactggagattccttatgctattgttgctccccgaggcattggatccgaatgcagcatgaatggtgctattgtttatcagatatcatttatgtgaaaccagcaatcccaaaattggtgatgaatgatgcttgctctttcttcttgttttgatattagtcggaaattgccacgctaatcttcttatcgtttatattaaaca

SEQ ID NO: 93030 - DNA, 246 bp, Zea Mays
aggtatcaggtcttgggtatttttctgttgattcagttgtgtattattggagctgaaagacttggaagaagtaatatatcggcaatagctagttccattaatcaaatatcatctggaagctatccatcgactacaggtcagagcatccatcttctaaatgaaggtggaaatatagtcagtatcatccgcagtggtaaagctgcagatatagcttctcattcagaggtatctgctttgtcaaataaa

SEQ ID NO: 93031 - DNA, 1803 bp, Zea Mays
cttcctgaaccctgtgtcgctcacggaaccacggtcctagcgccgccgcgagagtcgtgacgacacatggcggccgcactcctgccggagacggcgccacggctgctgacgccggagacgctccgcacggcggcgaagcagtcccagggcatccacctcgtccccctctccctccgccgcgccatcaagcgctacctccgcgaccaggacagggcgcacatgaaccgcaaggtgctgctgctctcggcgtccttcgaccgcgccaagggcaccggagccgagctagccgcggccgccactcgcgccgcgctcctcgacgaccccaacgcgccgtcgggcgccgagcagcggtcggcgcgctggaaggtgcggtcggcctacggcgatattggcctccggtaccgcgaggacgagacagttgcctacgtcgcgtcacgcatgccagccatctacgccgcgtgccaccgcgtgctacgcgaggttagacgaaggttgccagagtttgcgcctgccaaggtgttggattttggcgccgggccaagttcagctctttgggcaatgagggcagtgtggccaaaatcaatagagagggttaacctggtcgagccttccaaggaaatgcaaagagcagggcagagtcttctcgacaatctgaaggggttgccacttattcacagctatgacagcatccaagagttgaaccgcaaaatagaaaaacatgagcgaggccatgatcttgtagtatcatcttatgcacttggcgagattccttctttgagtgaccgaatcacaatagtgcgccagctttgggacctgacgagtgatgttttggttttgttagagcctgggacacctcaaggagcaaagatcataagtcaaatgcgctcttatattctttggatggaaaaaagaaagtgtcgcaaaattgaaaaatcctcaagccgtcctccaagtagcatgaagagtatcgtagcacaaaaagtctcattgaaaaatgggtcttttgtggttgccccttgtcctcatgatggtcgatgtcctttggagaattcagacaagtactgccactttgtccagagattggagaggacgtcatctcaacgtgccttcaagaggtcaaaaggtgtgcctttacgtggttttgaggacgaaaagttttgctatgttgctttaagaagaggcaaacgcccagaggaagcttggccgcttgatgacttgaactttgagacacttaaagaacgcaatgccaagagaaagccagaagatcttgtcatcgactatgacgaccaatttccaagcgaggaagacgaagaggttcatgtcgatggtggggacagtctggtaccatatgcttcagatgaacatgaattaagtcttttccatgacagtgaagaagcagaggcggaacaaacggttcgtgctgaccttggaggaggttggggccggattatatacagccccatgcgaagagggaggcaagtacaaatggatgtatgccgttccaccaaacgggacgcatccgaaggcacatttgagcgtgtagttgtcacccgaagcaagaaccctaccttgcattttcaggcccgtaagtcactttggggtgacctctggccattttaaatcagtatcctcaagtttggttaaagccatattgttagggaaaattggctgtgtaccctaaaccctaaaagattgcatctttggagatgaaccattaaaagaactcttctttgttatgtatcatggaaagattacatttatttgaatctcaccacatctgagaagtctcagttaaacaggaga

SEQ ID NO: 93032 - DNA, 2043 bp, Zea Mays
cttcctgaaccctgtgtcgctcacggaaccacggtcctagcgccgccgcgagagtcgtgacgacacatggcggccgcactcctgccggagacggcgccacggctgctgacgccggagacgctccgcacggcggcgaagcagtcccagggcatccacctcgtccccctctccctccgccgcgccatcaagcgctacctccgcgaccaggacagggcgcacatgaaccgcaaggtgctgctgctctcggcgtccttcgaccgcgccaagggcaccggagccgagctagccgcggccgccactcgcgccgcgctcctcgacgaccccaacgcgccgtcgggcgccgagcagcggtcggcgcgctggaaggtgcggtcggcctacggcgatattggcctccggtaccgcgaggacgagacagttgcctacgtcgcgtcacgcatgccagccatctacgccgcgtgccaccgcgtgctacgcgaggttagacgaaggttgccagagtttgcgcctgccaaggtgttggattttggcgccgggccaagttcagctctttgggcaatgagggcagtgtggccaaaatcaatagagagggttaacctggtcgagccttccaaggaaatgcaaagagcagggcagagtcttctcgacaatctgaaggggttgccacttattcacagctatgacagcatccaagagttgaaccgcaaaatagaaaaacatgagcgaggccatgatcttgtagtatcatcttatgcacttggcgagattccttctttgagtgaccgaatcacaatagtgcgccagctttgggacctgacgagtgatgttttggttttgttagagcctgggacacctcaaggagcaaagatcataagtcaaatgcgctcttatattctttggatggaaaaaagaaagtgtcgcaaaattgaaaaatcctcaagccgtcctccaagtagcatgaagagtatcgtagcacaaaaagtctcattgaaaaatgggtcttttgtggttgcccctgtaagttgggatcataaatactgtatttatttctccaatactactaacttcaatttcacgaaagggcttgtagcctagtggttgtaatgccttagtagttattggcaccccagtggcttgggttcgactccagagcgaatttctggggctagattgagagaaacacccgtcacccctgctgttcgcctgttccagagatataagtggcctgcaagtgggtcttagttacctcctggacagatgctctgtggtaggcaggcattttgggtgttttcttggtcctgcagcgagaaagtttctgttatcaatacctgtggtcgtctttctcccagggctgagtttttaataattccaatctccatctcagtgtcctcatgatggtcgatgtcctttggagaattcagacaagtactgccactttgtccagagattggagaggacgtcatctcaacgtgccttcaagaggtcaaaaggtgtgcctttacgtggttttgaggacgaaaagttttgctatgttgctttaagaagaggcaaacgcccagaggaagcttggccgcttgatgacttgaactttgagacacttaaagaacgcaatgccaagagaaagccagaagatcttgtcatcgactatgacgaccaatttccaagcgaggaagacgaagaggttcatgtcgatggtggggacagtctggtaccatatgcttcagatgaacatgaattaagtcttttccatgacagtgaagaagcagaggcggaacaaacggttcgtgctgaccttggaggaggttggggccggattatatacagccccatgcgaagagggaggcaagtacaaatggatgtatgccgttccaccaaacgggacgcatccgaaggcacatttgagcgtgtagttgtcacccgaagcaagaaccctaccttgcattttcaggcccgtaagtcactttggggtgacctctggccattttaaatcagtatcctcaagtttggttaaagccatattgttagggaaaattggctgtgtac

SEQ ID NO: 93033 - DNA, 1683 bp, Zea Mays
gatgaatccaggtcctgtcgtcctgacatggagttcgatagtacgtgttcttctcccgttagttgtcgctgctgcggtcccacataggattgctggtgagcaaaatgtacgacacggcaaagactattgtgcttaaccttgtatacctgttggaaaaatatggtttcgttccaaatggtgcaagatcctactacactaaccgaagccaaccaccacttttgagctccatggttttagaaatatacagggcaactggtgatgtggagtttgttaggacagtattccactctctgcttaaagagcatagcttctggatgtcagagattcataatgttgctatagcagacaatcatggtcgggtccataatttatctcggtatcaggccaggtggaacaaacctaggcctgaaagtgcgacaattgatgaggaactggcttcgaagttgaattctatggcagctaaggaaaaactgtactgcgaaattgcttcaacggcagaatcgggatgggatttcagctctcgatggatgaggaattctactgacatgacaacattggcaaccacttacataatacctgtggacttgaacacatttctttttaagatggagctggatattggtgccttggctaaagtcgtaggagataatgcgacttcagaattttttttaaatgcttcgaaagcacgtcatattgcaattgactctattttgtggaactctgagatggaacagtggcttgactattggcttcctggtgatgcagactgtcaggaagtacacgaatggaagcctaactcacagaaccgcaacatatttgcttccaacttcgttccgctgtggctaaatgcataccattccgaattcgtacgctttgctgatgaggcaaaatcaaacagagtcatggcgagcctcaaggcatctggattacttcatgccgcagggatagcaacttccctgacaaacacgagccaacaatgggatttcccgaatggatgggccccactgcagcatcttatagctgaggggctgctgcattctggatcagaggccaaaaaactagctgaggacattgctacgaggtgggtgagaacgaactacgccgcttacaaagcaacgggtgcgatgcatgagaagtacgatgttgaggcttgtggagaatctggaggcggtggagaatacaagccccagactggttttggctggtccaatggcgtggtgttgtcattcttggaagaattcgggtggccagagggcaaggaaatagcttgttgagcggcgaagcgctcacgacagggtggatctggtcttgccggagagcaatctggttaggcatcgttcatgtcacacatgtctagctacgagagtggcgcattgccttctgcagttcgtcaagtgcgtttgtgtgttcttgtttgcttttagttgcgactaggctgtagatccttcttgtatcacaacaatatatgtactgctactgtaccggccccggcctcttgtttaatctgaaatgctcattgtatatcctcttacgaaacgcaaacacgtgctttggcacgttcgtcgtcgaaaagagaagagaatataccattttgctctcttgaatacaaaatcagtgcatcgttctagatctcgcccacagggcgtggactggcagactgttggccccttttctgttcaaata

SEQ ID NO: 93034 - DNA, 2443 bp, Zea Mays
atgtgccacttgtcgaatcgaccggtcccccccaccacaacaccttttgcactcccccacccacccacacaccacgctacaccagtaggaatcgcgggagacgctcgtcgtcctcagtcctcaccgtcgtaaccgtcttcggacctcccacgccaacgcgctcgtcgtagccagtagccccaccaacacgtgcgggtgcggcacaccacgtaggagcttcctttaaaacctcgtcggatggctgggctcccgccgcaaccccagcacgtccacgccctccccctcctcctcctcgtcgtcctcccctgcctcatcccctgtctccgcgcgacgaccgagatggcgccaaccgccgccaccgccggcgcatccgacgagggcgccagcgcgctgctcgggctcctgcagcgggtgcagtcggaggcgctgcgcacgctggggcctcacgacttcgaccccaagttctacgtcgacctgccgctggcgaccgacgagcgcgccgcggcggccgcccttgcggcgctgccgcgcccgtcgccgtcgcgggcggagctagacgacttcctgtcccgctacttcggggaccccgggtccgatctcgtggcggacgtcccaccggatttcgagcccgagccgcgcgggttcctgccccacgtccacagccccgaggcgcgggcgtgggcgctggaggtgcacgcgctgtggaagcgcctggcgcggcgggtggcgcccgacgtcgcggcgcggccggaccggcacacgctgatgccgctgcccggcagggccgtcgtgccgggatccaggttccgggaggtatactactgggactcctattgggtcatcagaggattgctggtgagcaaaatgtacgacacggcaaagactattgtgcttaaccttgtatacctgttggaaaaatatggtttcgttccaaatggtgcaagatcctactacactaaccgaagccaaccaccacttttgagctccatggttttagaaatatacagggcaactggtgatgtggagtttgttaggacagtattccactctctgcttaaagagcatagcttctggatgtcagagattcataatgttgctatagcagacaatcatggtcgggtccataatttatctcggtatcaggccaggtggaacaaacctaggcctgaaagtgcgacaattgatgaggaactggcttcgaagttgaattctatggcagctaaggaaaaactgtactgcgaaattgcttcaacggcagaatcgggatgggatttcagctctcgatggatgaggaattctactgacatgacaacattggcaaccacttacataatacctgtggacttgaacacatttctttttaagatggagctggatattggtgccttggctaaagtcgtaggagataatgcgacttcagaattttttttaaatgcttcgaaagcacgtcatattgcaattgactctattttgtggaactctgagatggaacagtggcttgactattggcttcctggtgatgcagactgtcaggaagtacacgaatggaagcctaactcacagaaccgcaacatatttgcttccaacttcgttccgctgtggctaaatgcataccattccgaattcgtacgctttgctgatgaggcaaaatcaaacagagtcatggcgagcctcaaggcatctggattacttcatgccgcagggatagcaacttccctgacaaacacgagccaacaatgggatttcccgaatggatgggccccactgcagcatcttatagctgaggggctgctgcattctggatcagaggccaaaaaactagctgaggacattgctacgaggtgggtgagaacgaactacgccgcttacaaagcaacgggtgcgatgcatgagaagtacgatgttgaggcttgtggagaatctggaggcggtggagaatacaagccccagactggttttggctggtccaatggcgtggtgttgtcattcttggaagaattcgggtggccagagggcaaggaaatagcttgttgagcggcgaagcgctcacgacagggtggatctggtcttgccggagagcaatctggttaggcatcgttcatgtcacacatgtctagctacgagagtggcgcattgccttctgcagttcgtcaagtgcgtttgtgtgttcttgtttgcttttagttgcgactaggctgtagatccttcttgtatcacaacaatatatgtactgctactgtaccggccccggcctcttgtttaatctgaaatgctcattgtatatcctcttacgaaacgcaaacacgtgctttggcacgttcgtcgtcgaaaagagaagagaatataccattttgctctcttgaatacaaaatcagtgcatcgttctagatctcgcccacagggcgtggactggcagactgttggccccttttctgttcaaata

SEQ ID NO: 93035 - DNA, 2330 bp, Zea Mays
atgtgccacttgtcgaatcgaccggtcccccccaccacaacaccttttgcactcccccacccacccacacaccacgctacaccagtaggaatcgcgggagacgctcgtcgtcctcagtcctcaccgtcgtaaccgtcttcggacctcccacgccaacgcgctcgtcgtagccagtagccccaccaacacgtgcgggtgcggcacaccacgtaggagcttcctttaaaacctcgtcggatggctgggctcccgccgcaaccccagcacgtccacgccctccccctcctcctcctcgtcgtcctcccctgcctcatcccctgtctccgcgcgacgaccgagatggcgccaaccgccgccaccgccggcgcatccgacgagggcgccagcgcgctgctcgggctcctgcagcgggtgcagtcggaggcgctgcgcacgctggggcctcacgacttcgaccccaagttctacgtcgacctgccgctggcgaccgacgagcgcgccgcggcggccgcccttgcggcgctgccgcgcccgtcgccgtcgcgggcggagctagacgacttcctgtcccgctacttcggggaccccgggtccgatctcgtggcggacgtcccaccggatttcgagcccgagccgcgcgggttcctgccccacgtccacagccccgaggcgcgggcgtgggcgctggaggtgcacgcgctgtggaagcgcctggcgcggcgggtggcgcccgacgtcgcggcgcggccggaccggcacacgctgatgccgctgcccggcagggccgtcgtgccgggatccaggttccgggaggtatactactgggactcctattgggtcatcagaggattgctggtgagcaaaatgtacgacacggcaaagactattgtgcttaaccttgtatacctgttggaaaaatatggtttcgttccaaatggtgcaagatcctactacactaaccgaagccaaccaccacttttgagctccatggttttagaaatatacagggcaactggtgatgtggagtttgttaggacagtattccactctctgcttaaagagcatagcttctggatgtcagagattcataatgttgctatagcagacaatcatggtcgggtccataatttatctcggtatcaggccaggtggaacaaacctaggcctgaaagtgcgacaattgatgaggaactggcttcgaagttgaattctatggcagctaaggaaaaactgtactgcgaaattgcttcaacggcagaatcgggatgggatttcagctctcgatggatgaggaattctactgacatgacaacattggcaaccacttacataatacctgtggacttgaacacatttctttttaagatggagctggatattggtgccttggctaaagtcgtaggagataatgcgacttcagaattttttttaaatgcttcgaaagcacgtcatattgcaattgactctattttgtggaactctgagatggaacagtggcttgactattggcttcctggtgatgcagactgtcaggaagtacacgaatggaagcctaactcacagaaccgcaacatatttgcttccaacttcgttccgctgtggctaaatgcataccattccgagtcatggcgagcctcaaggcatctggattacttcatgccgcagggatagcaacttccctgacaaacacgagccaacaatgggatttcccgaatggatgggccccactgcagcatcttatagctgaggggctgctgcattctggatcagaggccaaaaaactagctgaggacattgctacgaggtgggtgagaacgaactacgccgcttacaaagcaacgggtgcgatgcatgagaagtacgatgttgaggcttgtggagaatctggaggcggtggagaatacaagccccagactggttttggctggtccaatggcgtggtgttgtcattcttggaagaattcgggtggccagagggcaaggaaatagcttgttgagcggcgaagcgctcacgacagggtggatctggtcttgccggagagcaatctggttaggcatcgttcatgtcacacatgtctagctacgagagtggcgcattgccttctgcagttcgtcaagtgcgtttgtgtgttcttgtttgcttttagttgcgactaggctgtagatccttcttgtatcacaacaatatatgtactgctactgtaccggccccggcctcttgtttaatctgaaatgctcattgtatatcctcttacgaaacgcaaacacgtgctttggcacgttcgtcgtcgaaaagagaagagaatataccattttgctctcttgaatac

SEQ ID NO: 93036 - DNA, 678 bp, Zea Mays
gaccacacaccatagaagaggcgaagcagacgacccaaggaggcggttccccggcgtggatcgacgtgcctgagcggagcaagagcgcgttcatggagctgaagcggaggaaggtccaccggtatgtgatcttcaagatcgacgacagtagagaggaggtcgtcgtcgacaagatcggcgcgcccggggagagctacgacgacttcacggcgtcgctaccgaccgatgattgccggtacgccgtctacgatctggatttcgtaagcgacgacaactgccggaaaagcaagattttcttcatctcctggtctccttcagattctcgcatccgtgccaagaccatatatgccgtgtcaaggaaccaattccgtcatgagcttgacggagtgcacttcgagatccaagccaccgatcccgatgacatgaatctagaagttctcagggggcgtgctaacagaacctgattcactagcgagcaacccaaaatgcagctcggaggtcgctgatctgatgaggcatgacgtagaagtataggctgccgatcacacccgggcatgcattgtttctttttacttcttcctttccttttggagttatacttccgtgatgtttgcctaactacataggttccctctaatatgatgtggactgtggaacctttccttgttttacatataa

SEQ ID NO: 93037 - DNA, 872 bp, Zea Mays
cctccgccgccgcccacggatcaacgccacgccaccacgccggaagaccgggatcgtgacggccacatggacatggctacggcggccgccgcgttgccatgggtttgtccccattcctcatcttctttcctattaacccccgcggccccgcccctgctttccttgctcgcgctttaggtagaatacatacatatcttctgctcagacaagttcgaccgtccatggaggttcttggtttcgcggcaatgggaggcggttccccggcgtggatcgacgtgcctgagcggagcaagagcgcgttcatggagctgaagcggaggaaggtccaccggtatgtgatcttcaagatcgacgacagtagagaggaggtcgtcgtcgacaagatcggcgcgcccggggagagctacgacgacttcacggcgtcgctaccgaccgatgattgccggtacgccgtctacgatctggatttcgtaagcgacgacaactgccggaaaagcaagattttcttcatctcctggtctccttcagattctcgcatccgtgccaagaccatatatgccgtgtcaaggaaccaattccgtcatgagcttgacggagtgcacttcgagatccaagccaccgatcccgatgacatgaatctagaagttctcagggggcgtgctaacagaacctgattcactagcgagcaacccaaaatgcagctcggaggtcgctgatctgatgaggcatgacgtagaagtataggctgccgatcacacccgggcatgcattgtttctttttacttcttcctttccttttggagttatacttccgtgatgtttgcctaactacataggttccctctaatatgatgtggactgtggaacctttc

SEQ ID NO: 93038 - DNA, 790 bp, Zea Mays
gattccaactctgcgagaaaagctaaaataatcggacccatctcttggaccgtgcgatcgcccccctccgccgccgcccacggatcaacgccacgccaccacgccggaagaccgggatcgtgacggccacatggacatggctacggcggccgccgcgttgccatggggaggcggttccccggcgtggatcgacgtgcctgagcggagcaagagcgcgttcatggagctgaagcggaggaaggtccaccggtatgtgatcttcaagatcgacgacagtagagaggaggtcgtcgtcgacaagatcggcgcgcccggggagagctacgacgacttcacggcgtcgctaccgaccgatgattgccggtacgccgtctacgatctggatttcgtaagcgacgacaactgccggaaaagcaagattttcttcatctcctggtctccttcagattctcgcatccgtgccaagaccatatatgccgtgtcaaggaaccaattccgtcatgagcttgacggagtgcacttcgagatccaagccaccgatcccgatgacatgaatctagaagttctcagggggcgtgctaacagaacctgattcactagcgagcaacccaaaatgcagctcggaggtcgctgatctgatgaggcatgacgtagaagtataggctgccgatcacacccgggcatgcattgtttctttttacttcttcctttccttttggagttatacttccgtgatgtttgcctaactacataggttccctctaatatgatgtggactgtggaacctttc

SEQ ID NO: 93039 - DNA, 899 bp, Zea Mays
cccagcgccgtcgccgttcgttctccatcactatgtctcctccatcccggtcgccttctcctctatctccgtcgcgttctccatagccgggcgccgctgcctccgaccaagagccgccgtccgcattaacccgtcagtcaggtctcctccatccccgtccggatcccaggtcgcccccttcggtccagctccgttccgtggcgctcggcctctgttcccctgcgcacctgctccagatggatttccccaggcagtcgccggcctgcagctcgccccagcccccgcccggatctcggccctgcccagctccctggccgacgccgcagtctcctggccgtccatggccgcgttcctctccccctcggctcgtcggggttgctcggtctcggttccagtgccgcgtcccagtccctgtgctcgcccatgccgcgcgccctccagttccatggccgcgcccctggtggccgagctccatccctgcccctcttcccctcagcttgcctgtttcagctcggatttagtccagccgcgtctgctcccgtcgtcgcatgcctctgcccatggccgttgccttctccctgctcaggatcgtgctcgcgagttctctctgggcccatggccgttgccttctccctgctcaggatcgtgctcgcgagttctccctgctgtctcctcgcacttccacttgagaagtcccccagaaacaacaacctcagtgtttggtggcaagaaccgatgactccaagaaacagggtatgtaaggggtaataaccacatagccattttcaagagtgcagagaccatgcagttcctgagtatccatgttatatgatacaagtttctggttccagtgctgaacaaggatgaacgaattgtgatctggatgaatgaccacaata

SEQ ID NO: 93040 - DNA, 546 bp, Zea Mays
atgtcatcggcggcttccaatccatcagctcaaccagcagtggacaagcaaccacttaagcggaatagcgatgacatagggtgggagtatggaactattgtcaatccaaatgattggaatgtcataaaatgcaagttatgtcctatggttgtcaaggctgggatttataggcttaagctgcatattgctggtagaaaagggcaagtccgagcatgccccaatgcaactcttgtagcaaccgatgcaacttttgctcaaggatggatggttgatggtgctgagaaggatgaagaagggtctgatgttgagccggtgaccggtctcacatggaaattgattgctgagacatgtggtgctgaagaggtcacaaaactacgtaggagtgcaagattgactgttgaaagagaggttgaagacacaccgctgtctgaaactgaaagtgaagaagaagcaccacaagaggaagatgttgactttgagtcggatcaagatgatgtgatcacagctggatatgagctagatgcggaggaagacaatgatggctga

SEQ ID NO: 93041 - DNA, 549 bp, Zea Mays
ggttcaggttgcagtcatgaattctgcatcaaatgtgctctctacctctgctcaaccagcaacatccgtgtcgagttcacaggcccacctgggtccatcccgtgccctctttgtcggaacggcataatgtctttcaccaagttaccaagcacaccaacagaagggcttaaatcaggttcagcgctcacattctgcaacccatgcatactgaacgcccggtccatggactcgccagccactttctccaaagctgaaatcagacggaaccgtgtggcagctgtctcttcggagctggtctgtccaatcacctgcagcccattcccgtcgtccgccctcccaacctgcaggtgcagcgacgacgatccatgcggcgatacagacgtgcaggatggtcccgagttccagtctccccggccctcgcacagcgcaagcatggagctggacaagaggggggagggggatctagaccgggccagttgctcaggcatgttctggagccgaagaagctgtcacagggagcagcagtgtgatgcggagatcaacgcttga

SEQ ID NO: 93042 - DNA, 880 bp, Zea Mays
gtcgcttcctccctcttcctccggagctgcgaaattttgagacccagccgggaaagcggaggcggagactacccaccccaccaccagccccccggaattcgcgcaaatcacagaagctccctagccgccggcgagcactcgtgcgctcccctggaagcggcggaggcggcggcggagcccgcctctctgccggcgccggcgatgggcaactcactggggtgctcggcttccggcgagcggctcgtctcggcggcgcgcgacggggacgccatcgaggcgcggatgctgctggagctcagccccgcgctcgcgcgctactccaccttcggcggcctcaacactccgctacacttcgccgccgccaagggccatctcgacattgtcacgatgctgctggagaaaggcgctgacgttaacgcgcgcaactactgcggccagactgcgctgatgcatgcttgtcggcatgggcactgggaggtggtgcagatgcttcttctatttagatgcaatgttactagggcagattacttgagtggtcgaacagcactgcattttgctgcacatgatggatttgttcggtgtattaggcttttagttgcagactttgtcccgagtgtggccttggaggatattgcttcttctgtggtggatggtggtgattgccagacaaacagtgggagcagtcctaattcatcgtcggggcagaagtttaatgaatcggcccgtgtgaggtacatcaacaaacctgcagatggtggtgttacagcacttcacatggcagcattgaacggtcacttagattgcatgcagttgttgattgacttgggcgctaatgtctcagctgtctcattcccctatggcactactgcaaatttgatag

SEQ ID NO: 93043 - DNA, 2249 bp, Zea Mays
ctcccagcttttgccattttggcgaccagctccaacaaccggagagggggagagagagagagctcgagtcacaaagctaaaaaaagcaccgagaaatctagtggtgcagcgagcgaatccgtccggccgtccccttcctccgccacccatccccaaaattttcaccgcacgtcgcctccccgcgacgacgacgcccgaagcttccagggccctcccctcccccccgcggccgcccctccctagatcgccgcctccggcagcggcgaggctgcatcgcgagggcggcggaggagccgggcgacggggtcgacgaaggcggggaagacgaggctagggttcggggtcgctgctgctgggctgcgtctgagggaggaggatgcatatgatgcggcggctcaagagcatcgcctccggccgctcgtcggtctccgatccgggtggtgactctggctccaaaagaccaaagtttgagcaggatggagcaggagatattgttatggagccacacttaaccgaggataaacctgtgcggatagaccaagaatcatcgtcaacatctaatagggatgctgaggcaagcacatctactagcatgaaacctgttaaaactgaagaagcaggagcagatcttcttcccaaagagatgaatattatgacaattagcgacgataaagctgatggccataatgataaggaaggtgagggtgttacacttgatgggactggaacagagacagggcagataattgtgacaacaataggaggtcacaatgggaagccaaagcagaaggtctcatacatggcagaattggttgttggtactggttcgtttggtattgttttccaggcgaaatgcttggaaactgacgagacggtggcgataaaaaaggtgttacaagataagcgctacaagaatagagagctccagactatgcagttacatgaccacccgaatgtagttcagctgaagcatcacttcttttcaacaactcaaaagggagaagtttacctcaaccttgtacttgaatttgtatccgagacagtttatcgtgttgccaaatactacaaccggatgaaccagcgtgtacccataatatatgttaagttgtatgcatatcagatgtgccgtgcgcttgcttacatccatcgagttgtcggtgtgtgtcatcgtgatattaaacctcaaaatctactggtcaatcctcatacacatcaacttaagatttgtgattttgggagcgctaaaaaattggtccctggtgagcctaacatatcgtacatttgctcgcggtattatagggctcctgaactaatatttggagctacggagtataccactgcgatcgatatctggtctgttggctgtgtagtggctgagcttctgattggtcagcctttgtttcctggtgaaagtggtgttgaccaactggtggaaataataaagattttgggtactccaacaagagaggagatcaggtgcatgaatccaaattattccgaattcaagttccctcagataaaagcccatccatggcacaagctttttggtaagcgcatgccacccgaggctgtcgatctcgtgtcaaggctgctccagtactcaccgaacctgcgctgcactgctgtcgacgcctgtgcccatccgttcttcgatgagctgcgggaccccaaggcttgcctgccgaacggacggccaatgccaccgttgttcgacttcacagcagccgaactcgaagggctccccgccgagcttgtccaccggatcgttcctgaacacatgaggaaggaagtgaattaggtggacggacgtactggggcaaaaaaaaaaaaaaaactccctgtttctctgttggttctgagagatgtgtgagggcacggatatggaggagcggtggtgtattgtaattgtaaagagggctgaaagaaaggtccctctggttgggcgtgtcaccaaagagtggccctagaggcaaaccttacgtttgctcgttgcccttggtgtgtacccagatgtgtatcgatgacataggctggctgctgtatcatcatcagggttgacgctgaacaagagaaattcaagcagggtgctgctagctcgcttcctcccgtagctggaaaccccagaatgccagtttccatcactgcacgtcgtcgcgctgtccactggtgtcccgtaagcatatagagctctgccggctccgctattggcttgcgtgtgtctatcgataatgacttctacggacgctacc

SEQ ID NO: 93044 - DNA, 672 bp, Zea Mays
tttcctccgcctcgccctcgtatcttcctcccctcctcgatcgccgctccggccatggcgaacgacgggtcgcagagcgcgcgcggcggcggcggcggcaggaggtgctgctgcggcgccctcacgcgcgtggacctcctggtcttcctcctcgccgcggcgctctgctccgcgtcctactgcctcggggtatggcacaacagccgcggcgccgcggacagccgggtcctggcgccgagcgccggcgccaacacctactgcggggacgacgcccgcgagccgctcgacttcgagacgcgccacgccgccgaggacgccgggctctccgcgcctactactacggcggcggcggcggggacgacgagcacccggcgggcgttgcgcggcgccgcggacggcggcgtccgcgtccggctcacgggcgccgtcgccgtccgagcgtaggtccgcgccatgtgcacgtggcctcggcgcgcgtcgctccggacgtcggagttggagcccccccaccccacgccgtgttcccggctccggcgctcgatcccaatgaagttccggggtcgtctgttgcatttggtggggcgcgagtttaccgtctagtccttcttggctgtttttcagagttttcgatcattccaggggatttatgtgaacatttccttttccgtgata

SEQ ID NO: 93045 - DNA, 501 bp, Zea Mays
atggggttccttgctttttggagcgtttccccagtcggatcggcggcagagcaggtcacgtggacggggctccttgttgctggaactaaataccgtggagagtttgaatgcactggtgccacaacactggatgggtataggaagcatatagagaaagatcctgccttggaaagaaggtttcaaccagttaaggttccagagcctactgtggatgaaacaatacagatcttaagaggacttcatgagagatatgaacttcatcacaaactgagatacacagatgatgctttaattgctgctgcacaactgtcttatcagtatatcagcgatcgttttctgcctgacaaagccattgacttgattgatgaagctggatctcgtgttaggctgaggcatgcgcagctccctgatgaagccaaagagctggacaaagagctgcggcagataagcaagcagaaaaataaggctgtacgtggccaagattttgagaagaatctgtag

SEQ ID NO: 93046 - DNA, 96 bp, Zea Mays
acgttggagttaccaatagagactgtatggttttagatgccttcaccctttctgcagaaacttcagctagctgcgcctgcaaagctttctatttgc

SEQ ID NO: 93047 - DNA, 243 bp, Zea Mays
atggacgacaaccgatgtctccctacacctggtgcccagtttcagtccactggatgcataaaccgtttccagaattctgttaaggccagctgttggagtgcatctctttgcacaatgaaaaatgacagctgtaggggtatgggaatggaggtcgttggtcctaaagcagcaccagcagaggtcaaagtatctgatgatgtgaatctattccaacagaaggaaagcaaatgcaaaagaacgtga

SEQ ID NO: 93048 - DNA, 2180 bp, Zea Mays
aacgaacgaactgggccttacacacatattagccaccgaaattacaacacttcacacgatcgctctgccgcatcacgcaactctgtccaccgctctgccgcacttcacttcatagaggctatgaaacaggacgatatctttgtacaggttaccgtgcaccttcacactatcgcttcaccgctagctgcttcagagatcatcaatcatcacgctacttcctgctgaacaggctgcgaagcctaccgcggtccagcttctcgagcagcttcctcgcgccggccacgtccttctccgagagcttcttcaggtacccgatggcgccgtgagagaccatcagcttcttgcaccgcttgctcgccgaaagcgccagcaggcaggagatggcgtacttcttggccgtgttctgggggctcgggtccagcagctgcaccaggttgggcacgctcttctcgtccttcttgacgtccctcgcgttcgcggggcaccccatcaggctcgccaccgcctgcgccgcggcctcgcgagcgccgttcgacttggcctccagcaggcgcaccaggagcaggacgcacccgtgctcgcccaccagccgcttcatgtccatgctgccggagaccttgcagatggtcgccgcggcagcctgctgggcacccacggaaccgtcgcggagcacgtgtgcgaggcgcgggagcacgcaaagtgacaccaggctgtcaggtgggacaacggtgaccaggttccggagcgcggccacgggtggctcctgcggcagtggcccgtcgaggtaggcgagcaggctacggaggccgccctcggacacgacggcgcgccgcaggttgtcgttgcttgacgtgaggttctgcaggcactccgcggcgtactccttggagccgagaacgacgccggagtcgaggatgttgatcatgactcgcaccacgccttcctcggccagcgcttgccggacttctggcaccgcagagatgttcttgagcgctcccgacgcggcggactgtgtgatcgagtccccggtctggcacatgtcgatgagagcgcggaagccgctgtggccgacgatcgcacgggcaatgtcggccgacatggacagccgctgcagcgtgatgacggccttctcccgcccaacaaggctaccggactcagccagccggatgagcggtggcagcgcgccttctgacaccagtaagccctcgcagctgccagactcggcgagcaagcacaaaacagtggcggccttctccctaaccttgggtgtcgtcgccgtgagcagctgcacgagtgcggccacgttgccacggccgagcgccgacagcacgctcttctcgtcctcgcgcagagcatcgagcaggccatccacagcccggtgcttcgcctctgcgtgcccaatctgcagcctggcaagcagctcccgcacgtccacctgtgcgccagcagccgacgctgtctcagccggggccgcgggaaccgtcgcgtcagacaacacaccagtcttgacaagaagagagcaatccctgaggttgagatccagcttcccggccagcgcgtcgaggtcgctctgcatctgcagcttccccgccttcggaggctcgtggcagcgcgcaccgagctcggcggcctccgctagcgttgcagccaccgactgcaacagctcccgacagagcgagttcttggagaagcaggggtggctagacaggtccgacaggcactgcggcagcctccccagcctcgctgcgatagccttccaccgcccaccgaagccagtggccgcgcgcgcagcggccagggcgggtggcaccagcccccgcgcccgttcaagcagctcctctgccgtcgcgcccccggccacggccggacagctcccaaagctcatttcttggcagctaggacaccagaagctgagccatgtcctgcggttacctctctcaccgatgccggtcgtgtcgccgcccgccacccctcctcgcccaccgccactttccggcggcctccacctcctcctcccggcgccgctcgccgcgacgcagagtccaaccagaggtagattggctgcaatcaggacgcgtggacgccgatcatcaatcaaacgacaaccatcctgggaacgccgctgcgcgcgtgggcgttgttgctcctactcgatcgctgcatgattgggaggaggatct

SEQ ID NO: 93049 - DNA, 186 bp, Zea Mays
atgctggtgatcgacctgggcatatggctcatcccgctggcgctcgtcctcgtcccgtgccgccggatcgcgctcctcctgtcgaggctcgaggagctcggccggagcgtgacggggccgaggctccccacggcggacatgtgggcccgcttcgccaccctcaactccatggctttcatggcgtga

SEQ ID NO: 93050 - DNA, 1133 bp, Zea Mays
atgacccaaccttgcaatgtatctgtaccagaaccagccacacactctagtgatcaatttgtatctgaaccactgatgacacccacccagatggagtcgcagatgtctcatagtcaggtggaagaattagttcacagacaacaggaagtgcgacaagccttcgatagttgccctgatgaataggttacacctaatactctaggtcacaccatgctaggtggcatagtttaacctaactctggcctagttttcgacaagactcctagtgaaaatgttagtgtgtcaggcctcttcctatcaaaaatggaatgtgctcatgctctttgaaactacatgtgttctaaggtcatggacatggacagaaacatcattgactttggtgaatatcgtggcgattttcgtgacatacaacaatattttgctgatgccgcgtgcatcgacaatgtgtttatgcaatgcttcattgagtgtgtccacgatgacgctgctaaccgtattcctctaatgaccgctcaccacctcatcctagacgttaatgttggggtaataacttctactttaataattctcctcgtccttttgacccttccattttggagagtcacctttcaaacaaattgcctttgttcaagaagctggatgagtacaaatcggtaaatatcagttccctgaccaccagacattggaccttatatgttgttaatttttagattggatgcatacatgtgttagattctatcccatatgggtcagaactgggtgggactacatggaagagttaccatgctacacctatggatctgggtgacaggcagttaccatgggccatgttaataatgagtaggctcaatctacccatacaacatgttcgaccaagatcacccctccctgccttttggaactaccctattgaactccccacgaactgcccaacaatgaaagcgggatctaacgattgtggattctttgttatgagatatatgcagtactacgactacatggatggagctatcaacgtagttattgatccgtataattcagaagaccttcgctctcttgtattgtattacatgatattccattgcctaaacaaaaacaaccccctcccttcaaatttagaaagattgtattat

SEQ ID NO: 93051 - DNA, 1125 bp, Zea Mays
atgccagatggtcatgacggtgtccctgcagtactgctcgggcgtccgggagtcgttgacgtgccgcggcaggaggttgacggggaagttggcggagtcggtgaagatggactccgtggaagcgttggcgtaggtgaagttggcgaaggcccgggactggatcacgcgctcgatcgtctggatgccgcgcacgcaccgctgcaggtcctccgactcctggaagtagttgaacgtcaccgccgggttcgcgcgcgggtcggcggaccgcagctcgacgtggcccgaggagacggggcccaggatcttctccaggatgaatccgccccggaacgcccgcctgtccagccgccgcatcgcctccgccgcgcgctccagggcctctggggttctctgcttcggcggcaacgtgcccagctgccccgtctgcggagagaagaggccgaagctgcgagccaggcgacgggcgccctcggagacggggatgccgaactcggagccgctcacgccctcgatgaagctgccggaccgggtgatcccgacgacctgcacgagcgacagcgtgacgggcaccggcgacgggatgaacaccgagttcatcgggttgtcagccacgccctgcccgaccatgggctggtccaccagcacctggacgccgtgcgcctccaggtgcgcctgcgggccgacgccgctcagcatcagcagctgcgggctccccagcgtccccgccgacaggatcacctcgttcttggcgccgtcccggaggtacacccggtgctgcaccccgagcgggtccgtgaacaccacaccgtacgccaccgggtacggcacgccctcttgctgtctgaagaggatcctggagacggtagcgtagaggaacacggtgagccccctggggcgcgcgtggcggaggaagtcggcggcggtgtggcgctggccgctgctgtcgaagatggtgcccccgatcttggtgcccgtgacgtggtcgaaggtgaagccgttgtcgggcgtgacgccggcctcgagcagcgcgtcgcggagcgcggcctgccacgggggcacggcgggcgtcccagccggcggcgcgcacgtagtcggtgctggcccgcgtgtagaacccggcgttga

SEQ ID NO: 93052 - DNA, 966 bp, Zea Mays
atgccagatggtcatgacggtgtccctgcagtactgctcgggcgtccgggagtcgttgacgtgccgcggcaggaggttgacggggaagttggcggagtcggtgaagatggactccgtggaagcgttggcgtaggtgaagttggcgaaggcccgggactggatcacgcgctcgatcgtctggatgccgcgcacgcaccgctgcaggtcctccgactcctggaagtagttgaacgtcaccgccgggttcgcgcgcgggtcggcggaccgcagctcgacgtggcccgaggagacggggcccaggatcttctccaggatgaatccgccccggaacgcccgcctgtccagccgccgcatcgcctccgccgcgcgctccagggcctctggggttctctgcttcggcggcaacgtgcccagctgccccgtctgcggagagaagaggccgaagctgcgagccaggcgacgggcgccctcggagacggggatgccgaactcggagccgctcacgccctcgatgaagctgccggaccgggtgatcccgacgacctgcacgagcgacagcgtgacgggcaccggcgacgggatgaacaccgagttcatcgggttgtcagccacgccctgcccgaccatgggctggtccaccagcacctggacgccgtgcgcctccaggtgcgcctgcgggccgacgccgctcagcatcagcagctgcgggctccccagcgtccccgccgacaggatcacctcgttcttggcgccgtcccggaggtacacccggtgctgcaccccgagcgggtccgtgaacaccacaccgtacgccaccgggtacggcacgccctctgtcgacagcgcacgattctccgcttcagagcgcgatcgtgccagcccgcactgtcgaaaaaaaaatgcggaagccgtgcacgcacgtacgtaccttgctgtctgaagaggatcctggagacggtagcgtag

SEQ ID NO: 93053 - DNA, 3575 bp, Zea Mays
cggccgcagggctggcgggtagaagtagaatcgatggccaggtcccgccaaccaccgtcctgcttcttccgatcccattcgattccagagttcaacatccatccttttcattcgtacgccgtcgtggtcgtggtcgccacccacgactcttccacctccggcctctctgcccaattcaatctcgggctccgaccacagggaaagatcaatcgaaagcggagccgtgttgagagcaaccgaggaaccaggcgcccgggcggtgatggagaacggcaacaacggcggcaatccgccgcactacccgccgtaccaatacccgtatccgcaggcgcaggcgcaactgtatccttacgggtaccagtacccgcctgcgccgccgtcgccgtcgccgtctgccgcgccggcggggccatacctctctccgtctccatccttcccgagctatgcccccgccccgcatccgccgcagcagtttcactccggcccgctccaggcgtacccgcccccgccgcagtaccacgcctacccgccgccgccgcatccatcgccttacggccacgggtacgacccctacccatccccgtatttctcctacccgagcaccaaccctagccccagccccagcccggggctctcgcccagctccagcttccaccaccagcacgcctccgcgcccgaacccccgtcgcccgcgccctccgcaccctccgcgccgtcctatcccatcgaggatgtccttgccagcatgcgcctctccggccgtcacgattacgcgtcgtcgccctcagtgaccccgccctcgacccccttcttgggcgatgggagcagccacggcggcgggatgcagctggtgccctatggcacggccgccggagggtcgcagcacggaggcgggatgcaggtggtgccctatggtgcggccgcgggagggtcgcagcacggcggcagcttcagggcatcgcttaaggtggtgctgctccacggcagcctcgacatctgggtgcacgacgcgcgacacttgcctaacaaggatatgttctccaagagggtcggcgagctccttggcccacgcatcaccagcgctgttggcagcaagatgtccagcgcgtccatgaccagcgacccctatgtcaccgtacaggtctcctatgccaccgtcgcgcggacctatgtcatccccaactgtgagaatccagtctggtcgcagaacttcatggtgcccgtcgggcatgaggctgccgaagtccagtttgttgtcaaggacagtgatgtcttcggtgctcaaatcatcggtgttgtgtccattcccgccgagaagcttctgacaggggacaggattcagggtgtcttccccgtccttgagcccaatggcaagccttgtgctcctggagctgtactgcatttgtcaatacagttgatccccgttgctcagctcacaatgtaccaccatggcgtcattgctggtccagacagtcatggagtgcctcatacttacttcccacttaggcgtggcatgagagtgaccctgtatcaagacgcccatgtgcctgatggttgtctcccagacatatggcttagcaatgggctgcgctaccagcacgggcagtgttggcgtgacatctatgatgccatatgccaggcaaggaagttaatttacattgtggggtggtctgttttccacacaatccacctcgtgagagatggcactcaagctccatcacttggggacctgttgaagatgaagtcacaggaaggggtgcgtgtgttgctgcttgtttgggatgatcctacatcgaggagcattcttggatataagatggatggtttcatgggcacaagagatgaggagacacgcagatttttcaagcattcttcagtccaagtgttgctctgcccacgatctgctgggaaacgccacagctgggtgaaacagcaggaaacaggaaccatttttacccatcatcagaaaacagttattgtggatgctgatgctggcaactataggagaaagatagttgcttttgttggaggcctagatttatgtggcggacgatatgatacaccttggcatcctctgtttcggactcttcagaatgaacacaaagaggattattacaatccaaactttaatacagttgatgctcgtggtccaagggaaccatggcatgacttgcattctaagatcgatggtccagctgcttatgatgttctacagaactttcaggagcgttggttaaaagcggccaaacgacatgggattaaaaagttggcaaaatcctatgacgatgctctgctcactattgaaagaataccagagattataaacataaatgatgcaatatattttagtgacaatgatccagagacatggcatgttcaggtgtttcggtctattgattcaaactctgccaagggatttccaaaggatccacgagcagcaaccatgaagaatcttgtttgtggaaagaacgtacttattgacatgagcatacatacggcttatgtccatgctatccggtcagcccaacattatatttatattgagaatcagtacttcattggttcttcatttaattgggattcaaacaaggacttaggggctaacaatttaattccaattgaaattgctctcaaaattgcaaataagattaaggcaaatgaaaggttttctgcatacatagtggtacctatgtggcctgagggtaatccaactggggctgcaacacaacgaattctttactggcagaataaaaccatgcaaatgatgtacgagacaatatacaggaccttgaaagaagaaggcctggatgatatgtatgagcctcaggattatttaaacttcttctgtcttggcaaccgtgaagttgctgacagcactagcacttcaaacgcttcgaatacagcaaataatcctcaggaacaagctaggaaaaataggagattcatggtctatgtacattcaaaaggcatgattgtggatgatgagtatgttatcattggatcagctaatattaaccagagatccatggaaggaataagagacactgagattgcgatgggagcgtatcagccacaatatacatgggctaataagctttctgccccacgtggacagatttatggctacagaatgtccttatgggctgagcatattggaagcattgaggaagacttcaactatccggagagcctggagtgcatgaggcgtgtacgtcatcttggggaagagaactggaagcagtttgttgccgatgaggtgacggagatgagaggccacctcatgaagtatccagtaagcgttgaccgtaaaggcaaggtgaaaccgctacccggatgcacaacattcccagatatgggtgggaacatctgtggctcgtttgtggccatccaggaaaacctcacaatataaactttagctgtgcaacttacataatgtctggtggcctctgcccagggggaccctagcactagcttatcctctttcttgagagcgtagatagggtgaaaattttgcaatagctacaggttgcaggcaagcaggggaaatggtaatatgggctttctccccttgacct

SEQ ID NO: 93054 - DNA, 571 bp, Zea Mays
tcgtgcgttgctacgaagtaaaaatgttatgacaagatatatacaaacagttgatctcaatgctatctatataaaaaaagagtcgatcacacgtcttctcacacaaatagctacatttgcacgtgttataatcccaaaaaaatatatcaaccttgacaatatcgcaaaatagattatgccaatgtttaaacaaaacaaaaatggtacaaatcacacatttgacgcaagctaccttatatattatatatcattcacgataaaatatctagagcacacccatgcttgataaagtttgaaatgtattcacagggaacatattagtacttctgtctttatcgacactcaatcgaattgctaatccaacttagaaccaaaaactctaacatgacatccactaaaagataaccattaagccatgggtgccttcttcaactttgcgagctcttgcctgatagtaccacccctctttgccagcatgactttgaacctatcgaagtcatcaagtgcggctctcctcttctagaaaatctgcttacgccccatgagttgttctcctacttggtcttcacat

SEQ ID NO: 93055 - DNA, 2589 bp, Zea Mays
acccacggccacgccccaccctcactccccttctgcccttcgcccgcatacacattgccccgcaagctaccggcgaccgcctagcatctgtggcgccgcgccgcctccgctgatggggatgaacaagtcacggtggtgtcgcgccaccctgctgctgctcctgtcccttgctctccgcggcgcggcgttcctgcaggagaggaagaactacatcgtgcacctccggccccgggaagccaccgacggctccgtcgacgggtggcaccgctcgttcctgcagcaggcggcggcagggctggactccacggccgacgaaggcccgcagatcatatactcctatagcgacgtcttcaccggcttcgccgcgcggctcacggacgaggaggcagaggcgctgagggccacggacgggtgcgtgcggctgtacccggaggtgttcctgccgctcgccaccacccgctcgccgggcttcctcggcctccacctggggaacgagggcttctggagccgctccggattcgggcgcggggtggtgattgggatcctggacacggggatcctgcccagccacccgtccttcggcgacgacgggctccagccgccgcccaaggggtggaaggggacctgcgagttcaagagcatcgccgggggcggatgcaacaacaagatcatcggggcgcgcgcgttcgggagcgcggcggtgaactcgacggcgccgcccgtcgacgacgcgggccacggcacgcacacggccagcacggccgccggcaacttcgtggagaacgccaacatcaggggcaacgcggacggcacggcgtccgggatggcgccgcacgcgcacctctccatctacaaggtgtgcacgcgcagccgctgctccatcatggacatcatcgccgggctggacgccgccgtcaaggacggcgtcgacgtgctgtccttctccatcggcgcctactcgggcacgcagttcaactacgaccccatcgccatcgcggcgttcaaggccacggagcgaggcatcttcgtcagctgcgccgcgggcaacgcggggccagagcccggcacggtcggcaacggcgcgccgtggatgctcaccgtcgcggcgggcaccatggaccgcgcgatacggaccaatgtcaagctcggcaacggcgaggagttccacggcgagtccctgttccagccgaggaacaactccgccgcggacccggtcccgctggtgtaccccggcgcggacggcttcgacgcgagccgcgactgcagcgtgctgcgcggcgccgaggtggctggcaaggtggtgctgtgcgagagcaggggcctgagcgaccgcgtcgaggcgggccagaccgtggcggcgtacggcggcgtgggcatgatcgtcatgaacaaggaggcggaggggtacaccaccttcgccgacgcgcacgtcctcccggcttcgcacgtcagctacgagtccgggtccaagatcctggcctacttgaactccacggccaacgggacggcgagcatcgacttcaaggggacgattatcggctcgtacccgtcgccggcggtcaccttcttctcgtcccgcgggccgagcaaggcgagcccggggatcctgaagccggacatcacggggcccggaatgaacatcctcgcggcgtgggcgccgagcgactcgcacacggagttctccgacggcggggccgacctgtccttcttcgtcgagtccgggacgtccatgtcgacgccgcacctgagcggcgtcgccgcgctcctcaagagcctgcacccggactggtcgcccgcggcgatcaagtcggcgatgatgacgacgtccgacgcggtggaccgcacggggctgcccatcaaggacgagcagtaccggcacgccaccttctacgccctgggcgcgggctacgtgaacccggcgctcgcattcgacccgggcctggtctacgacctccgcgccgacgactacatcccctacctctgcgggctggggctgggcgacgacggcgtcacggagatcgcccaccgccccgtcgcctgcggcggcctcagggccgtcaccgaagccgagctgaactacccgtccctcatcgtcaacctgctggcccagcccatcgcggtgaaccgcacggtgaccaacgtggggaaggcgagctccgtgtacaccgcggtggtggacatgcccaaggacgtgtcggtgaccgtgcagccgccgacgctccggttcacggcgctggacgagaagcagagcttcacggtgacggtgcggtgggccggccagcccaacgtcgccggcgccgagggcaacctcaagtgggtctccgacgactacatcgtgaggagccccctcgtgattccagccaagggagagtagcgcggagcagcggcctggcggcaacgctctttgtgctgctcggggtcggggttgaagaaggctaattttgcgaccatggtacagagtatgtctgtatagcgtctctaggctacggcacttgcacaccgcatgtttgtataggctacgaaactatggagtatgaactggagttcttctcgctcgacgtgtgctatgctatctatctcattcccagc

SEQ ID NO: 93056 - DNA, 1838 bp, Zea Mays
gagccacagccaaatgatactctttggttagccagccgaaattctctagcctggcagcagccatgggagaagcacaagactactacgacacctccacggctctggccgccgccgccgccgccgccgccggcctcgcgctgctcgcggtctgctcgtactacctgctcgtcgggcggcgccgcggcggcggcggcggcaaggcgccgaagcggtacgcgccggtggtggggacggtgttccaccagctgtaccacgtccggcggctgcacgactaccacacggacctgttccgggagcgcaagaccttccagctgctggtgccggccggccggcggcagatatacacgtgcgaccccgccgtggtcgagcacatcctcaggaccaacttcgccaactacggcaagggaagcttcaactacgagaacatgactgacctgctcggcgacggcatcttcgccgtggacggcgacaagtggaggcagcagcggaagatcgccagctacgacttctccacgagggcgctgcgcgacttcagcggctcggtcttcaagaggaacgccgcgaggctcgccggcatcgtctccggcaaggcggcgtccgggcagcccatggagttccagggcctcgcgctcagggcgaccatggactccatcttcaccatcgccttcggcctggacctagacacgctgggcggctcggcggaagggagccgcttcgccgcggcgttcgacgacgccagcgagttcacgctgctccgctacgtgaacgcgttctggaaggcgcagaggttcctcggcgtaggctccgaggcggcgctcaagaagcgggtcaaggtcgtcgacgagttcgtgtacaagcgcatccgcgagagagcccaggagctctccgacagcaagctggcgaccgaggacactgtccctgattcgaggcaagacatgctgtccagattcatccacacggccacgaacgagtccgggacggtggactacaagtacctgagggacatcatactgaacatagtcatcgccggcaaggacacgacggcgggggcgctcgcctggttcctctacatggcgtgcaagcacccggagatccaggagaagatctgccaggaggccgcaaaggcgaccgacgccagcgagacggcgggcgtggacgagttcgcgcagagcctgaccgacgaggccctgaacaagatgcactacctgcacgccgcgctgaccgagacgctcaggttgtacccgtcggttcctctggataacaagcagtgcttcggagacgacgtcctgcctgacggttccagcgtcagcaagggagacatcgtgttctacgtcccctacgccatgggccggatggagtacctctggggcaaggacgccgaggtgttccggccggagcggtggctggatcaggacggagagttccagcaggagagcccgttcaaattcacagcgttccaggctggtccgaggatatgcctggggaaggagttcgcgtaccggcagatgaagatcttcgcggcggtgctcctccgattcttcgtgttccgcctgcgcgacggcgacaaagcgagcgtgaattaccggaccatgatcacgctccacatcgacgagggtctgcatctgacagcgacggcgagatgaggtcgcctggcctggccaccggtggacacgtagccgccggtgcctgtagctacgcgagcgacaggtccttgacaccgtaccttgtgtacatatatatatgcaaagaaacgaaaacgagcagtggtagtaggcaaccactttgtgtactgcgtcttgctggggaataatgacatgtcatggcatgagttgcaggct

SEQ ID NO: 93057 - DNA, 156 bp, Zea Mays
atggaggtcgacgagatgggcagacatggactacgctggggtgggtggttccgggcgtggcacattgcgcagacgaagccccaagaggccaccgctgccgaggtgtgtgtcgtgtgtggggattatgatatctggattatgattcaagaaaagtga

SEQ ID NO: 93058 - DNA, 105 bp, Zea Mays
gtacttttacagcttggttgtatagtggtacctagttggtgttacatgtatgcctccaccacaccattatgtctcataatgggaattggaatgtgctggttaccc

SEQ ID NO: 93059 - DNA, 693 bp, Zea Mays
cgcttcctgaaaattttgaatcaacaatatacccaagcagatgcatcgagggatccctgtccacttcctgaaaaatttgaatcatccaatgaggacagtggcgatgcgtacaattctgagcagacactggagatggaaggtaaaaggtttgtggtgagaaagtcatgcaatccagcatttgctgctgcccaattgaaatttgaagagctgagtacaaatttgacagtcagcaggtccagtagcttgtcacatctggatggggcgagcaagtcaagggttcacgctcctagttcacaagaagattggtcctcaaagcaagatggcacaagcatgccagatagatccgtcggtcatgatatactaaaatgattattgctgcatcagaatgtgggactgagatatcaatttcatccacactggactcaccagatagataagaaggtgacggtggggagatcgtgttggagattggagctctggaaaatagaaactatgtcaccagcaaagctaataatgactcgcatactgtccatcatgaggtaaaattgctcctgaagtagaagcccagccgcagaagcaagtagaacagaacagcaatgttcctgccctcgaaatagaagcccagccacaagacaagcttgttcaggaaccacatgctgaaccggaaatgctatattgctctttttttatatt

SEQ ID NO: 93060 - DNA, 888 bp, Zea Mays
attgtggatcgacgttgggcgaaccaaatggataccccattatatggagcagcacaatatttgaaccctggaaaattctacaacatcaaagcaggtgatgatgaaggctatgttggagagctaaggggttgctttaatgatgtgtttgtcaaaatggtggtagatgaagatcttagagagaggattgatgcccaagctgttctttatgagaaccaaagagaggcatttgcaaatccaatggctataaaaaatgcacaaacaaggaatccatttgattggtggcttgcatatggtggtcgtactattgaattatataagtttgcaagacggattattagtctttgtgtttcatcatccggttgtgagcagaattggagtacatttgaatttatgcataccaaaaaagaggaataggttagagcacaaaagattgaatgacttggtatatgtttcatacgacagaaagatggctgataggtttcaaaaaatatgtgaggaagggaaaactttgatcctttgattttagaagactttgattgggacaatgaatgggttgatccattagctaattcttctcatgttagcaatgctcttggagatgatttcaatttatcatgggaccaagttgatgaagctattgtggcttctgcacatctcagaagtcgtaattttcctaggagagctgttggtggctgggtgagaaggaatgaagaccttgaggaagaggagactaatctagcaaatgaagatgacgaggatgaggaatatattcttgatgatcttgatgtggaagatgaaattgaaggaagcaaaagtggaaaagatggtgatgatcaaggcgtggatgctcatggtcttaatattgatgagttcgatgatggttattga

SEQ ID NO: 93061 - DNA, 955 bp, Zea Mays
agagaatgcacacaacgttacaagacggaccctcagacagactcacaagctctctcaagctcacagactcaatacaacacacagacagtggagtagggtattacgctccggcggtctgaaccactctaaatcctcgtgtcccctcgtgttcatcgaccatctagcagttattgcttgcaccggcggcggccgcagccgccagacgtgccatcaacgccttgccgaactcgagcagcctgccgacgtcgggcatcaccgtctggacggcatccagcgcgccgaagcgctccgaccacgccgccagcagcggagtccgctcggggtcgaagggcctgacgccgtgcagctcctccgacgcgcgcacccacccgagcaggccgccgagcacgacgtcgacgtacccgacgctgtccccaccgaagaagggcttcccttggccgccgcagtccctcagcgcgccctccagcgtctccaccgtcacgaccgactgcttcttcccctcggccctctcctcctccgtcttgcccatcgtcgactggttccaggcgggcagcatctgcgcgcaacgcgcggcccagaagcgagcgacggcgcgctcgtaggggtcggcggggaggagggacgggccggtgccggcgaaggcctcgtcgatgtactgcaggatgacctgcgactcgcagatgggcttgccgccgtggatcagcacggggaccttctggtgcacggggttggacttgagcaggagctcgctcttgtccctcagatcctcctccacgttctcgtagctcaggcccttgaggctgagcgcgagcttcacccgcagcacgtacgggctcgcccacaggcccagcagcttcaggtcatctcctccggccattgctgtagtagctctcttctttttttttccgttggcttaattctctgcggagggatgtgccggggagtctatcttctt

SEQ ID NO: 93062 - DNA, 231 bp, Zea Mays
atgctggcagatagatggcccaaggcccagcacctacggcagcccacgacgagctcgcctaatcttgttatactccagcagcctctgcacgtcaggtatcacctccctgacgccgtcgagcgcggcgaaccggtccgcccacgccgccagcagcggcgtcttggcggggtcgatgaccctcacgccacacatcacctcagacgcgcgcagccacccgaggaagccgcctag

SEQ ID NO: 93063 - DNA, 224 bp, Zea Mays
ttgttgaatccctctagcaaaaggacccaagacatttccatctttaggaatccctctagagcatatctggaaaccctcaaaactcattttttttcttctcgtattgtgactgctagtgaagaatcccaattttccagacacaaatagtccagtcccttcatatcatggattgaaaaaaatcaaggtaccttggaatcaagttgctcttgaagtttttagttaag

SEQ ID NO: 93064 - DNA, 1027 bp, Zea Mays
ataccagagcattagacgatcgtactttgtgaggcgctggtctcttgcacagactcggagcaagataggcctagctggttacaagccaagaacaagtagagcggtagagggaaaatatatctggagagggaaacaatggcgggcgaggagggtcttaaggtcctcggcctgcaggtgagcccgttcgtgctccgcgtgtgcttggcgctgaacatgaaaggagtgagttacgagtacgtcgaggaggacatatccaacaagagtgagctcctgctcaagtccaacccggtgcacaagaaggtgcccgtgctcatccacaacggtaagcccatctgcgagtcactcgtcatcatgcagtacgtcgacgagctgttcgccggccggccgatcctcccaaccgacccctacgagcgcgccactgctcgcttctgggctgcctacgccgacgacaagttgtttccagcgtggtacggcatggtgaaggcccaggcggaggaggagagggcggagaaggcgaaggagacgctcgccgccatcgagcacatggaagtgaccttcgccaagtgctccggcggcaacgccttcttcggtggcgactccatcggctacgtcgacatcgtgctgacgtgctcggctccttcttgttctggttcgaggcggtgcgcagggttttcgacctggagatcattaacgctagcaagactccgctgttggctgcgtgggcggagcggtttgtagggactgtagaagcgaaggaggtggtgccgttgcccacggcggacatggcggtacagtacatcaataagcttcatgcccccctgccgccgccatgagttcacaatgagtcgtgtaagtgtaaccaagcagggaaaaaggtaaatggtgcggtgctttggtccaaattccaaccgaataatgttcaaagcttatattgataggcttgggttgttgtcatcaaatattgtggttcagtcgtctcctctgcaataaatataaatatgattattactttctttgccgtaaaata

SEQ ID NO: 93065 - DNA, 589 bp, Zea Mays
ccagagcattagacgatcgtactttgtgaggcgctggtctcttgcacagactcggagcaagataggcctagctggttacaagccaagaacaagtagagcggtagagggaaaatatatctggagagggaaacaatggcgggcgaggagggtcttaaggtcctcggcctgcaggtgagcccgttcgtgctccgcgtgtgcttggcgctgaacatgaaaggagtgagttacgagtacgtcgaggaggacatatccaacaagagtgagctcctgctcaagtccaacccggtgcacaagaaggtgcccgtgctcatccacaacggtaagcccatctgcgagtcactcgtcatcatgcagtacgtcgacgagctgttcgccggccggccgatcctcccaaccgacccctacgagcgcgccactgctcgcttctgggctgcctacgccgacgacaaggtattatgaacttgcacgcacgcgcgtttacgtgcctgatagtctggtaccgatcgaatgggcggcgccttgctcgcagttgtttccagcgtggtacggcatggtgaaggcccaggcggaggaggagagggcggagaag

SEQ ID NO: 93066 - DNA, 642 bp, Zea Mays
catgcttgccttcaacctccgcaacaccttctcgacatcagccaccgcgcacccctgctgcccccccttggctgcacgagagtgctctcccacgtcgagcccccctcaatctggttcctggctacagtagcagtcccgacatcgccgcgcagcgagctccaccgcagatctgcgcagccccgacccacgccgtcccgttggtgcttggatagccccatgctgcgtcgtcgatctgcgcagttctaccgtctccgcatctcgcttcgccaggtctacgcagtccctacgtgccgtcgtcaaaacccgtgcccttgtcgtcgtcacgcctcgcgcatcgctcctcggcaaagagcctaaactgatgggatgcatgcgtaactccaatcggatttcggccaggttgttcgtcttgagtgattcatgatttgtttttatttacgtaattggtcgatattgtgcatgtatgtttatatgtgtgggaaaaatataattgtatgaatggaagagtgtagagaagaaaataaagtagaaaagaactcagatgtttttatattttgataggaatatatgcgatgtgttgtttgatgcgaagactaagtttaaataaataaaaaaatgtggatcgatgcttcgctttataaa

SEQ ID NO: 93067 - DNA, 216 bp, Zea Mays
atggccagcgcccctcccctgctcggccccttcctcactgctcccttcctctcccctcatggagagttttccccctgcagtcttccccaatgtgcagcaagtttgggagccgacgcccctcctcctactggcgcagggtgttcggtaaaaggcgcagcaggagcaacaaccccttctaccgctatggccaagcccggacaccgtcgttccctctag

SEQ ID NO: 93068 - DNA, 1581 bp, Zea Mays
ccggcaccacccttcaaaccgcgtagaaacaccgcgcgaaacaaacccgatcgggagccaccgcccccgccactccaccgcacccacacgcagcttgtgcgcgcgcggcctcctcgactcgacatgaacaccacgaacgggcacgggctgatgcaccaccaccacgtccaggcgtccatggctccggcgcagcaccagaagcagcggccgggactgccgccgcccgcgcccgcgcccgcgggggcaggctcccactctctgcacgccgacatgtgcgtggacgacagctcggcgccggggcgcgcgcaggcgctgggaggcctgccaccgcgcaaggcgcaccgcaggtcccgcagcgacgtcgtcccctacgggtacttccagccgctgccaccgccgtcgccgtcgcccaaggtggaggccggaggctggggcctcgccagcggcggcggcggcggcgccggcgacgacctgctcaatgcgtacatgagcatggagggcatggacgggctgaaccactccgacggggatagccgcgggagcagcggcatgcgcaccaacggagccgacagcagcgagaacgagtccgaggactacggcgccggcgccgacagccagttcttcctctggggcgacggtggcaagaggaggaggaatgcctccggagagcccgccgcgccgccggcggcggcggcggcggcggcgaggcacgcccggagccactccatggacagcctcatggggaagctgagcttctccgccaatggggagcccggcaagttcagcctggacttcggtggcggcgagttcaccccggccgagatgaagcggatcatggccgacgagaagctcgcggagatggccctcgccgaccccaagcgcgtgaagagggttctcgccaacaggcagtcggcggcgcggtccaaggagcggaggatgcggtacatcgcggagctggagcagaaggtgcagatcctgcagacggaggccaccacgctgtccgcgcagctcactctgctacagcgcgactcggcggggctcgccacgcagaacaacgagctcaagttccggctgcaggcgatggagcagcaggcgcagctgcgcgatgcgctgaacgaggctctgacaggcgaagtccagcgcctgaagctcggcgacacagcctcgtccggtaataatctaccccagcaagtgcagctccgttgccagaaccaggtggcggggctgcacaagcagcagcagcagcagggtggtgagcagatacccttctatcagctggagcagaacggcgcgccgaggaacgacgcgcctaaatgaggatggcacacctcgactacctgcgctgggttacacagggaaaaaaaaaaccttgattagtcccgtagatgatacgtttatcttggagctgtgatctcgttcatagtataactacgtttgtcgggccggcagcggcagggaccccgtacgttgctggatattttatattcttctcgatggagtcgtcatagctggcgaaaaaaatgtaatggattgaaattcttttgtagtactctcatttatgaatgaattcgtttcgaaatt

SEQ ID NO: 93069 - DNA, 755 bp, Zea Mays
ccggttaaccaaccattcgtcgtgctgtgctccttctccctacgggcagggtacggacgtacctgatggacggcttcttctgccacacgcacatcgcgtcgtggcacaccctccacaacatcatctgcggcagcgcgggcaagatcgacgggtggctcgaggtggtcagggaccagctcgcctgcgacgtcaccgtctaccacggcagcgacgacgagctcctccccgtgcagtgcagccacgcggtcaaggccaaggtcccgcgcgcccaggtcagggtcatcgacggcaaggaccacgtcaccatcgtcgtcggacgccagaaggacctggccagggagctggaggagatatgggacaggagacggtgaggttgctgggtgggtggtttataggatgaacgaagccacagcctgcaaaaggatgtgtcttattacgaaagaagaaaatgggtgccaacacgcgacaacgagtttcctaatggaggctacaggaacgaaatataagggcaaaagggttcgagagagagagagatgtgaagagtacttaattacatttaccctttttttatgtcttggacttgttctcaggttttcatattgaaggccgagaaaatttcttgcccggcctgtgtgtaattatgatataaatgattagtcgtttcagactttcagttgtaatccctgaacagaatgtgacatgaaccggtttgtggagcttgtaccttttttcttctccgctttctggtccattcc

SEQ ID NO: 93070 - DNA, 2165 bp, Zea Mays
gcgttttactaccaggcagcaacacattctagactcccgtagacggaagcaaggaccgtctggccgtctacctatgctatgaatggcctctgagctgagcttgggcgggctgcctgcctgcctgcctgcccgcccgcgctacccgctgctccagtccagagcccaagccaagccttgcgcggtgcgcgcaccagttggccgtgtcagttcaactaccaccaacccctgcgctttaatgcgggagcaccatcaattcactctcactcactcgccacgcaccgctcgctgcgctgcaacctctgctccttttaccaccggtccgccaccaccttccctgcgctgctagagccttcctggcggcggcggcggcggcgtggatcgatatgggcgccgcggcgcggtcggcattggcgtccgccggccgtgcggcgaacgaggccgtgagcttcgtggtgttcctgctgctggacgcgctggaggcgctgctgtgcgtggcgtacagggtggcggactacgtggcggagggcgcgtggcggccctgctactgcgcgcgcccgtccccggcgtcgtcgtcgggccccgcaggtgggaagatcgtcgtgtcggagcggggaggctccaaggtggtcagcatgctgtccgccaccaggctgcacctcgaggacatctccgacacgctgtacgcgcgccgccgctccgtgctcgcggtcgcgggggcggcgttttcctccccgcggcgcgcggcggcgggggtcaccgtgcactccgcccccatcgtgcagatgatgctgcggggcaaggccggcggagacggcagcaacaagtacccgtcgccgcgctggtccgactgccactgcgccaactgcaacccggcggacacgggccgcctcttcgtgcacgtcgaggcgccaccagctggcgacggcggcgtggcgacggaggaggacgtgctgttcatccacggcttcatctcgtcgtcggggttctggacccagacggtgctcccgcacgtgagccccgaggcgcggtcccggcggcggctgttcgccgtggacctcctggggttcggccgcagccccaagccggcggactcgctgtacacgctgcgggagcacgtggagatgatcgagcggtccgtgatcgagcgccacggggtcaagtccttccacatcgtggcgcactcgctgggctccatcctcgcgctcgcgctcgccgtcaggtaccccgccgcggtcaagtccctcacgctcgtcgcgccgccgtacttcccggtgccgcgcggggaggtcggcacgcagtacgtgctgcggacggtggcgccgcggcgggtgtggccggccatcgcgttcggcgcctccgtggcctgctggtacgagcacctcagccgcaccgtcagcatcgtgctctgcaagcaccaccgcctctgggagctcgccttccgcgtcttcaccctctacagggtacggacgtacctgatggacggcttcttctgccacacgcacatcgcgtcgtggcacaccctccacaacatcatctgcggcagcgcgggcaagatcgacgggtggctcgaggtggtcagggaccagctcgcctgcgacgtcaccgtctaccacggcagcgacgacgagctcctccccgtgcagtgcagccacgcggtcaaggccaaggtcccgcgcgcccaggtcagggtcatcgacggcaaggaccacgtcaccatcgtcgtcggacgccagaaggacctggccagggagctggaggagatatgggacaggagacggtgaggttgctgggtgggtggtttataggatgaacgaagccacagcctgcaaaaggatgtgtcttattacgaaagaagaaaatgggtgccaacacgcgacaacgagtttcctaatggaggctacaggaacgaaatataagggcaaaagggttcgagagagagagagatgtgaagagtacttaattacatttaccctttttttatgtcttggacttgttctcaggttttcatattgaaggccgagaaaatttcttgcccggcctgtgtgtaattatgatataaatgattagtcgtttcagactttcagttgtaatccctgaacagaatgtgacatgaaccggtttgtggagcttgtaccttttttcttctccgctttctggtccattcc

SEQ ID NO: 93071 - DNA, 861 bp, Zea Mays
acccaactgccactacccatgcttgctttttaagctctcctcctggcgctgcctctcggcgccatcgttccctcctctgcaccccccatcctcggacatcctcgcctgcagcagaccctcctctggtgcgcgtgcgccaccggcgagatgtcgaagaaaatcgtggtgaagctgcacctgcaggacaacaaggacaagcagaaggccatgaaggctgtctcggcgctcaccggcatcgacgagatatccgcggacatggcgtcgcacaagatgacggtggtcggcatggtggaccccgtgagcgtggtgagcaagctgcgcaaggcgtcgtggtcggcgaccatcgagtccgtcggcccggccaaggagccggagaagaaggacggggaggcagccaagaaggacggcggcgagggggagaagaaggaaggcggcgagggggagaagaaggaagcaggcgagggggagaataagaaggaagcaggcggcgagaaagacaaggacggcaagaaggcggcgccgccgacggagcagcaggtccagctggccgagctgttgaaccagtattaccgggcctcctcctactacccgtacccgcccgtggccacgcactaccacgtccagagcatggaggaggaccccaactcctgcaccgtctgctaaggcgactcatggcatggagaatgatctacgaaggtgaagaaggtagtgttgaaccagcatgcagtttctttttttttttttcacttctagatcgcgttctggctgctcatggaggatacgcagcgtgtctgtatgtacagtacatatagaataacacgtacgtacgtgtggcggtatatgtgtaaatgggacttcgct

SEQ ID NO: 93072 - DNA, 1453 bp, Zea Mays
caccataccgcgcgtgagagctcgtcgtcgtttccgacggtgaagccacgcggaggatagccatggccgccttactccaccaagcggctaccccgaccgcaaaaccaccccaccgcccatgggctctcaactccacacacagccgcctctcaccgctctctaaacgacggcgcgccccagccatccgctcggcggccacggacagcagcttcagctccggcgagacgccgtccaagaagaccacccggaaggagaagcaacaggagcggcggcggcagcaggacgtgcaggaacggcagcagcagctcctggggatggaagaagcgtccctggcgaagcaagacggcggcggcagcaacggcgaggttgacgacgacgacgagcttccgcagcccgtgttcgaccgcatcctgcgccggatcgcgttcacggtgggccttcccatggcgtcgggcgtcgcgctgctcaacgtgtacgacgcgctcaagcgcggccagggggtggtggtgccatcgtgggtgccattgctgaccatcctcgtcgccttcggcacgtcggcgctgggtatcgcctacggcacgctgtcggctagctgggaccccgacaaggaagggtcgctgctcggcatcgacgaggcccgggccaactggcccgtgctgtggcaggaagagattgagaagcagaaggcaaagcagaagaagaaatgaccggctggacatgagactgaaaatcttgcgcaccttgctactgatcatgtaatattcgttgggggtatcgatcctacctttcagtaaaaagaaaatataaattagctgagtaatacacaagtactgaattttgaatagagaatactataatagcgattgcttgtcacactgtataattaaaatacaatagacacagcttacaacaaacagacagtaaaaaaacaaacaaactaaaaaagactgcgttgcgagtccatgtccatgcagatgcagtagaacagccaaaactgagacttggcaagagagactcagagaagacctaacccgaggatagcagttggcagcataagcctaaattgttctatagaaacaacatagccttaaaatgttctctaaatatagcatagccttgatgtattaatcaagccaccgaacgacaccatcttcactcggagctccaaggacctcaatatagaccccaagtacagccttcagaaaaaattaaccaccaggaaaggtataaacaacacatggaatcagtgcaagtagttcgtttcgtctgactactggggatatttgtgtatgttaagtttatcctgcttagaatggcaaggatgaatgaacgtaccatagcatttttgcgattaacaagtttgcagtattctgaaaggcacccttccagcatccagctctcacaaacatcaaaagaatgacttgcgaagacgaactccatcttattattagcc

SEQ ID NO: 93073 - DNA, 1281 bp, Zea Mays
ccccccctgcccatctcctcctctctccattgttgcagccaccaaaccctagcccccccccctcaatcccctcctcccaaggtaccaatccttgccgctcgaatcatcgtcacgtggtgcgagtcttcaatcgttttggtggagggaagaagggaggaaggaaagggggagaatccaaggtggtggactcccagatcgttcttagggatttgcccaaacttccggtgaaggcaagtaaaactgtgatggttattccgtctgtcagatgaggagtcttatacttgtttatgttgtgctattatgttcaaattcatagtttcttttgagtaccatgatttgaaaatgttcatgtttcatgaatttcatatgttgagtttgaggtttgattatgttactcaagtggttattatgtggaatgggtggaagtaaatgtctagcacatttttatttgggaagaactcatgatgttgtcatgcataatgcactcatcatccattgcattgaagtttcgtcgcgatcttatggtccgaccgtaccggtacattgagcatcatatgttgcccgagaaggggtatggtgcagcttcatatccttagagatatggaggcagaagtcattattgcatttgtagccatgtgcattcatgggagaggtgttgaatctattatgtggatgtggataatttggacttgtgcatggtgattctacttggcgttgagcttttagttacttgtttacttgctgcaatttactgttcaaaagaaaagaaagaagtcctgaacacgtggttgtgtaagcacagttgatttacaatgtcctatttgttgttgttatgtttacttgctgagatgtgttatctcacatcttgcattgtttgatgcaggcacctaatttctgctttgggaatagagggatgtagcagcacggccactacacctttaataaaggaaccaccatttaataatgttgttaatcagagttggacaagtctagtgaattgctttgttcttggttgagcgtttattttggggtgggctgagtttcttatcccatttgttttgcttcagttgggtcataattaagttttgccactattgcatttcagtttctactatgtgaattatatgtctttatatcttgtatgagcttcatgattcccctccttgttatgctagttttcaaaggaggtgctgccggattttgctatatattctttctttattacttctcttgtgttgagtaagtttggtgggtggggtttgtggtattatccattgtgtg

SEQ ID NO: 93074 - DNA, 1127 bp, Zea Mays
ttgactaggttcttgcagaaggctgatcccttcgcctggtcctccaagagtgaggactcttatcagtcattgaacaagacgttggtggacgcccctatcctagctttgactgagagcggtaagcgtttcacaatttatacggatgctgcacgtattgtccttggctgtgtgctgatgtctgacggcatgagtgattgtttatggctcaaggcagttgaggaagcatgaggggaattatccaactcatgatctggaattggtcgcggtggtttttgctctaaagttgtggaggcattacctttatggcgaggcttgtgacattttcaccgatcacaaaagtctcaagtatatttttactcagaaggagctgaatttgaggcagcgacggtggctggaattgattaaagattatgatttgtccattcattatcacccggggaaggctaatgtggtggctgatgcccttagccaggtccggggttccaaaggtggccttgccgttgatctctgatctagaccgtttggggatccctttgtgttatgtcggcactgctagcaaggagactcagatgcttattcaatcctctctcatggagagagtgcgtgcggctcagcagcaggatcgtctattgcaggaagctctaaagagggtgggtgatggtaaaccgcgggagttcaccattgatgagaatgatttggttcgtttcaggggccgcctctgtgtgcctcagaaatcagaggtgaaaatggatatcttgagagaagctcataaaacaccttacaccgtccatcctggcgaaaccaaaatgtaccaagatttgaagcaaaacttctggtggaagcggatgaaggttgacgtttctaagtatgtggccgcctgtgaagtatgtcagcgcgtgaaggctgagcataagcggcctgcaggtttgctgaagccattagaaattccagagtggaaatgggagcatatcaccatggattttgtggtgggtctacctcgttcccctcgtggcagggatgctatttgggtggtagtggatcgcttgactaagtctgcgcattttattcccatgaagtcctcaaatttagcttcagatttggttcccttgtatatgaaggaagtagtc

SEQ ID NO: 93075 - DNA, 1972 bp, Zea Mays
ttgtgcaacaaatttgaactatactttcaactcgataatcaatctaaacggtagtgcctttaactggaaaaccctaattaaatggcaactgatcaacctacagctacaagcttacaactccacgagcttccacggctcagcgtcggcgcgcagggccatgacagctccgagggcgctaccagtaccaccgcacaccgcgcggcgcgcccagggccgccacccccgttccacgcctgcgccgccgccgccgccgcgccaccatctccatccacagcagcagggggccacggcgtccgtgctgggcgtcggcgtcccgagagcctggctctcgcagcgcaccccagtcctcggcctccgcgcctgggtcctcgtcgccgcaggcgctgcggcggccgccctcgccctcttctgcctcgccgtctgcctctgccgccgctgcagccggcgccgcgcaccgcgcctggccccgtgcccgcatcggcccggcgccagcaagtccctcaagcaccgcgtgcatgcgcaccatcaagcagcgacaatgccgccgctcccgccgccggccaacaaggacgccgaggaggctgccgctcgctggcgccccgcttcgttcgaacagccgccgatccaggccatcaaggcggagcagaaggcgccgctgatcctcgcggagcatttcgcgaattcgacgagcggcgagagcaccgcgagcgaccagggcggcagcgatgcggaggttccagaggcggcgcggcgcgggtggggccggcggtacacgcgccgcgagatggaggaggccacgggcgggctcgccgccgccaacatggtgggcgaaggcgggtacggcgtcgtgttcaggggcgtgctccgcgacggcaccgccgtcgccatcaaaaacctccacaacaacaggggtcaggccgagaaagattttcgaatggaggttcagacaatcgggcgcgtccggcacaagaacctggtgagtttgctcggctactgcagcgagggagcttgcaggatgcttgtttacgagtacatggagaagagtaatctggacaagtggctgcaccacgacgacagcgaaaccagctcactgacctgggacatcaggatgcgcatactccttggaacggccagagggctggcctacctccacgagggtctggagcccaagatagttcaccgcgacatcaagtccagcaacatcctcctggaccggcagtggagcgccaaggtgtcggacttcgggctcgccaagctcctctgctcggagaggtcctacgtcaccacccgtgtcgtgggaacgttcgggtcggtgtcgctttttctctgtttttttttcgcagggagagagggctgttgtttcagttcaagggagttcgtcatcgtctcccgcgtgcgttgcaggtacgtggcgccggagtacgccgagaccgggatgttgaacgagaggagcgacgtctacagcttcggagtgctcgcgatggaggtcatgaccggcaggactccagtggactacactagaccagccgacgaggtgaacctggtggagtggctgaagcgcatggtcgccgaccggagggtggaggaggtgctggacccgaggctgccggagccgccgccgtccaaggcgctgaagcgggcggtcctggccgcgctccggtgcgtggacccggacggcagccagagacccacgatggcgcacgtggtccatatgctcgaagacgaccagattctcagagacgaattcaagctcgcgcgggatctgtctcctcgggagtcggatagctacgaacgcgaacacagcaggtgatggatgggaggcagggcagcagtctgggacagggacaggacactgggagggatgttaataatagcaagatgtttttggtacaagttgagatctcttgccttgtaagattgtacgtatgtgacacctttggttaataacaggcatacggtattcttgatcatc

SEQ ID NO: 93076 - DNA, 2411 bp, Zea Mays
cacacccacacgtttctttaccctagccttttcactgctccagcgaaggcacacagtgacacagcccgacaggcgacagccgccgccgtttcttcgtctcccatcttcatcttcctcgcagcgcaggcgctccatcttccgctccctctccgactcgcgctcggcacgcaggcgacggcggtggcggcgctcaggctcgggctctcagcgacggcggggcagtcccagattcggcggcggcgtcagcggctccccctctctcctttcgccaatcgccttgcgccaatcgccttgcgcctccggtcctccgcacaccggccggcgactctacgtgcgcgcctcctgctcccctcttactccggtggacagtcgacggcgtccggctccggcggctgcactgcgcgccgcgtgcggccgtcgggcagcaggagccagcagccgctgctccaccaaggcgggcgcgccgctttagtaccgcttattccccaaacgaagcgtgacccgtccgcttagcgctgaagcgtgcgcttagtgccgctatttggaatcctgttaccttatatctctaggttatttttgtccccttccaagtgcagtgttgctctcttgtgatcccctgactgaagttcttaaacctgtgattggactgaggactttacacattgcctcatgtatgcacatacatcttcaggctaaaagaaatggacagatccagttctggttcttgtggtcagggtacagtgcatcactggcttgtgctgattgtggtttggctttgtggaagccagcatgttgtgtctcagaaatcgacacttgaaccaaaagataaattccttctgtctgatccaccaattggcctctttgatccaatagagatttcaccttctgttcttccacacaatactaaccctgttgagccactgtcacctatgtatccaaattacacatcctatgatccagtcttgactggaaaatgccatgtaaatttttctgcactctcttatatcatggagaagacagcgtatgattgctccattccgttagcaccactagttgctgatgttatatgttgcccccaagttaatagcttgatgaatattttccaagctgcatatggcagtggaaatggtaccctagttctcaaccaggcttcagcaaatgcttgtttctctgacattatgaacatccttgcaagcaaaggggcaaacaccaacatccctgagttatgtactctgaggccatcaaatcttactgatgtttcttgtcctgtgaaggatattagctcttttgagaaaatagtcaacatcagtaaactccaagatgcatgcagcaatgttgacccactgaaagagtgttgtaggccagtttgccaacctgctatagcagaagcagctattcacatatcctctggtggggctaacatgttcggaagttctagcatgccagggagtgctgttgggattgatgttgttagcgactgtaaaggggtagttcattcctggttatctatgaagctttcatcagaggaagctaatagtgctttcagagtattatctggttgcaaggtgaacaaagtttgtccactggagtttgatgaaccttcttcagtcgttaaggcgtgtggcaaggcatcatcttcaacgttatcatgctgcgcagcattgcactcttacattggaactaggcaaaaacagatatttgtcacaaacctgcaagcaattaattgtgcaacaatgtttggatcaatgttacagaaagctggtgtggtggatgacatttatgggctttgcgacattgatttgaaagatttcagcttgcaagattttggacagcaaggctgtctacttcggagcttacctacagatattgtgtttgacaacgctacaggcattagctttacatgcgatttgagtgacaatattgcagcaccatggccatcctcatcttctgtccaatcattgtcactttgtgctccagaaatgtcgctgcctgctttgcctgtctcgccgaaatcagaaagctcaggtccctccagaactgggatcggcgttttgttgctgcttgtattcctcactaccatcactatctgaggaatacttccatctagtgagccagaagcttcttacccctgttgcattttttccccatctgtgcaggcccgcgtgtaaattgtctgaattacattcttgtaaatgagcctcccccttgtgtctctttttggtccagtggatagatcacagtgctgttgtgttagagattactgttgtaccattttgtgtctgagcactggttgaaagtaagctagatctggagcttcaccgcggatgatgatcgaatggcaattaacaaccaggcatgctcttttgacttgaagttcataatcgaggttacctgagccatctggtatcctg

SEQ ID NO: 93077 - DNA, 1209 bp, Zea Mays
caccagctcgcgcccccacaccgaccggcgagtgacccgcctgcctgcccctccctatatcatcctcgccgccccactcactcgccgctcgcctcacacggctagctagctacctacctacacgaagaaccagagcttctctcgctcgccttgccgtgcgtgatcttgctctttctttctctctatggaggcctcgccgcctcgcagcgacaccttctcccgcgactacaagccggggccatcgttcgagcgcctggacgccgacgccgccctcggcgagtccttcagcagctccaccgcgtccttctccttcatcgacatggaccccgaggagcagctgttctcgatgcggtggacgtcgtcgtcgtccgagggagacgggctccgcttcggcctgccgcgcgctgcgggggcgtgcagctccccgctgctgcccgccagcgccggcctcgtgttctcggacgacagccttcttctcccctgcgacgcgtcggcgtgctcctcgccggcgttccacacggcgcagagcacgccggcggcgtccgtggccagctcggcccggcgcccagctggcggcgctaagccgctgctggcgacgcggaggatcctgctcaggtacctgcgcttcctcgtgcccctgtgccgcaaggcgagggcgctgcggcggctgccggtgccagcagggcgggtgttcttccccgcgccacgcaccagggcgctggccacggcgaccccagcgcgccggtcgacgtccagcgcctcctcgccgtcgccgcccgccgccgcggagtactggtgccacggcaacgccgacgtcgccgtgcgcgacgccatcctccactgcaagaaatccttgctcaccgcttgcgccgagtgctgaatggggctctcggcctctcgcaatgcaagaacgctttcggcgaagcgactaagggattcgagaggaagatggatataatatttcgtctactctttttttctttttcacgtagttttgattttgcatgtatgtgcatacagtacagtggtgatgaattgtgcccatgggaatttggtcttgtgaggcgatttagttactgtctctttgtacagtagaggcatggcgttctctgtgttctctttctctgtaactatgcatccgtcgggggcatcgagccagtgcaaagtgctggaacaaacagaaccaaattgtgccacatattacccgtt

SEQ ID NO: 93078 - DNA, 255 bp, Zea Mays
ctggcgccctgcggcaacgcgaagtaggggtgcagccccagcccgacctccgtgtttttggaccgtttgtaccgcccgcccaccaccgtcaccactgtgtccgccacaggctggaacacggtcgggtctaggtacgtgaacgtggtgccggagtccatgatggcgcctccggaccctgctgcgttggtcgcgaactcccacgccaagagctgcaccgccttcccgcccaccgtcatgcccctcaacgccaggtag

SEQ ID NO: 93079 - DNA, 1236 bp, Zea Mays
agtcatcctcgctcgtgggccgtggcgtctgcctgactgcctgtcttgcagttgcagaccgtccaaaacctggtggcctagtggcgatcggcggccggagcagctaaatctaccggcccggcggctgaatcgatcggcgcagcgaccaaatctacggccggcgggcgggaggtggtcccctggaggccggatcggcaagtggggacttgggggcgtcgggctgctggtggggtttcgctggaggctgccgtcgtggagcaccggccaccggggctggcaggcgggcatcagcgatggagtaaagggtgcagcacgacagcacgccagcggccagcagggggcaccgggcaggtgggcagcagcaggggacaggctgcaagcagaaatggacattaaaggtcttgaggcagataaactggagtgcaggctctatgtagggaacctagacttcaggatgtcagagtccgatgtaatcaagatgttttccccttttggaaagattacagccgaggattttctgtggcacacacgcggtccaaagagaggcgaaccccggggctatgcctttgttcagtacaccactaaagaggaagctcagttagcaaaggagaagatgaatggaaagttaatctgcggacgcccaatggtagttcaccttgctagtgagagaagttctctaggctcttcaagttcacatagagcagtcaaagacaagaaattggcaggtggttcaggtgccaaatcacaatatactgatacagctgcaaagatagctgctataaaaaataagttgaaatctctggaggatgggggatgtagcacaaaaaaaccaagacttaatccagacaacttgacagaaatcagggaacagtctcataagaagttttgaagcgaggattttttttcgttctctggaacattgagtgcttttgccctctcatactggtgacacttctaaagctgctgctattctataattctagcttcagttagtcaagtgagtcacaagtgtagtgtttccacagtgtatcaaatatgtacaatagtttgtaccgatcatctttttcctgaatgaattgcccttttgatgggggaatcattgtgactacatactgttttgttattgacaacatattctcagtgtgcccctgttgaacatatgtttccttaacttaattgtgtcgcattagtttatccacctatacttaaatcgctgaccacacttttctagaaata

SEQ ID NO: 93080 - DNA, 1041 bp, Zea Mays
agtcatcctcgctcgtgggccgtggcgtctgcctgactgcctgtcttgcagttgcagaccgtccaaaacctggtggcctagtggcgatcggcggccggcatcagcgatggagtaaagggtgcagcacgacagcacgccagcggccagcagggggcaccgggcaggtgggcagcagcaggggacaggctgcaagcagaaatggacattaaaggtcttgaggcagataaactggagtgcaggctctatgtagggaacctagacttcaggatgtcagagtccgatgtaatcaagatgttttccccttttggaaagattacagccgaggattttctgtggcacacacgcggtccaaagagaggcgaaccccggggctatgcctttgttcagtacaccactaaagaggtaattgtagtatacatctcctgtggcaaatgacagttggttatggtattcccagttctcacctttggcacctgatgtaagcattcaggaagctcagttagcaaaggagaagatgaatggaaagttaatctgcggacgcccaatggtagttcaccttgctagtgagagaagttctctaggctcttcaagttcacatagagcagtcaaagacaagaaattggcaggtggttcaggtgccaaatcacaatatactgatacagctgcaaagatagctgctataaaaaataagttgaaatctctggaggatgggggatgtagcacaaaaaaaccaagacttaatccagacaacttgacagaaatcagggaacagtctcataagaagttttgaagcgaggattttttttcgttctctggaacattgagtgcttttgccctctcatactggtgacacttctaaagctgctgctattctataattctagcttcagttagtcaagtgagtcacaagtgtagtgtttccacagtgtatcaaatatgtacaatagtttgtaccgatcatctttttcctgaatgaattgcccttttgatgggggaatcattgtgactacatactgttttgttattgacaacatattctca

SEQ ID NO: 93081 - DNA, 360 bp, Zea Mays
atgaccgggaacgtggctcagctctgttcccctcctctgacccggaactgggaggataaatgggaagccagcagagggggaatccgccacgggagctccgccgtggatcttgacctccgcagacgctgggagcaagaaggctcatcgcatagcttcatcaagcccttgggattgttcgcgtatctgtgccttgggggaaattgcgtctggagaacccgtaattcctcgccgggcgtgaagactgcgcgggcgccgtcgagtcacggacccgggcatcgcggtcctagcgcctccgccgtaggaaatcacggcgccgccataccacgtggtcgggtgtccctaggccaaaagcaccggtaa

SEQ ID NO: 93082 - DNA, 2048 bp, Zea Mays
cttttttagaaactcgtcaccgtccaccattgcgatttgctagcctcggcgcgtccagaccgcgacggcattggcatgaggggaggaggagccggagagaagctccaccacaaggaggccaatgccgcgcacggcgccggcgccggcgccgcggggaagggggccaaggcttgtttcgtcaacggcctcctcctctacgtcgtcctgccggtgctggtcttgtacttcgtcatcatcgccgcctcgcagttctacaaccctcggtgctcgccggagggcaaagccatggcgacgcatttcgttgtggctaacaagcccaacgcgtcgttgaacggatcgactcctccaccagcgactctggcgtcgtccaagacgaggccgacggcagaagaagcgcccaccgggctgcgccatatcgtgttcggcatcggcgcgtcggcgtcgctgtgggagagccggaaggagtacatcaagctgtggtggcggccggggcggatgcgcgggttcgtgtggatggacaagcccgtgggggagttctactccaagagctcccgcacggggctcccggcgatcatggtgagctcggacacgtccaagttcccctacacccacggcgcgggcagccggtcggcgctccggatctcgcgcatcgtgtccgagacgttccggctggggctccccggcgtgcggtggttcgtgatgggcgacgacgacacggtgttcctgccggagaacctggtgcacgtgctgtcccagtacgaccaccggcagccgtactacatcgggtcgccgtcggagagccacatccagaacctgatcttctcgtacggcatggcgttcggcggcggcgggttcgccatcagccgcgcgctggcggaggagctggcgaagatgcaggacgggtgcctgcaccggtacccggcgctgtacggcagcgacgaccgcatccacgcgtgcatgtcggagctgggcgtgccgctgacgcgccacccggggttccaccagtgcgacctgtggggcgacgtgctgggcctgctgggcgcgcaccccgtggcgccgctggtgacgctgcaccacctggacttcctggagccggtgttcccggcgacgccgtcgcgggccggggcgctgcgcaggctgttcgacgggcccgtgcggctggactcggcggcggtggcgcagcagtcggtgtgctacgaccacgcgcggcagtggacggtgtccgtgtcgtgggggttcgcggtgatggtggtgcgcggggtgctgtcgccgcgggagatggagacgccgatgcgcagcttcctcaactggtacaagcgcgccgactacacggcctactcgttcaacacgcggcccgtggcgcggcagccgtgccagaagccgcacgtgtactacatgcgcgggagccggatggaccggcgccggaacctgaccgtgacggagtacgagcggcaccgggcgaagcaccccggctgccggtggcgcatcgccgaccccgccgcgctgctcgacagcatcgtcgtgctcaagaagcccgaccccgacctctggaagaggtcgcctaggaggaactgctgcagggtggtgtcgtcgccgaagcaggggaagaaccggtcgatgaccatcgacgtaggtgtttgcagtgaaggcgagttcgccaaggtttaactaatccataggtaagtgtcaatctgatgcatatgcatgacatgctgctaatcctctggctggctggcctaaattctgcatcgtggctctcgcagggggacggattgtttgattgattaggagagggaaagaggaattgacggcggcagaagaggtcccggaacaaacagcagggagagctaaaataggctattagtcactagtcacagcgtatccagcagcaggtcgatcgtgtctgaaacgctctctgtctccgtgtacgtgtcgacgcatctggcgagtgcgccgttttgagttgactgcaatctgtagtaacttggtgcgtggtttagtcttagtgtgccggattgctgggatggtttgtgtttaagtagcaacca

SEQ ID NO: 93083 - DNA, 337 bp, Zea Mays
tggacaagtttcatgattttctgactttgtttgtgttttatacaatttttaaacatgtggatggcaagttcacggccatgtttagtgagcatgttgctcgaagtttccggtccgctcctgaaatcggtcgtaacttgtgctaaataacatttgtatcatttttgcatgcacgattatccaagtttcgagtgacttgcagttcaaatctaaattttccgaagaaattcaaataaacgaactaaatctactagctattgaaaacactgttataattgtcccaaaatggtacatgtaggtctatatagtgtaggaacacaccacaaaaagtttggttggg

SEQ ID NO: 93084 - DNA, 970 bp, Zea Mays
ggagatttatgacaaagggggagaaattttgcattaaagcttacctttagtcttatgtaactaagtgttagaagacttaaaaaggggagaaataattaacaaaaagggggaaccataagaaaaacataagatgtagaaagttgatgagtgcatactatgtcatgagcatcacgtttattttatgacgcactgcaccctatgaatagtatgatataagttgtctccatactttgacccaaatatgtgcttttggcatttgagtacaaaattggtattttctgaaatgcacatatttagggggaggaaactatatcataggattcaaaatcttatttatcaaatcttatgtaagctttaaatgtgttgtcatcaatcaccaaaaagggggagattgaaagtgcattcatcccttttgtgagttttggtgatttggataacaacacatttaaaggtctaacaagtttgctaagtgttgaacagggaattcagtatgatgaacatacttgaatagtgtataatgatcagtgaacaaagttcaacacaaggtcaaataaccagtgagacaatgcaaatggatataatatggtctctatattggtttgaatatatggacaagtcctgagaaatcactatgcataaatatgatcataatagaggttgaagtgattaagaggattggtcaagccaaagtgaacaagatatgaggaatcgtgaattggcttgaccatattactattagtccatatatgaatatatgagaatcaaactagagcttgattgatcttagcagttatatctagatgacattcaagcaaggttcacaatattgaagaaatgattctctcaatggttgctcaataggatgtgactcaagaatgtcttgatagggtgaagatagcaaggaaagggcttcgaggaactaagcgaaggtgaaggccaagcgacggcttgtagaccgaggtaccatggc

SEQ ID NO: 93085 - DNA, 331 bp, Zea Mays
ctcttgatcgtttaaagaggataagtttctctttgaattgtcaagcctatcaaaagctaagatagaaattcatgattataatgaagaccatatggcatggaacaaaggtgtgtcactccatgaactattgtattacatttgtgtatctaggctcttacaagttagtgtatgcatgtatatgcaatatcttaagtcacatcatacggttgcacttgaatcttggattaaaatattgcatatcatgtctattagtataccgtttgattatgagtaattccttaaattggtgcaatttcatattttcatactttatttgtaccaaggttcaaat

SEQ ID NO: 93086 - DNA, 335 bp, Zea Mays
gtgtttctaatgctctcttttctaagtgtttcaataaggtctttccaagtgctttcaagatggattcaaaatctacggatataagagtcttggttgtttcaatcattgagtttcaatcggtctcatatcaagtatgattgaaccaagccaagatgaatgaagttcaagatcgcctggttggatgaaatcataaagagaaaagaaatcacagtgattcaagaagggagttacactttttgtcaaccaaataatgaagatgtagtgacatatttagatgatatccttcattatgagtctcacaccttggagaacatcaaacgaggatgagtggttcc

SEQ ID NO: 93087 - DNA, 411 bp, Zea Mays
atgcaggctgtaccgaccccggccggttcagagaaacttcttttttttttcgccgaagaattttcgcttttggaaaggagacacggtcagggtcagtgccgttctaccagacgcctcctaactttttcagaccaagctactccaggacaaaaattagacaagacatctggttctgggaccaggaaccttctcgttcttcttgacgccagaaaccaggagaaacgtcctgcccagctttcgacggaccggtttaagaagtcaataaagggaattcttggttctattattgttccatctacatctgacttgagtgtggcccctcccttgtcaaacatctcaggttcagaaaatgagttcaaagaaagcccaacaaccttttgtgcaggtcaaaatgtgcatatggctgtttaa

SEQ ID NO: 93088 - DNA, 812 bp, Zea Mays
aaaccaaacccgcgagtcgcgacgccgcaccccccgccccacgtccccctcaaccgtccgacggcttcaacgcggcgaagcaaccacagacgagctgctagctgcctggccgcgtgtccgcacccgcacccgcatccgcttcccttcccataaaaaagactccggcgcgcagccccaccgcctgatcaccggggtcgcccgttcgtcttgtctagcgaccagcgcgcccaggccgcccggccatggagaagaagctgctgctgccgctggcggtggcgcacaagcacgcgcacggaggcggcggggagcggccgtgggcgcggccgtggcggtgggccaagaccgccttcttcgtcgcggcgatgctggcatcgctcctgctcgtctgcgcgccgccgctgctcgtcgtgctcctcgacctcgcgctcccgccggcgctcctcctccgcggcggggatggcggcggcggctcgctcgcgctggcggtcgtggcccaggcgcgggcgttcgacttccgctcctcgctcgtcgacctgcccgccgtctccgcggcgcgcgcgctgctcatcctctgtgaggttaaaaggaggccatcaaacacccaaagggcccaagcagtagtgtagcgtctgacactccgttcccatcatcacacacgtgcgtaggcgcccgaaagattgatttccattttaggagcaaattttggttgagttgtacgctaagatacatttgttactcgtgtaaactactgtcactgccacaagtgaacatactgtaagtaccaaacggtcgtatgctagctcattatcagc

SEQ ID NO: 93089 - DNA, 468 bp, Zea Mays
atggagaggctgctgggatttctgggcgcttgcttgggggatttttctgggcgtccatgggaggtggagctcctgctgcttccatggaaaaaggtagggcgcaggggaaagtggagccggctgggagaaatggcgccgtggaagaaaaagcttctgctccctgcgcacgtacaggaaatagagaggagctgctggtggaggaagaagaagggggagccggctggtggagatgggagagctcggctccatgcaaatatggagctcgccatttggagcagaggcagggggcgtccttggctgcagggcgagatcggcatggagaaactgcttgctgccgtgatgcgggaggaagaaggggcgccctgctcttacacgtttggaggaaggggaggacgccgggccatggctgctgcgctgtggaggccgtcggccatgggaggtagagagcaggcagggaggtggagctga

SEQ ID NO: 93090 - DNA, 911 bp, Zea Mays
aaatcaacgaacaaagagaaagttagaggcggtttgtcattagactcacttcccccaaacccaaggtgcgagagctgcgaccgccgcagccgccatgtcgggaggaatcgcgcgcggccgcctcgccgaggagcgcaaggcctggcgcaagaaccacccccacggtttcgtggcgaggccggaaacgctggccgacgggtcggcgaacctcatggtctggagctgtaccatccccggcaagcaggggactgattgggaaagtgggtactacccacttacccttcatttcagtgaagattacccaagcaagcctcccaaatgcaagttcccacagggttttttccacccaaatgtttatccttcaggaacagtctgcctctcaattctcaatgaggatagtggttggagacctgctatcactgttaagcagattctagttggaatacaagacttgcttgatcagcccaatccagctgatcctgcccaaactgatggttatcacctattcatccaggatccaacagaatataagcgacgtgttcgtctgcaggccaagcaatatcctgctctggtctgaggatgttggcataccagagatccatgatccatcctgcacatccgcatagtagttgcaaatgttaaaattatggtctcaaattggatttgacaagacataagttgtctggaggattgtccagtgtaaacctgaaccttctatgatgtgtatgagtccagtattgatagcaagaacagattcgtttactgctgggagtgctgcagccactgatattttgtctatttaacttaaactatttgttgtgttggtgctctatcttgaagacatgtttcgtttgtttatcgaaggaggttatccgcttttgtctaaacagaataaaataaaagactaaaaa

SEQ ID NO: 93091 - DNA, 744 bp, Zea Mays
agctgtgtccgctcctcctagtgatcccgcaccgtgctgtgtccgctccatcttccttcgccgccacgctcatcgccggtgcgagggcatgtctacctacccgaggacctacgatctcatccatgcggactcggtgttcaccctgtacaggaacagggagaagatcctcctggttgtcaagacgtattggactacccatgaggccatgaccaagatcagtagcaggactgtcaagtaaaattctcaatgttgataagcatttttcatgtttggatttgtaccaccgtttctagctccttgagctagtgatctcttgacggtttgtgcttgctattctttctggacagtacttgctcggataggaaatttaacatgtgggggaaggaagggtaggtagtaagacccctggcccctgcaaagttttcttcaattccgaattgtgtccaaatggtaaatagaagtcattgttgcgagtcacctcgaccccggataagcacaatcacaactggattcattctagcattacaattttgttctgtgtaatttccttttttaaatcttattagcatgtgttgttccagatctattaatgatatgaaagaacactgcttctggtcccaaattatggagagaaagggtccaacagtcgagatggctgaatggtgccaggaatgaattggtaatgtacaaacacatttgacaggacagtaggccatgtaaacaggtctctggtctctattaaaa

SEQ ID NO: 93092 - DNA, 182 bp, Zea Mays
gtcacaaaagcaccaaagctacactaatgcttcaagcagttcaaaagcctttagacaaccactccagcttcttgtatcctcctgttttaaggtacaagctttctttttccagaacaccctccactagacggtgttgcagccttatgcaccaacttcagctggtgcaatcaaggttaatcatc

SEQ ID NO: 93093 - DNA, 1168 bp, Zea Mays
cgcaaacggggcccggcatccgttccatccccaacgcccccatcttatcatcttcccccggggaacgtgtggcgcccgtgccccacttcatccgcgcgcgcgtcagagactcagagcccaagcatagacgtgcgccttcagcagcgcgcagcgacgtcacctgagcgcgcgacacgccccagcgtccacagttcactgcgcgcgcgtcgtgcaggacaccacaccatggcacctgccgcccctgctgccacgggcgcggcgagccccgccgtcaccaagggcggcggcaaggttgcagcacgctccgtcaggctggggctgcccgcgctgccgccgctgcccggcctcagcctcgccgcgcagggccagacccgggccgcgtcgtccttgtacaagcggctggcgagggacgtggtggccatggccgcgggggagccggcggcgcctcaggctgccaacgaggagctgaccgagttcgtcgacgcgttgaaaaaggagtgggacaggatcgaggacaagtacgcggtgaccacgctcgccgtcgccgccacgcttggcatgtggagcgccggtggagtagtgtcggcaatcgataggctccccgtggttcctggtctgatgcaggccgttggaattggatacagcgggtggttcgcgtaccgaaacctgctattcaagcctgacagggatgctttctttgcgaaggtcagggagatctacgaggatattatcagcgcttaacagatgggagcaccaatgcaaagctcatccaaattaatgaagttcactttaagacatccttctagtttgctgctgttcagttgtttttgctgtgatgtatttcagtgtagcttctaatttggtccttactcagtgcacgtatggataagtaatttggacgttaaatttagttttctggcccaacagattcggttcacgcaaaaaaaaatagtagccactacaacttgtccagtaatcatgttttttttttgcaactactacaatttgagtacaactaaagtattatcccgataggaagaagtccatagtccacgtgtagctatcgaaacgccgctcgagtccgattctggccattaaattgcagatatagatcaatttagtttcaaatactgtttgctcctttatacgtaataaaaataaataaaaa

SEQ ID NO: 93094 - DNA, 1862 bp, Zea Mays
tatatagagatagggattagactcccgagtgcctttgccttccttaaccaagaagcatatagctactgattgatgtctgcctgggtgcgcgtataaaagctagctagtgccgtaaagaaagagagagcgagaacgagtggcgatggcagtactgcacttgcaggcggcggcggtggcggtgctgctgatggcgacggggctgcgcgcgcagctgcgtgtgggcttctacgacagctcgtgcccagcggcggagatcatcgtgcagcaggaggtgagcagggcggtggcggccaacccgggcctcgccgccggcctgctccgcctccacttccacgactgcttcgttggggtcagtccctcggtcgcaagctcgcagctgctgctcacacttcaaagggctggtcgcaaaccaagaacgactgaccgcttgtttctgcactacctgcagggctgcgacgcgtccgtgctcatcgactccaccaagggcaacacagcggagaaggacgccgggcccaacctcagcctgcggggcttcgaggtcgtcgatcgcatcaaggcgcgcgtcgagcaggcctgcttcggcgtcgtctcctgcgcggacatactcgcgttcgcggccagggacagcgtcgcactcgtaagtcacactgctttagtgtcagtggacgcctgccttttgattttaacccgacatgattagtttacatggatttggaatccaatgctggactggactagactgaaaagcatatgtgtctgttcgaccttttttgacgcacatgatgccgcgtgcagctgcctgaaagaactcgatgcattgccgggcccgggcatgggtccaactcccaactttatttacagtatttgcttactctccaatccatccatccatccatccgtacgtataggccggcgggaacgcgtaccaggtgccggcggggcggcgggacgggtccgtgtcgcgcgcgtcggacaccagcaacctgccgccgccgacggccaacgtcgcgcagctcacgcagatcttcggcaccaagggcctgacgcagaaggagatggtcatcctgtcgggcgcgcacaccatcggctcctcgcactgcagctccttcagcggccggctgtcggggtcggccacgacggcgggcgggcaggacccgaccatggaccccgcgtacgtggcgcagctggcgcggcagtgcccgcagggcggcgacccgctcgtgcccatggactacgtctcccccaacgccttcgacgagggcttctacaagggcgtcatggccaaccggggcctgctgtcctcggaccaggcgctgctcagcgacaagaacaccgccgtgcaggtcgtcacctacgccaacgacccggccaccttccaggccgacttcgccgccgccatggtcaagatgggctccgtcggcgtgctcaccggcaccagcggcaaggtcagggccaactgcagagtcgcctgattcatcgtcatcactcgtgtggagttgtagattcattatattgattgatttggaccggacgacgtcgacgggatgctacatggcctgcttgcgcaattgtatgtatgcctgtacttgcgcgtgtatgggtttcgctgtgcaaattttcgttgtctcccccgattgattgaggcgtgtgtgcgtgtgtgtctcttctgaatctgaatggaaaatctgtaacctgagctaaaactgctcgtgtactacccaatagttgcttcaaactacgatggatttttattcaaactatcacttccaaacacgcacaaatatgtactcaatcaactagggatcggagaaactggtttgtaaagggaattttataaacacaagctattcagacatgtaact

SEQ ID NO: 93095 - DNA, 1634 bp, Zea Mays
tccatcgcccccaaggccccaatcatggctggaaagctagcccgcccccaattggcaggcactctaccaacctatgtgtcccctgtgcacatgcctggcatatggcacactcactgctggtctggccctaaacccacatttgttatatagagatagggattagactcccgagtgcctttgccttccttaaccaagaagcatatagctactgattgatgtctgcctgggtgcgcgtataaaagctagctagtgccgtaaagaaagagagagcgagaacgagtggcgatggcagtactgcacttgcaggcggcggcggtggcggtgctgctgatggcgacggggctgcgcgcgcagctgcgtgtgggcttctacgacagctcgtgcccagcggcggagatcatcgtgcagcaggaggtgagcagggcggtggcggccaacccgggcctcgccgccggcctgctccgcctccacttccacgactgcttcgttgggggctgcgacgcgtccgtgctcatcgactccaccaagggcaacacagcggagaaggacgccgggcccaacctcagcctgcggggcttcgaggtcgtcgatcgcatcaaggcgcgcgtcgagcaggcctgcttcggcgtcgtctcctgcgcggacatactcgcgttcgcggccagggacagcgtcgcactcgccggcgggaacgcgtaccaggtgccggcggggcggcgggacgggtccgtgtcgcgcgcgtcggacaccagcaacctgccgccgccgacggccaacgtcgcgcagctcacgcagatcttcggcaccaagggcctgacgcagaaggagatggtcatcctgtcgggcgcgcacaccatcggctcctcgcactgcagctccttcagcggccggctgtcggggtcggccacgacggcgggcgggcaggacccgaccatggaccccgcgtacgtggcgcagctggcgcggcagtgcccgcagggcggcgacccgctcgtgcccatggactacgtctcccccaacgccttcgacgagggcttctacaagggcgtcatggccaaccggggcctgctgtcctcggaccaggcgctgctcagcgacaagaacaccgccgtgcaggtcgtcacctacgccaacgacccggccaccttccaggccgacttcgccgccgccatggtcaagatgggctccgtcggcgtgctcaccggcaccagcggcaaggtcagggccaactgcagagtcgcctgattcatcgtcatcactcgtgtggagttgtagattcattatattgattgatttggaccggacgacgtcgacgggatgctacatggcctgcttgcgcaattgtatgtatgcctgtacttgcgcgtgtatgggtttcgctgtgcaaattttcgttgtctcccccgattgattgaggcgtgtgtgcgtgtgtgtctcttctgaatctgaatggaaaatctgtaacctgagctaaaactgctcgtgtactacccaatagttgcttcaaactacgatggatttttattcaaactatcacttccaaacacgcacaaatatgtactcaatcaactagggatcggagaaactggtttgtaaagggaattttataaacacaagctattcagacatgtaac

SEQ ID NO: 93096 - DNA, 579 bp, Zea Mays
cccactcactcacccgttgcctccaaactcatttctcccgagcgccgccgcgagcctccgtttcagcttcgtccatggcttccctcaccggatctgctctctcctttgcgaggcccgtcaagacaaaaatggcagaatggaatccagagaaggatctgcttgctatggttactgatgactccaaggttcttctccatcgcttcaattggcaaaggctttggacaatctctccagggaagtgcatcacatcaatttgttggagccctgatggtaaaataatagcacttggcacagaagctggcttgattcttttgcatgatgtggaggtgtgtatctggatgatgataaaaattgtcggtgtctattgtatctttgtatgaacattcgtttgtacttcatagacacctgatccagtgcctatcttctcttaatatttttctaattgcttattctcatttttatatcatgcttaaaccttatgagcgaactattaggagacatttaggggatacaggcctcaaggacttcttgcccaattatgttttcgatagaggcattttaatacttcttgaagattaa

SEQ ID NO: 93097 - DNA, 89 bp, Zea Mays
gcttatatgagtagtgatacacgcatgcacatgcatgctgttatatacataactctgattttctggattaaattaaaattgaaaatgac

SEQ ID NO: 93098 - DNA, 1265 bp, Zea Mays
tgtctcatctacgctgatgcctactgatctacagccacaacaccgtacctttgctgaatatctcacaactgcaaaccacacacacacaccaccaacaagccaacaaccacgcacctctcccaagctagctagatcccgttaattttcttccctatataggagtatcttttgatcaccagtcctgtcctgttacaagaacagatagcactctttatccagcagctagccaatcgcctgctatcctatgcaagttcgtcagatccaccatataatattgagctaatctaaccctaaacacccccatcctaagaatagttgtgggatttagtactgttacataccaccagatccctccctgaagtagcgtgctagtcaaaagtcaacagctagctatagcaccagccggagctcgctcgagacgcgtgagcggagcggggagccccatggagttcaggcccgcgcatgcccgtgtcttcgaggattccgagaggcctcgcggcggcgtggcgtggctggagaaggagcacatgttcgagaaagtggtcaccccgagcgacgtggggaagctcaatcgcctggtcatcccgaagcagcacgccgagcgctacttccccgcgctggacgcctcggccgccgcggcgtcggcatcggcgtcggcgggcggcgggaaggcggggctggtgctcagcttcgaggaccgggcggggaaggcgtggcgcttccgctactcgtactggaacagcagccagagctacgtgatgaccaagggatggagccgcttcgtgaaagagaagcgcctcggtgccggggacacggtattgttcgcgcgcggcgcgggcgccacgcgcggccgcttcttcatcgatttccgccgccgccgccacgagctcgcgttcctgcagccgccgctggcgtctgcgcagcgcctcctgccgctcccgtcggtgcccatctgcccgtggcagggctacggcgcctccgctccggcgccaagccggcacgtgctgttcctgcggccgcaggtgccggccgccgtagtgctcacgtcggtgcccgtgcgcgtcgccgcatccgcggtggaggaggcgacgaggtcgaagcgcgtccgcctgttcggggtgaacctcgactgcccgccggacgccgaagacggtgccacagccacccggacgccgtcgacgcttctgcagctgccctcgccatcgtcgtcaacatcctcctccacgggaggcaaggatgtgcgttctttggatcttggactttga

SEQ ID NO: 93099 - DNA, 96 bp, Zea Mays
ggccaagcttcctcaatctttattgttgcttattaaatatacttcaatgtttataattggcccaagccatgattctaaatttttcatactcttttc

SEQ ID NO: 93100 - DNA, 3600 bp, Zea Mays
cgtcgcataccagaccagacctcaccttccccacccggacgccaccaccgcctgcgccctgctggctgccgcgatgctgccgtactccggtgaccaccagcgctctccgccgccgcagccaccgccacgagcggcgttctcctcctccctctccccatccgccgcgcccttccccgccgctgatccggtgggcccgggcccaggccccggccgtgatctgcccaccgccccgtccgtctacacggcgggcggggactggggcgccctgtcgtggatggagcctcccgcgagctacatggcccccgccgccacgccgccgggttataaaggcgaggccactccctatgacatatactcaaggaaccacttcagtaacttatttggtctacattctctgagatcagagagctcgaatttgacaagtgagaagcatccaggaaactggcaagaaagttcagagaccctcactaaagattttggaccatcagtgtttcatcagcagcagagtgcctttgtgagtaaattgcttgatcattcaggtgccgaagacacaggaccttatcccccacgacaagatttaaatcagtatccttttggttctacatatgacaaatacatgacacagctttcgtcatgttcaacagatacacgacctcacatcttttctacacaatatgtcaattcacctgaaatggccaatacaactgttccattgatgaatgacactattggggaaagttccttctccttttcgcattatatgaatccttgcagaatcaatcttgattattttgattccgtgtggaatgaacaaaaaggtcttggataccaaactacagataagcagcatggaaaatggagtaaccctgatgacaaggcaacagtggggaactattccctcaattctcttggagagagtcaccttaatcctgagcatttagggaatgggagaccaatgcagggatcttctgaaatgaaacatgaattgggaagtttcagttccaaggtttcttcgtctgagtctggatttgttcagcctcgtgaatgttcatctgagtttcctgaggtcaataacaccagtgttgattcaccttgttggaagggcacaccagcccagtaccagccttcgtttgggattattgaaaataatggcgctcctcctgtggtgataggaacagtaggctacattaattcacatcaaaaccagaaactacctgagttgagttttgagtatccatggcgattctgtgaacaccaagtatcaggttctgaaaatgacccttttaaggcggtcaagttgcctgaaagatgtaaaatctccaaagatcataaagttctgccaattgatgtcagggttcttaatgacatgactacacatgctagttatttgcctgacaaacagcatcccacaacacagaaatgcaatgattctggagaagattctaagaatgtgataacttcaagtcaacaggaaagttcgtgttctggcagaaaaccaatacttttgggtgaacatggtggcagtcttacaggaagcataagtgaactaatgagtaaaagtgtgatgaatcctattgctattactcctagagttcatactgatcatttaacaacaggaatcccacatggaaatattttttctgcagcggtggagaaagaagaaagcactcacaagagaggtgaagacccttctcaatgttatccaggtgttgaggggaatatgctgaatatgtcttccgaatccagctctagcaatcaggcaatatttctgaaactaatgcacaatctatcagtagtgcttctatcgacctgcaagggtggttcttcattacaggaagatgaagaggaacttctccaatcagtgattcaaaatcttacagctgccagttccaaaagaagcaaggttgaacaaaaaaatgatgatggattgagtaactccagccaaatgaaattcaaagatattaattatgtgaggaaacacttttggaggtcaatgcatgaagactcagaacaggagaatgctgattcagaatttaaggccactgtttcacaggttcttactaatcaccaggaggataaggtgctcgacaacactgaagttcctcaggcatcaatctatagaaacttgtggattgaagcagaagcttcagcttgtaaactcaaatatgagcttcaacatgctctcctgaagctcgagacagcaaaaggcctcaacgacacaataaaagcccctgactcattggaagacagtaaaggctctaactcatacattttcagtaacaaaccacagaaccatgggaaaggaaccgtttcatgcgctgcggcctttcagggccacggaggagattctcgtgacaagcaatctcctgttgtaagtaggagcattttcaatggtgttgatgctgatgtgtttgcccgatttgaagttttgcagtcccgtattgataatataaactccttgagtgagattgactgtggggagcagaaagaagcaagcaagagaccatatgcagtcgaagatactgttatggcgagactgaaagttttgaagtctcgtcctgacaatataacctctttgagtcaaggaagcactaaacaccagctagatggaagcacaaacagtgcagataatgttgatgacactgttattgctaggctgggaattttggagtcccatcctaataatgaagccctattgggacaggaaagcagcaagcgacaactggatgcgagaacaaatagagaagatgggattgatgctgctgttatggctaggctgagaattttgaagtctcgacctgataatgaaacctcaatgggcgatgccaacaaggagcagcaagacgcatgtggtgaacaattaaatggggatgaccttggtattgtgtccaatggagccattagcaacaccctgagtgagaagtgctctaagtttacgcactctgatgatcatttaggagaaaaaaactcagtaggtgtcccggacacatttggtgatggaaacagtgctagggagaaaaaggaggttggtggttcagcagatgttgctacccccatgaggtgcaaaggtacatctgatggagtgagcgtcggaagcgcagtacatggtgaagataatcttggtgaaaaccatgtgtggcttcaaactgctggggactctcatgtttgcacagaagggtctcaggaagcgcacccaatctcctctccagttgaccagtatggtggttcacctacagagtgggagcacgtgctgaaggagaatttcttccatccaggcaaattggcgaattctgacccataaactggaaagcttttgtttcagctcatgttgcctcaaaatgctgatgcttcttgtaaatatatgatacgatattatacatcccctcccccgaacctttgtctctatgttcaataatctgcatatctggtgatcaaggaaacgcactgtgcccccgatggtgctatatggaactagtctggtttgtctgcttgggtctatcatgccatagtctatctgtaaatggcacatgtatgttctggaccgagagtgaattattgtatatatttacttccagcaaatttggatattgtggactgtgc

SEQ ID NO: 93101 - DNA, 636 bp, Zea Mays
tcacatgatccggcaggcggcgttgacgtcgtcgtcgttgaacatgttaccgacggggccggcgccgcgtgcgggctcgcgcatgcggccgtgccggtcgccgtcgctgtacccgtgccggcggtagttgtagctgttgcggcggtacgagccgccgtcgtcgcggaagtagctcctgggggacgtgaaccacagcggcgtgccgccgctcggccagaactccgccttcttcccgctccgccgcacctcctgcagcactctcgccctgtccacgtacccggtcaccgtcaccttctccattggcacgttcacatccacccttatagtacctcggaggttctggagggcttgtcgcacgactctctcgcagccctcgcagcacatcctcaccttaagctccaccgtctgggacacggtcctcctgctccggccgctcgccgtacggctgccggcaccgcggtggtgatacgccgcatcacggccggtcgggtgcgcgtggccgccgccgtagtggcgcgttccgccgccgcggtggtggtcgccgggagcgtagaagcagcagcagaagaaggacaggaccaggtcggagaccacgtccgccgccatgcatgtgtggctggaggagcatataccaga

SEQ ID NO: 93102 - DNA, 552 bp, Zea Mays
aaatcctaaccttctctccttccttttgatcttcccctctacgcgatcgaaaccgaagctcgaatcaatcctccacccgtttccagcccctcgtcccggagccccgatccgcctcccgtctcctcctgggcaggtcccccttttccgcgtgtgcgttggccggccggttcccgatgagggggttgctggcggtggaggccgcgggcgcggcgtcggtcccggcctcggtactccacggcgccgtggactggtggcgcgacgtcaacgagtcgccgctgtggcaggaccgcatatttcacgcgctcgccgtgctctacggcatcgtctcggccgtcgcgctggtccaattaatcagaatcgagtgtagggtgccagagtatggatggacaacgcagaaggtgttccattttctaaacttccttgtgaacggcggtgagccagcatttgtgccgcttgcaatacttagcttctgctaggtgtttaatttggtgtactgatctcttgtgagctcgattcttggccgtgtgtgtgcgcttttgctgtggatttgtg

SEQ ID NO: 93103 - DNA, 4686 bp, Zea Mays
atgcgccgtccccatgacgccagcgacggcgacgaggatcgcggctacccgtcgagctccgctgtcaacggggccggcgatgaggaggaggagcggcgccaggcggcgcggacgccggggaaggacggcccggtggacgcgctgtggcggtggagaagccagagcctctccgagatagtgctctcgtggtccgtggaccaaatcctcgacaaggacctgctccgcgacaaggtgtcgaagataccagagacatttagcagcatagagcagtacatgacatcgtattttgggccacttttagaagaggttagaggtgacatgtgttcaagcatggaggacatctccaacgctccatatgcagacctgctctctgttaattcaatgaggaaagggaaggggtcatacgagatcagtcttggcagatggaggggaacgtctcatggctgtgggattgataattataagccaaaatcggctgatgttctactgatttcagaaacgaaaccggcaaatcaatctgatatcctgaaacagtccaaatcctgtgtcatcgtatgggtcagtaaggttaatggtaacaagatgacagtcaaggcatcacagttgatggagactggggctcaaggaggtgaacggcgaccaattggggctaataaatacgataagttgtatgctgaatgtttggacaagtcttgggaaatgctagatcaagaagcaatggcttcgaaatgtagaaactcatctgtgcatcgcaatgtctggaaagagtcacacaaggttgaaaagcgcagcgatgtgcatggaagaaatgagaaagagacaggtgaatcaaagcgatggtccttctatgccatgtacctgactaatatggtaacatatgaccgtgtttgggttgtgctccgaaggggtctgacaatggattcaaaaatcatccatagcatgttgggcagaaacaattatgctcttggacattgtaaacactgcgtcaataaatcacatgatgaaatcaagggtgatctctgtgattttaagctgaatgactcacaacttgatgctgtagcaagttgcattttggcaagtgaatgcactcacaggtcttctatggggctagtttggggtccaccaggcacgggtaaaactacaacagttgcagtgatgctacaaatgcttctgatgaaggaacagagaactctcgcatgtgctccaactaacatggctgtcctgcaagttgcttctcgtcttcttgagctgattggggacttctctctaagacacaattattcattaggtgacatcattttattcggtaacaaggaccgtttgcaaattggcaagttactgtcagaaatatatttggatgaccgtgtccagaagttgttgagcagcttcaacagacaacatgggtggaagcattgtgtggattctgttgtaacattcctaaaaaattgcaattctcggtacagaatgtccgtggatatacagcaaggaagcagtgatgcacgcgaccttacctttaagaaatattttacaagtagattcagcactttagccgatggattggtcagatgtatcgatacattctatgaccatctaccaaggagttccctgggcaagaactttgataaaatgatgttcgtcaaaagattgctagataaattgcagcagtcgctgagcgcagatgatgtgtctgatgagcttctttttacaatctttaatcctgccgatgaagttcctgactcatctggtagtcatgatgatctgatagatgatgaagatgactttcatgactgtaagatttctctagatagccctttggacataaagtctctttgcataaaaattcttatgtctctttcaaacatgcggcttccttgtgaagacaatgagctttcaatccgggacttgtgtttgaaacatgcgaaacttatattttgcactgcttctagttcatttgagttgttcagactgcaaagtgtgaggcctataagcatcttagttattgatgaggcagcacaactaaaagaatgtgaatcactggttcctctattgctacaagggatagaacatgttttactaattggcgatgaaaaccagctatcatcattggtaaagagcaagattgctaaagatgctgactttggacgaagcctctatcagagattgtgcacgatgggctacagcaaacacttgctggaagtacaatatagaatgcaccctagcatcagtaaatttccaaactccaatttttatgataatcgaatttcagatggtcccattgtcaggcaggaggactatgccaagagttatctacctgggcctatttatggtgcttattcattcattcatattgacaacgacatggaaatgcttgatagccttggtcagagttccaaaaatatggctgaggttgctgtagcagccaatatagtcgaaagacttgcaaaagagtgcactgagaagaggcagagaacaagtgttggtataatatctccttatacagctcaagtgattgcattgcaagatagacttggacgaaagtttgagaagcatgactttctatctgttacagtaaaatctattgatggatttcaaggtggtgaggaggacattattttgatttcaacagttaggtccaataaagatgggaaagtaggctttctctctgattctgggagaatcaatgtggcgttgacaagagccaagtactgcctttggatccttggaaatggaaccactttactggctagcaattcaatatgggctgatttagtccgtgattcaaaaaggcgcagatgtttctttgatgcttttaaggataaggacttagcagaagtagtcatgtttgcaactaagcctgagcaatggaatcgaagagaacagaggaatagtcgtgcaaatgaagcgccatcttggccatcatcatgggatgtggtggctgacaggaacaacccaccaagaagatggaatggccgtccagcttctagcaatgcaaggagcgtgaccaaatcctatgatcagggaccaaatgcatgtcgatggaccaataatttctcagctagtagagaggaaagttacagaactcgctttcagcacggcgaacccttgcgcagtggtcactacaataatcaatctcgagttgcgcctgctaatcaaaatcggttcaacaactacaatgcttcgagtgagtggcatggctctgtggaagggtatagaggatggcccaagcagcatgttgggccagaaccacatgccaggttgtcacatgaatgcagtagtagttttcaagaaggcgatgtaaggcatactcctagatcagcttatggggaagaatcacatggccaaattagtgttcttggctcatggcaagctccaggaacctactacaattgtggacctcagaatagaactgtttgtcctgagtttcagaacagagggtcttttcaacaaaggtttggttcatatggagctgcagattctggatttggtagggccaatggagacagacaattcaatagtcttgagcgacgagtgccatatggtcgaattggtggtcaaggcagaggaagaacttcctgccaagggagaggagatacaagaggatggcatgaacggtttgtttgccgttggacagaacctcactgtcaggtgcagaatggcggtttggaaattgcatcccacaaactgctagctcctgggcagcaagggacgaagaggaactggtgtaaagcagaatcatcagattcaccgcaacaggacaacacaaaaaggatacttggaagtgtagatcaacctcctggccctgggccagtttgtcatggtggttctggagctccctcccctgaacagcatgcttctagacagggagcagtgaagagaggtgtatgtgaagctgaatcgtcagatttaccaatacaggatgagtcctcagaagtaacactaaaacaaagtgcagataaacctctttgtaccacagaggatggcaattctggagctggttcctgtgaactgcctgttcctgagcagggtggggtggggatagacttgcgtgaagcaggaccaccagatataccatgtcaggttccggatggcagttctgaagcattccttgaactccttgttcccgagcatagggggatggaagccggcttgtgtaaagtagagccatcagatgcaccttatcagggtcaggatggcagtcctggaaccgcttcacatgaacaacctgtccctgagcagcgagggatgggaagagcagactcgtgcgctacagaaccattgtcagtacaccaggacagcacagaaaataaacctgaaaccgtagaacaagatagctagacagtagacacttctgaattttgatatgttacctttctttttctgctctgtatagaaacctgtgcataataagcatgtagggcctgattggttggggtggtccaatcctgcctggctgctttttggagctagggtaagctggcaaggttcaagtagtgcaggctgagttgtttggtttcatttttgagctcgtcctgggtggatgaagaatctgattgatggtcggtttaatgtagggtgaaaacggtcggaaacgatgagtaaacactaaaataattttcgttttcatattttttttctccgaaacgagatcgaaaacggtaactccggaaacgaaaacgactttggtaa

SEQ ID NO: 93104 - DNA, 651 bp, Zea Mays
atgaaggggagctgggaggagggcagcgctagcggctgcatctcgaagaagaatagggcggcgacggcacatggaggaagaaggtgtggcggcgccaccgactgcagcgtggcccagcgtgcgacagtgcccgtgggagacgacggcgtgcggttctcgttggcgaagggcgtcgccgcgggagggagagagcgcggtgggtgtcggcgcggcgaggaagaggatgaggtggcggtgcagccaggacactatggcacaattcttatactgttctttctatacaaatttgggcaaagtggaaacagatacagcatggtgagcaggaccagttgggcacatgccccatcgactgcgggtgcatcagaggaggcgccgcagtttttactcactaaacttcccaggcttgctctcctcagtcctcactcctctcctacaactccactgtatctgatacgtggcaagcaaggatcgggttcgctggagtcaggacaagccgtcaggatggcgagcctgacagagcaggtcaagaaggacgagctgctgcggactgcagttggatttggactgcagctgtgccagcaaatatgcggcgcttccatttgcttcaacgaactccaacctgtaacaaagaaggcgctggcatatctttag

SEQ ID NO: 93105 - DNA, 1848 bp, Zea Mays
aacacactagataaatggaagtgacaatctcgttcaaacgtggaagagaactcaactactcaagcactcaacttccaggcaccaccacagacccggaccaactgacccgacccgacccgaccccgccgctgcgcgcgcacacatcgggcatcgcattcgcaccggcgtccacggcccaaagcgccgtcgcgccatccccgtcccctccccacccgctctgccgttcgctgtttccatcccgccgacccgctgcgccaccgccacgctccccaatctccatcccaacgcgccgccgcctctaatctccctcgcttccgctccactccgcacccccggtcgcctgccctaacctcgtgctgctcgcgatcccgccccgtgcccagatctggtggcgccttcgccgctcgagcgcccccgctcagcggtgaagtgcaggcgtccgttcggccggccagccggccgatggtttcggccgcggcgcaggcgggcgtggtcgcgtcgtgcgtcgtgcgtgctcttcgtccccatggggctggccggccggcacctcagccgcaacaaggtgctcttcttctccggcgcgctcttcatctcgcttgctgtcgggatccacctatccccgtaccccccttccctttccctgccccacctcgcctcctttttactcctcccccaccctggctccgcgtccgcttcctccgggtcttcctgcgtccagttcctgcaccgcgtctcgtggtctgacgccgccggagccgccgacaatggctcgggaggcggaaaagcgcgggcgtggtcgtggccgccctcgctggcgtccgcctgcgggttcgctcgactgtcgcgcgacgacgcgtcactgctgctcaatggctcgtgggtgatggtggccggggactcgcaggcgcggctgctcgtgctcgcgcttctccgcctcctgctcgacccggccgcggcggcggccgccgagccggagctcttccgccgccacagcgactaccgcgctgccgtccccgcgcgggacatttccgtggacttcgtctgggcgcccttcgagagcaacctcacgcgtctgctccgcgaggatctgcgcctcgcgccgcgcctccccgacgtgctcgtcctcggatccgggttgtggcacatgctccacgtcacggacgccgcgagctacggcgatgcactggcgtccgtcgcgggcgccgccaagtccctccgctcgcagcttccggagccgccaccacatatgttctggcttggcttgccgcacctcgtgaaccacatgctcaacacagacgccaagagggcacacatgaacggcaccatggtgcatgcctatgatcgtgaggtcgatcggaggggtgttttgcgcggtgaaggcggctcattcctgctgcttgatgtggggaagctcacccaggggtgcgggcagcaatgcacagctgatggtatgcattatgatggtgatgtgtatgacgctgtcatgcatatcatgctcaatgcactggtgattgagtcccaacaaaggatttgagtgggtctgtgggagggtgtggggttgaacaggtttgtccccacccccttttttttttggtcagctactatacacgggtaattagagattgttgtgaactaggaaggtcctttggttgcttcaacattttggtcgcttgccagaagtcagcacccttgaattgctcaacccttagattgtaatatagggatatcttagaaccacactgttttttttgctaaatggcaaaccgaactggctataatgtatactttttcttggggaataactaaggtggtgattctgacatgaagattatgaaatattacaaaata

SEQ ID NO: 93106 - DNA, 973 bp, Zea Mays
aggtcaactacgctgttccaaagcactacggacgccaaacacaacgagtgatgcaagaaggagtctcgtgacggcgacgtggacagtcgcgcgactagagcttgtcgagcatggtgacgaataactccacggcgagggttccagtggcatggctcgagcacaggcagagatcgacgcagggagacaacaggactcgcgatcacgacaacaatggcgaggccgacgagcaccagagaagagcccgcgccggagctccaaatcaacggcacaagaaccgagcaggacgcgacccaacgatctgacgcgcacggcgccaaggaagttccatgaccatgccacggcgagcagatcgacagagacagcacagcggcatgcacaacaaggtcgagacggtggcttgacgacggaaccacatctgtgcacggtggggctgagcgccagcaagtattccaagcgcgcgacaagcagtaaacagagcagggcgccatgggaggaaggttggaggtcgggtgcgcaagggagagctcaggggcacgcaggccgagctgagccaagcagatggggaggagaccgagctgggcgagcgcagggagcagggagatccgggcgccatggggagctcggccgaaggggcgacctgggactgggagacgtcatgggaggacgcgcgccacgggagcttggccggacgcggcgaggaagaagacgagggcgcagagaggagcgagggcaagcagggcattcgggcgctgcagcagggaggaaaacagagcttgcggctgtgagcagagagctggagcaggagaaaacgaggacgccgaaggaaactgcgcgacaaggagagggaactgggggtcgtggcatgggcgaacatgaggagaagggagcagggaaactgtcacgcggggtggggagagtagggaggagcagaggcgagttccatcttccatggtcggacctgcgcgaaccttga

SEQ ID NO: 93107 - DNA, 2135 bp, Zea Mays
ttatttttcgttcttatggtgtcggtatgatttatataataatcctgcattccaaatagtatacctaatgagttatttaaaagataaaaaaatttgtgtgaaaatagctaaaatacaaaaaacgatatcgtctgggacagttatcatctccaagcacgcacggcagacggcacccgctctctcttccggtgctctgctcccgcccacacacaccagcatccgattcccgccggactcacaggtatcaactggaaagccatgcgagacgcgacgcgacccgaggcggcgaacagcagaggccgcgcctgcttccgtctcatttctgatacaagcaacggactccggcacctcctcaccgcgcccgccggccggccggccgcaacagcacggacttctaggtttgtcacggccccacggcccgccccgcccctcgctttgccgctgtgatgtgagatcgacctggacaccccccgctggagctcggctttggtttcgcgccttcctgacacgggacaggaacacgatcgcccaccagcaccaggtactccgtactcacgaggtcttcaatgtacaatacatatccagacacaatcgagtcaaagcagtccactccgaccaaatcaccaaactaaccagacgcctgcactccaaccgtcgttggttaagctgttaccttctgcttctgtaagctggcttcctccagaatggctcccagattacatcaggtcagggactgcaggcatggctgaagagatgcaaactttgctgttgctgattacttcctcccaacaacaagcacctctgttgacactttaccacagcaaagaagcagacagatcattttcttctactgctagtatttaatctattagattgcaaggtagcatagcaaccaacaaaccagtcactgatacatatatggcgaccgcagctctgttcttatagatcatacagcacacctgcactacctgcatgatgtgaagtaggcagccttctactagccctcgactaatcagactacattctcctctccccggttcacaaaccttgcccgatggttgtgacctgtgactgacgaaccaccacgaaagcagccaaatagaacagtatctttgcaccgacagagacatcagtaaacttcaggtgcctccctcaggggtacgttcatgctgctttccattgtttgccacccaagcccagagctgtcgctctgcatcattgtgacgaactcgccatagttggtctggccgtcctgaaaatttacagaatgacaagttcacagaccagattgtcagcagggaatttttttccctacatgcttattcatgtcttaaactagatatgaaaatagtccttcctacaaaaaaaatcaatcatatatgacaaaagaactggagatctctgtttcattacattaggaaagcacaaattttatagaaaatggaaacgcggatattttggtgtttgttattggaactgcaagctgtaaaaccgccatactgtacatgcgctcgttttttttttcactccctagtaccaagaggcatttctcaaagtaaaatcgtttagggccaatgtactttctatcaaacatgggggaacaatgctccagaaagcaaagcatgaatcattccattccacaaacttatcgaaatcactgataccatagcttggtgaggaatcagaaggtagacttacattgttctgatcaacctgataaatggtgtcctcaaggaaagcatttttcatctcgtgttccactgaagccttttgaagctcgtcgacagtgatgtaatcacctccatctttgtcgaaatatgttaaggccgccatcaagtgttctttgtgttctgttttatttaggggcactgttacagcaataaactcttcccagttgatattggtgttgccgtcataatcatcctgaagatataaaaggattttcaataaggatgacagtaatttactgtaaatgcatgctgtgctctatagcaataaaaaatagtgtactggataaagatatgcttagttgttttttcctgtaaatccatgcgtttgaattatgaagacagcaatatgttatctcagtactttttacaaacattcaataaataaaacttcttaaagttatgaaa

SEQ ID NO: 93108 - DNA, 1314 bp, Zea Mays
ccggcagtcctcccactccctacacgaggacgcttgccctctccgtcattaaccatcccaaccccccaagaccgggacctccctttccgtcctctcgccgctccacttttttaacgtagacgccccaccacccaccggcgcgcgaccgacgccggcgatgctccggctgtcgtactcgcggcgcctcctccagagcagcagcgacagcggcggcgccatccccgacccgaaccccaaacgcatcccgggcatcccgcccgccgacccgcccgcggccgtcaactccgatgtggtggtgatcctcgccgcgctgctctgcgcgctgatctgcgtcgtggggctcgccgccgtcgcccgctgcgcccgatcccggcgcaacaggggcgctggcgcggggggcgacggcgccccggcttccccctcgagcgacggcggcagcgggcaccgccaccacgcgcaccaccaggccaccggcgcgagcgcggccgccacgaccacgaccgcgaccgcgagcgcggccgccgccagcaaggggctgaagaagaaggcgctgaaggcgcttccgaggctggcgtacgcggacgcggtggcggcggccgcggcggcccggggcgcggcgccggcggcggagggcgaggaggagcaggagctgctggcggagtgcgccatctgcctggcggagttcggcgagcgggaggaggtgcgcgtgatgccgcagtgcgggcacgggttccatgtcgcgtgcgtcgacacctggctgcgctccaactcgtcctgcccgtcctgccgccgccccatcgtcctggacgacccggcgccgcccaagcggtgccgcaagtgcgaggccgtcgtcctggaggccgtcctcgccgcctcctcgtcctcctccgccgccgccagcggaggccgcggcggtggcgggttcttgccgtagcgtcagcagtggttggccggttgtttgtctgacgggtgggggccaggccgggtccttggttgttgagctgcccccatcagcccgtgcctacatgtcactggtacagcgaagatcccctctaaagcaatgaaaacgaaaataactagaaagaaatgcgattctttttgtacaaccttttggagttcgcagcttgggctcgtggggaacttgcaactggtattgtacatgaaaattgtaaattgggggtaaaaatctactacttcacaaatatatgacatcattaattatttttgaaaactttgaccacttgttttattcaaaatgtaaaattttaggtgtagtacaaactaccttaatcgataaaacaaaataaaaaaaaa

SEQ ID NO: 93109 - DNA, 2055 bp, Zea Mays
ccattgccgttccaattgcaaatgcactttccggccttcctcgccgaccagcgccgcctccgccgcgtcctctcctcctctcgcaccacgctcgcgacactcacccgcctacacgcgctcctcgtcgtttcctcctcccagcatatcctctcctcgctcgccgccgcatacgcccgcgctggcgcgctcgacgctgcggagtccaccctcgccgcctccccctcctccccctcctccatagccgcctggaacgggctcctctccgcgcactcccgcgccggtgcccccggtgccgcgctccgcgtctttcgcgcgctcccttcctccgcacggcccaacagcaccaccttcacgctcactctcaccgcgtgcgcgcgcctcggggacctcgacgccgctgagtccgtcagggtccgcgcgtttgcggccgggtacggtcacgacgtgttcgtctgctcggcgctgctccacctctactcgagatgcggcgccatggaagaagccatcagagtgttcgatggaatgccgaggaaggaccgcgtcgcgtggagtacgatggttgctgggttcgtgaccgctgggaggccggtggaggcgcttgcgatgtacagtaggatgagggagcatggcgtgtcggatgatgaggtggtcatggttggggttatacaagcgtgcatgtcaactgggaacgcccgaataggggcctccgttcacggccgtctcttacggcattgtatgaggatggatgttgttactaccacgagccttgtgagcatgtatgccaagaatgggcacttggatgtggcatgccaagtgtttagaatgatgccgtacagaaatgatgtcacatggagtgcgctgatttctgggtttgcacagaatggccgtgcagttgaggcacttgatttgttcagagagctgcaagctgatgggcttcagccttgttcatgggcacttgttagtgcactgcttgcttgcgctagtgttggattcctgaagctagggaagtcgatacatggtttcatcttgaggaggcttgagtggcaatgtattttgggtacagctgtccttgacatgtactccaaatgtggctccctggaaagtgcccgaaagcttttcaataagctttcctcaagagacttggttttgtggaatgcgataatcgcatgctgtggcactcatggatgtggtcatgatgcccttgctctgttccaagaactgaacgaaaccggaataaagcctgatcatgcaacatttgcttctcttctgtctgccctaagccactctggtcttgtggaggaagggaaattctggtttgatcgcatgattaaggagtttggcattgaacctgcagaaaagcactatgtatgtatagttgatctcttagcacgttctggtcttgtggaagaagccaatgacatgcttgcatcaatgcaaactgaaccaaccattgcaatttgggtcattctgctttcaggttgcttgaataacaagaagctagagcttggagaaaccatagcgaaaaagatccttgagttgcgacctgaagacattggtgtccttgcactggtatcgaatctctatgctgctgcaaagaagtgggacaaggtcagggaaatcagaaagctaatgaaggatagcggcagcaagaaagtgcctggctacagcttgatagaggtcaagggaacacgtcacgcattcgtgatggaagaccagagccaccctcagcatcgggagatcctgaaaatggtcgcaaaactcaattctgagatgaggaagctgggctatgttccaagaacagagtttgtgtaccatgatctggatgaagaccagcttctcagctaccatagcgagaggctggccattgcctttggtttgctgaacaccagccctggaacgaggctcgtgatcatcaagaacctcagggtttgtggtgattgccatgatgccatcaagtatatctcgaagattgtagatagagagattgttgtcagagacgcgaagaggttccaccatttcaaagacggagcctgttcttgtggagattactggtga

SEQ ID NO: 93110 - DNA, 2236 bp, Zea Mays
agctgggacagctgctctactttaaaatggacgcgcacctccacctgggtctgtctgcgcagggagccagggacgcggacgcggcggcaccggcaagcggcaagcaattgtctcatctgctccactccatctccatttaacgcactctccactccttcgcggcgggggtttaggcgcacggcggcaggccaattaacgccgctgcggcgagcaccgggggggaaatgggcggcgacggcacgagggcgctggaccagacgccgacgtgggccgtggccgccgtctgcgctgtcatcgtcgcggcgtccatactcctcgagggcttcctccaccacctcggtcagttgctcaacaagaagcggaagaaggcgctgtttgacgctctggagaaggttaaatcggagctgatgactctggggttcatatcgctgctgctgaccgtgacgggaaggtacatcgcgcgcatctgcatcccggagggagccgcaaacaccatgctgccctgccgcctgtccggtcactcggtggcggaagagcccaagggccatggccgacggcacctatctgaagatccaaccaaccttttttcctgccgcaaaggcatggtgtcgcttgtttcagccgacggcatgcatcagctgcacattttcgtgttcttcttggccgtcttccatgttaccttcagtttcttcacaatgtccttgggtagagcaaagactcgtatatggaaggtgtgggaaaaggaaacttgctcccctcagtataattatttaaatgacccctcaaagttcaggcttacgcaccaaacatcttttgtgaggcaacatgcaagttgttggagcaaaagcacaatcacgctctattttgtgagcttctttaggcagttcttcagatccgtccgtaagacagactactttactttgcgacatggattcatttcagctcatttatctccggggactaggttcaattttcgaaagtacattaaaaggtccttggaggatgatttcaagacagttgttggcattagtccaccactatgggcttctgctttggctgtcatgctgttcaatgttcatggatggcacaacttattctggttctctgcaattccccttgtagttattctagcagttggaacaaagctgcaggctataattgctatgatggctattgaaattgcagagaggcatacagttatccaaggcatgccggtggtaaaactaagtgatgatcatttctggttcgggaagcctcgtttggttctccacctcattcatttcgcatcatttcagaacgcatttgaaattacatatttcttttggatctggtacgaatttggcctgaggtcctgcttccatgacaactttgagtttatcattgcaagagtctgccttggggctatcgtccagtttatgtgcagctacatcacccttccactctatgcccttgtttctcagatgggttcagaaatgaagcgaacaattttcgacgagcagacagcgaaggccctgaagaaatggcacaaggccgtggtgaagaagaaacaccacaaggattcctcacacaattcttccgagactcctagcactgacacaacaggacctgcaggggaagcgggtgagtggcagcggctgcacgaggtgccggtccggcacctccaccggtacaagaccatcgcgcacgtcggcggcgtgaggagcccgttgtcggacccggactacagcgacacggacgacaccgagccgctgtcgttgcagactaggcacctgataccgccggcgaagcagcggagcctcgacaccgagcgcgcggaggtgcgcgtgaacgtcgtagagacagcggcggcgccaagcgacgtcctccaagacagcttctcgttcccaaggctgcttcctcctcgccatgtgccggacaagtaaagtggccagcagtctgcttagtactacagactgtcctatatagagatagtagaatagtagtttcaagttataagtcgatttggctagttatacaacttttgttatttatttagataaaggctatgtctatatagcaaaagttgtaaaactagaaaaatcaaaatgatttataatttgaattgtagtagtatagtagattagtagtcgaatctaacatgcatgagagcattttcttagtacagctgcctgtaagtgatgcctgggtcgatgacttggaatgtctgtcttctggggctaattcagggtttaaagcc

SEQ ID NO: 93111 - DNA, 2304 bp, Zea Mays
agctgggacagctgctctactttaaaatggacgcgcacctccacctgggtctgtctgcgcagggagccagggacgcggacgcggcggcaccggcaagcggcaagcaattgtctcatctgctccactccatctccatttaacgcactctccactccttcgcggcgggggtttaggcgcacggcggcaggccaattaacgccgctgcggcgagcaccgggggggaaatgggcggcgacggcacgagggcgctggaccagacgccgacgtgggccgtggccgccgtctgcgctgtcatcgtcgcggcgtccatactcctcgagggcttcctccaccacctcggtcagttgctcaacaagaagcggaagaaggcgctgtttgacgctctggagaaggttaaatcggagctgatgactctggggttcatatcgctgctgctgaccgtgacgggaaggtacatcgcgcgcatctgcatcccggagggagccgcaaacaccatgctgccctgccgcctgtccggtcactcggtggcggaagagcccaagggccatggccgacggcacctatctgaagatccaaccaaccttttttcctgccgcaaagtgagtgactaaggtgcacttgtagtttagcgccgttccacctgtatgtattgtaaggataaacagatagtccagtgtcttgttgtccggatttgacttcatgtgaggggagacgccaggcaagtctagattgtgctgttcatctgtgctaatccaagtgacggtggcagggcatggtgtcgcttgtttcagccgacggcatgcatcagctgcacattttcgtgttcttcttggccgtcttccatgttaccttcagtttcttcacaatgtccttgggtagagcaaagactcgtatatggaaggtgtgggaaaaggaaacttgctcccctcagtataattatttaaatgacccctcaaagttcaggcttacgcaccaaacatcttttgtgaggcaacatgcaagttgttggagcaaaagcacaatcacgctctattttgtgagcttctttaggcagttcttcagatccgtccgtaagacagactactttactttgcgacatggattcatttcagctcatttatctccggggactaggttcaattttcgaaagtacattaaaaggtccttggaggatgatttcaagacagttgttggcattagtccaccactatgggcttctgctttggctgtcatgctgttcaatgttcatggatggcacaacttattctggttctctgcaattccccttgtagttattctagcagttggaacaaagctgcaggctataattgctatgatggctattgaaattgcagagaggcatacagttatccaaggcatgccggtggtaaaactaagtgatgatcatttctggttcgggaagcctcgtttggttctccacctcattcatttcgcatcatttcagaacgcatttgaaattacatatttcttttggatctggtacgaatttggcctgaggtcctgcttccatgacaactttgagtttatcattgcaagagtctgccttggggctatcgtccagtttatgtgcagctacatcacccttccactctatgcccttgtttctcagatgggttcagaaatgaagcgaacaattttcgacgagcagacagcgaaggccctgaagaaatggcacaaggccgtggtgaagaagaaacaccacaaggattcctcacacaattcttccgagactcctagcactgacacaacaggacctgcaggggaagcgggtgagtggcagcggctgcacgaggtgccggtccggcacctccaccggtacaagaccatcgcgcacgtcggcggcgtgaggagcccgttgtcggacccggactacagcgacacggacgacaccgagccgctgtcgttgcagactaggcacctgataccgccggcgaagcagcggagcctcgacaccgagcgcgcggaggtgcgcgtgaacgtcgtagagacagcggcggcgccaagcgacgtcctccaagacagcttctcgttcccaaggctgcttcctcctcgccatgtgccggacaagtaaagtggccagcagtctgcttagtactacagactgtcctatatagagatagtagaatagtagtttcaagttataagtcgatttggctagttatacaacttttgttatttatttagataaaggctatgtctatatagcaaaagttgtaaaactagaaaaatcaaaatgatttataatttgaattgtagtagtatagtagattagtagtcgaatct

SEQ ID NO: 93112 - DNA, 520 bp, Zea Mays
cgaaggccctgaagaaatggcacaaggccgtggggaagcgggtgagtggcagcggctgcacgaggtgccggtccggcacctccaccggtacaagaccatcgcgcacgtcggcggcgtgaggagcccgttgtcggacccggactacagcgacacggacgacaccgagccgctgtcgttgcagactaggcacctgataccgccggcgaagcagcggagcctcgacaccgagcgcgcggaggtgcgcgtgaacgtcgtagagacagcggcggcgccaagcgacgtcctccaagacagcttctcgttcccaaggctgcttcctcctcgccatgtgccggacaagtaaagtggccagcagtctgcttagtactacagactgtcctatatagagatagtagaatagtagtttcaagttataagtcgatttggctagttatacaacttttgttatttatttagataaaggctatgtctatatagcaaaagttgtaaaactagaaaaatcaaaatgatttataatttg

SEQ ID NO: 93113 - DNA, 1465 bp, Zea Mays
agctgggacagctgctctactttaaaatggacgcgcacctccacctgggtctgtctgcgcagggagccagggacgcggacgcggcggcaccggcaagcggcaagcaattgtctcatctgctccactccatctccatttaacgcactctccactccttcgcggcgggggtttaggcgcacggcggcaggccaattaacgccgctgcggcgagcaccgggggggaaatgggcggcgacggcacgagggcgctggaccagacgccgacgtgggccgtggccgccgtctgcgctgtcatcgtcgcggcgtccatactcctcgagggcttcctccaccacctcggtcagttgctcaacaagaagcggaagaaggcgctgtttgacgctctggagaaggttaaatcggagctgatgactctggggttcatatcgctgctgctgaccgtgacgggaaggtacatcgcgcgcatctgcatcccggagggagccgcaaacaccatgctgccctgccgcctgtccggtcactcggtggcggaagagcccaagggccatggccgacggcacctatctgaagatccaaccaaccttttttcctgccgcaaaggcatggtgtcgcttgtttcagccgacggcatgcatcagctgcacattttcgtgttcttcttggccgtcttccatgttaccttcagtttcttcacaatgtccttgggtagagcaaagactcgtatatggaaggtgtgggaaaaggaaacttgctcccctcagtataattatttaaatgacccctcaaagttcaggcttacgcaccaaacatcttttgtgaggcaacatgcaagttgttggagcaaaagcacaatcacgctctattttgtgagcttctttaggcagttcttcagatccgtccgtaagacagactactttactttgcgacatggattcatttcagctcatttatctccggggactaggttcaattttcgaaagtacattaaaaggtccttggaggatgatttcaagacagttgttggcattagtccaccactatgggcttctgctttggctgtcatgctgttcaatgttcatggatggcacaacttattctggttctctgcaattccccttgtagttattctagcagttggaacaaagctgcaggctataattgctatgatggctattgaaattgcagagaggcatacagttatccaaggcatgccggtggtaaaactaagtgatgatcatttctggttcgggaagcctcgtttggttctccacctcattcatttcgcatcatttcaggtcagtaaaggcccagaaaggtactttgaaagaagcatgctaaggtcccgtttggtttgagggactaaagattagtccctccattttagtcccatttagttactaaattgtcaaacggtaggactaaaacagggactaaactgctttagtccctagtcctagatgtggct

SEQ ID NO: 93114 - DNA, 2894 bp, Zea Mays
gcacgaattgtcctcataacttaacagatcaatcacaaagttccttcgaagaatctttgcatcctacagacaaaacataagagaacaaaacatattatcttatagaacgagatagctgaaatgtatgttttgaacataaaatgaacgtactacactcaccccaacaaatttcagtcatctgtcattcccccacatagccagcttgtagaacaaggtagctgatattaaacctatagaataatgtttgggtaactatgttttatacaatgattatcatagaaaaaatttaaactgctgagaaggtggtacgaagaaaataccctcttaagtcaattggaacaccagtatgaattgtatgttcccatttaaagatatcctctgcccatccagaacgtttcttgttgtaagcaatcttatatttttttgaggccatgataatcgcttccgcgaacctcttgtatggcatgtgtttacaccaatcttgagtcggtgtaaagttgataaaagtcacatgctttttaacatgatctattacgaaaagggtgtgacatccattgatgtactacttatgaactttggacaagtggagtttatgtatgaagtatgaactacttatgaacttatatggacttgattcgtcatgtatgacgagtcactaaaagccagatcaaccctggtagcatctggctaggtaaatatggttgttttatagtttgttccttcttggtttttcaaatcgttttcttttatgtaccttcccattctgtgccttggtatgaaagacaacactggctacctggtgattcttaaaaaaacactttctttctggaacttcacagcatgggagcatccatccttagatggcctgactacctttatgcatgtgtccatctagtggattttctgtttacttagtgctatgggattggggatcgcttatgctattatttttcaggaggaaatgatgcgagggaaggcaggatatgaacacctgaatgaacccctccatatattggttgaggcagagctacctgttgaaatcattgatgtgtgtttgatgcaagcccgcgagatccttgaaggtctgctaaagcctgtggatgaattccaggactacttcaagaagcagcagctacgggagcttgcgatgcttaatggcacccttcgtgaggaagggatgcagagatccggttcagcgtcccctttccacaacagccttgggatgaagagagccaagacaagaggcagttcagttgatccaagaatagatgtcttggagttggttagcagaagggttgattctgaagaaaaggagaggcagaagagcagtaaacaggttgggttgaaagaaaagctgaagtcatggcctgtacctgaagtgtgcatagtatacacgaggagaaaccgcaagcaacacaagaaggaactgggagatgaagtaactggtgctactccgggaacagagtaccatatgcctgccagatatggctgtttgaaccaagtatgtcctgatgcaggctctgacaaaattcctgatcctgatgtagatttctacagtgttcctgatgcagatttttccagttttggtgatcattctgaaagttcatttcaaaatgatcaagtctgggccatgtatgatgaggaagatggtatgcctccctattatgctttgatcagaaaagtcatttccactcgcccttttaaaggtagactggtccacctcaaagcaaacgactctaatgggttcggagtctccagttggctctcgtgtggatactccaagacctgtggtgagttcaagtttgatgtgttcaagtttgatgcctcgctaaatggtgagctgtcggaagaattgagaaatcgactgatgaattaagcagaaaagatcaaggtgagctgtcggaacattttggttcaattccttgtgttttggtcactgctacacattttcatgtaattttaaataacaaaaaacatttgttactaatgaactgctaaccactgaagagagcaacaaaaattactcatctcagctaaatggtttcatgaagtggttagaaagagaactgttgcagttcggcatgcattctgagagtgccaatgattatttactggatcacatattcttttgcatatatttctattcaatcttgttaacgctttcttcgccataacttttagattaaagtacttcttttatggcggtgatgctgcttaaactatgagcattgtggatttattattggaatctgttgagctgtcttacaggcttggttagtattgatgaactttgccactcgtgttgggcatcttgtagcagtttcctgtgaagccgaactccttctcatgcaaaaggaatggggcacaacagaagctgaactacttctgccgagattttatttggagacgagcagcaaaataaggccttcgactctacagagataacgtctaatgcctccccacgcacaattttatctaaaaattagcatcaaccgatatataccggaagaatgcatataaactttataccccaataaaaacccccaatacacacaagctcattgtattatacttaacatatgtcatatatataaaagttatattaggggaagcattgaaaagaagtcagttcattttatgtttgagcgacaaattcactaacatatcacaggctactaaagaacagttgcagcaacaaattcgtttcaaagcttaccttggcctgagaagatgcggaagccgtcgctgcgttgcagcgaatccccgacggtgtcctgtcgtccggtccgggtcaaccaagcaccttatcccttccttcttgcgcaccggtcgctagccgaaacaacaaactactacaatgaaacccccatacccaatttcagtaaacactctat

SEQ ID NO: 93115 - DNA, 957 bp, Zea Mays
atgggattggggatcgcttatgctattatttttcaggaggaaatgatgcgagggaaggcaggatatgaacacctgaatgaacccctccatatattggttgaggcagagctacctgttgaaatcattgatgtgtgtttgatgcaagcccgcgagatccttgaaggtctgctaaagcctgtggatgaattccaggactacttcaagaagcagcagctacgggagcttgcgatgcttaatggcacccttcgtgaggaagggatgcagagatccggttcagcgtcccctttccacaacagccttgggatgaagagagccaagacaagaggcagttcagttgatccaagaatagatgtcttggagttggttagcagaagggttgattctgaagaaaaggagaggcagaagagcagtaaacaggttgggttgaaagaaaagctgaagtcatggcctgtacctgaagtgtgcatagtatacacgaggagaaaccgcaagcaacacaagaaggaactgggagatgaagtaactggtgctactccgggaacagagtaccatatgcctgccagatatggctgtttgaaccaagtatgtcctgatgcaggctctgacaaaattcctgatcctgatgtagatttctacagtgttcctgatgcagatttttccagttttggtgatcattctgaaagttcatttcaaaatgatcaagtctgggccatgtatgatgaggaagatggtatgcctccctattatgctttgatcagaaaagtcatttccactcgcccttttaaaggtagactggtccacctcaaagcaaacgactctaatgggttcggagtctccagttggctctcgtgtggatactccaagacctgtggtgagttcaagtttgatgtgttcaagtttgatgcctcgctaaatggtgagctgtcggaagaattgagaaatcgactgatgaattaa

SEQ ID NO: 93116 - DNA, 303 bp, Zea Mays
atgaagcctttcatctgcagcagccatttcgtcgttctcgttctgtccatcgccatcgccgccgagatggcgtccgtcgaggcaggtgatgactgctaccacctgagcgcaaagttcaaggggtggtgcttgtacccggaccactgcgcggacgtgtgctccactgagagcgacaacaaccttggcggcacgtgccgcggcttcccgtctcgttgctactgcagggcattattctgcccgcaggggccaaaggctgctcctagcactattgctgctgctaggtctcctccaaccattggatga

SEQ ID NO: 93117 - DNA, 2007 bp, Zea Mays
acacgaccccttctcctctcgttctcgcccagtcgcaccgtccccgtctccaacccgactctgaaatccacgagctcttccccctcgtccacaccccgcccctccctgctctccgcctccccgtccccgcccccatcgctacccacaagcaccttcggaggctccaggcaacccacctcctgcacccggcgtccctcgcggcggcgacgcgcgaacgtcccgctccccggtgagtaacggagagacggagccatgagcggaggggtggagccggataccccgcccggtagcagcagcagcagcagcaggagcgggggcagcacgcccgtgggcggcaagccgccacgccaccacctcacgtccatccgccactgcgccagcagtgcccgcatcgccgctgcctccgccgaattcgtaagcaagctcgctgccacccaagccatctatccctaacacgaatttgatgtctgcccttctgttctcctgcaggggctggagtcggggacgctcagcttgatttcacctaccgcagacatccgtccgggcttcttgcctgtgttcaggtcggggagtttcgcggatattggacccaaatccttcatggaggacgagcatgtctgtgtggacaacctcgtcgagcaccttggactccgtggcccgggcatccctgcaccgggtgccttctatggggtgtttgatggccatggtggtagtgatgctgcctgttttgtccggaagaatatactgaagttcataaccgaagattgccacttccccaacagcatcgagaaggcaatcagaagtgctttcgtaaaggctgaccatgcgattgcggattctcagtctcttgaccggaattctgggaccacggcgttgacggtccttatatctggcaggacactgcttgtcgcgaatgctggtgactgtagagccgtattaggaaagcgaggccgagcttttgaactctcgagagaccacaaacccagctgcagcgttgagaagctcagaatcgaaaaccttggcggtacggtcttcgatggctacctcaacggtcagctggctgtagcaagggcgatcggtgactggcacatgaaaggctccaaaggctctgcgtgccctctcacaccggaacctgagtttagggaggttaggcttaccgaggaagacgagttcttgataataggctgcgatggcctctgggacgtgatgagcagccagtttgctgtctccatggtcaggaaagagctgatggaacacaatgacccacagcggtgctcgcgggagcttgtccaggaagctcttaggcgcgactgctgtgataacctaaccgtagtcgtcgtgtgcttctcagatgacccgccccctcagatcgaggtcccgagattccgggtacggagaagcatctcaatggaagggctgcatacgctgaggggagctcttgacagtaacgtttgagctccgaaagtgtaccttcgcctgcaacttgtgtcgtggaggatttttctctcttctttgttgtttggtctgttggaagttttgctccgctcggctcatcggtgttttgcgatatagatctcggaataagttttgtagaattattttggaaggaaatttttgttgaggtgtaggctaattaatcttcctttgttgaggccaccattttgttgttggttgctcacaatgtaatcgagcaattaaccggcacgttgttctggtacgaatgagagttatagcagctgatcgtttttggtctttgttcagaattccacttgtatggttggacgagtcccctgttcattattatcagaaccaaaagagaataaagttatggtacagattttgttcatctttgtgcatgtgggaaaacatggtcacaacataccttgactccctgctatttgttgggagctgattggtctgcagtagatgcggaattcatttgatttaacaatgttctgaaaccttttaagtttatgctgttgtcatggagaaaaaacaaaaacaaga

SEQ ID NO: 93118 - DNA, 1770 bp, Zea Mays
cacgaccccttctcctctcgttctcgcccagtcgcaccgtccccgtctccaacccgactctgaaatccacgagctcttccccctcgtccacaccccgcccctccctgctctccgcctccccgtccccgcccccatcgctacccacaagcaccttcggaggctccaggcaacccacctcctgcacccggcgtccctcgcggcggcgacgcgcgaacgtcccgctccccggtgagtaacggagagacggagccatgagcggaggggtggagccggataccccgcccggtagcagcagcagcagcagcaggagcgggggcagcacgcccgtgggcggcaagccgccacgccaccacctcacgtccatccgccactgcgccagcagtgcccgcatcgccgctgcctccgccgaattcgggctggagtcggggacgctcagcttgatttcacctaccgcagacatccgtccgggcttcttgcctgtgttcaggtcggggagtttcgcggatattggacccaaatccttcatggaggacgagcatgtctgtgtggacaacctcgtcgagcaccttggactccgtggcccgggcatccctgcaccgggtgccttctatggggtgtttgatggccatggtggtagtgatgctgcctgttttgtccggaagaatatactgaagttcataaccgaagattgccacttccccaacagcatcgagaaggcaatcagaagtgctttcgtaaaggctgaccatgcgattgcggattctcagtctcttgaccggaattctgggaccacggcgttgacggtccttatatctggcaggacactgcttgtcgcgaatgctggtgactgtagagccgtattaggaaagcgaggccgagcttttgaactctcgagagaccacaaacccagctgcagcgttgagaagctcagaatcgaaaaccttggcggtacggtcttcgatggctacctcaacggtcagctggctgtagcaagggcgatcggtgactggcacatgaaaggctccaaaggctctgcgtgccctctcacaccggaacctgagtttagggaggttaggcttaccgaggaagacgagttcttgataataggctgcgatggcctctgggacgtgatgagcagccagtttgctgtctccatggtcaggaaagagctgatggaacacaatgacccacagcggtgctcgcgggagcttgtccaggaagctcttaggcgcgactgctgtgataacctaaccgtagtcgtcgtgtgcttctcagatgacccgccccctcagatcgaggtcccgagattccgggtacggagaagcatctcaatggaagggctgcatacgctgaggggagctcttgacagtaacgtttgagctccgaaagtgtaccttcgcctgcaacttgtgtcgtggaggatttttctctcttctttgttgtttggtctgttggaagttttgctccgctcggctcatcggtgttttgcgatatagatctcggaataagttttgtagaattattttggaaggaaatttttgttgaggtgtaggctaattaatcttcctttgttgaggccaccattttgttgttggttgctcacaatgtaatcgagcaattaaccggcacgttgttctggtacgaatgagagttatagcagctgatcgtttttggtctttgttcagaattccacttgtatggttggacgagtcccctgttcattattatcagaaccaaaagagaataaagttatggtacagattttgttca

SEQ ID NO: 93119 - DNA, 1377 bp, Zea Mays
atgaagaaggcggttaacacctgcttattatcctggctgctgctgctcggcactctcacactggcagcacgtcctgacgcaggcggcggcctcgatgcagccacggtagccgcgcaggagctcgaccgcgtcctgtcgctgcccgggcagccgagctactcatccgcgtcgcccaagcagtactccgggtacgtcacgaccgacgagcacctaggcaaggcactgttctactggttcttcgaggccacggagacgcctgacgagaagccactggtgctgtggctcaacggagggcctggctgttcttccattgggttcgggcagtcgcaagaactcgggccgttcctggtgaagaaagatgtccctgagctcgagctcaacccctgccaatctgctgttcctggactccccagcgggcgtcgggttttcctacacaaacacatccttcgaaaaggatccaccgggagacaattccacaggtggttccagaggttcccccagcacaaggccaaggagttctacatagctggagagagctacgcaggtgcagcaactgtcactcccgtccagactaaatacagtaccagacactacgttccccagctcgcagacgtcattgtggaggggaacaagaaggcctccgaagaaaaccacatcaacttcaaaggcatcttgatcggaaacgcgtacatggacggcgacaccgatctggtgggcatcttcgactcggcgtggcaccacgccatcatctcggacgagctctacggcgacgtgcagaagaattgcgacttcagcttggtggagctgtccccggagtgcagcgcggacgtggaccagtacaccgcgctctacagggtcatcgacatctacagcctgtacaccgaccgctggatcttctcgaggtgcccgatgggctacgacccgtgcacgcagacgtacgcgactgagtacttcaaccgcgaggacgtgcagaaggcgctgcacgccaatgtcactggcgtgccttacccctactcgctttgccgtaattcgataaacgacgcgtggaaagattccgacttgacagtcgttccagtagtgaagaagctggtggaggcggggctccggatatggattttcagcggcgacacggacgcaagaatcccgaccacgtcaacccggtacacgctgaagaagctcggcctgcccatcaaagaggactggtcgccgtggttccatcgcaagcaggttggcggctggactgtggtgtacgacggcctgacattcgtcaccgtgagaggtgccgggcacatggtcccgtccacgcagccgcagcaagcgctcgagctgttcaagcacttcctggccaacacgaaactgccctccgagcccttctag

SEQ ID NO: 93120 - DNA, 2203 bp, Zea Mays
gttcttcttccctcaatccattgcaagcaacaggaggagaaaaaacaaggagcgagacctcgcagctgacgcgcacaaggcaaaacccaatcggagccgtggaccgggccggagatagggctcgaggccatggcaagcggaggcgagggcgcagggagcggcgagtcccctcccgctgcctcagtggaggcggcagcgggggaggcgacgctgcacatccggtgcgcgaacggctctaagttcacggtgcagacggacctgggcgccacggtgggcgggttcaaggaggtcgtagccgggagctgcgacgtgccggcgccgcagcagcgtctgatctacaagggccgcatcctcaaggacgagcaaaccctagaaagctacggcgttgagacagatcacacaattcacttggtgcgtggtgttgccccaccagctgcatccagtgcacctgctgctgccagctcccttgcttcatctactcttagtagcgtcccggcaggtggcctgggagatctatttccaggtgttggtgctccaggaagtggcaggtcatcaggtatatttgggccaggatttccagagttagagcaagttgagcagcatttaagccagaatcccaacttgatgagggagataatgaatatgccagcgatgcaaaatctcatgaataaccctgatttaatacgcaatatgattatgagcaacccacaaatgcgcgagatcatggatcggaatcctgatcttgcccatgtgctcaatgacccaagtgtcctccgccaaaccctcgaagctgctaggaaccctgaaatcatgagagagatgatgcggaacacagacagagctatgagcaacattgagtcctctcctgaaggttttaatatgctccgtcgcatgtatgaaactgtccaggagccatttctaaatgcaacaacaatgagcggggaagggaacacagcctcaaacccatttgcagctcttctcggcaaccaggggtctaaccaacctggtcaaggtcaacctgcaacatatactccaactataggttcggagtcgacaactggaaccccagctccaaatactaatccacttccaaatccctggagcaccaatgctgggagtgcacaaggagcaacacggtccagtggcaacacaagaactggtgcttctggtcatgttggaggtactggtgccactggtggattgggagggcttggttcaccagatttgagtagtttgcttggtggtcttgctggcagtccaagaactggtgcttctggtggtttaggaggtttgggttcaccagatttggggaatatgcttggtggttctcctgatgtttctcttttcagtcagatgttgcaaaaccctgcaatgatgcagatgatgcagagcattatgtctgacccacagaccatgaaccagttgcttagcttcaacccaaatgcacgcaacctgatggaatcaaaccctcagatgagggaaatatttcaaaatccagaatttcttcgccagctgacatcgcctgagactttgcagcaattactcttatttcagcagtctttattaggacagcttggtcaacatcaacctaaccagggtagaaacaattcaggcagtgccacaggtacgcctggaaaccctagccttgacaccttgatgagcatgctcagtgggcttggttcgggaggtggcataggtgttccaaatacttccaatgtgccaccggaggagctctatgccacacagcttactcagctccaagaaatgggtttcattgacactgcggagaacattcaagcactgctcgctaccgctgggaatgtacatgctgcggtggagcgtcttctcgggaaccttgggcagtagctaaaacgagcgagccacacaccgccagtaaatcttaaaatgtcgcgcatctgcaggagtgttcggcttaacgttcttcaagcccttgaatttgaagggggtggcgtccataatcccgaaaacaaaataatcaaaaagtcaggcagccattaacttttctcatacatggtggtcatgtctttgttttacagtgttgtatttgcaatttggattggtgtacatacatatcggtcggatattacctcatagaatgtatgtagttttgtgttttgaactgttgattcttgattcccaatcaatcaaatcaaactatctaatccaactgttggctttctca

SEQ ID NO: 93121 - DNA, 519 bp, Zea Mays
acggtggcgacgtcgacggcgacgatgtcggtctggccgccctggtacaggaacctgatggacaggttgcttggcggccggctcttctcctccacgcgtatcaacaggttgcggtccttcgcgtactcgcagggtaccctcttgtactcgacgtcgacgacgcgccggtccctgaggcgcgcggccttgccggcactggccatggccgcgtacgccgcggcgctcagcaccagcgccgtgcggttcgacgtccgcgcctggtccgtcaccaccaccttggcgccggcggcgctgcacagctcgctgtccctgcaccgcacctgcaaacaatgccagcccttgcttacacacaatccgaatcgggccaaccacgggaacagagaaaccgccgctgggcacgcgctccggcctaaagggagggaaagggaagaagctagctacctacctggaagcaggcgccgcagccgacgccgcccctgtacagctcggggctggctgcggcgagcaggccgccgttga

SEQ ID NO: 93122 - DNA, 177 bp, Zea Mays
cttcctcacgtgcgctcctcctcctctctcccaaccgcgcgtctcttccatggcgctcgcccagtccagccgccggtgcctgggccgctcgctgcatcttcctcaagtccggcccctgctcaactgcgtccctctgctcgctcgtgcccggccagagctcccctgcgcgccgcagct

SEQ ID NO: 93123 - DNA, 378 bp, Zea Mays
atggagctgctcgccgatcaccgcccacaatcgtgcccctttactgtgctcgcccaagtcgccgccgtcgcccagctcgatgccttccctgctcgccagcacttgttcagtcgtctcagctcgccggtgtcgtgttctagttagcatcatgctctgcgcgatgcgctccaatgtcatttgtcgcgttttgcgcgttctcttcgcaggttccatggagctcgcgccgtgatctctcagctcgccagctgtactcgtcttcctcgccagcgtgccctctcggcttgctcggcctcaatctccatcgcgccgcggcaacttcccgtttctctggtgccgcacacgctgctggtccttgcaagtccaccttggttcggccag

SEQ ID NO: 93124 - DNA, 1252 bp, Zea Mays
cgctagcacgtcagtcggcctcatcctctgcactgcagtcattgagcgagctctgctcggccctctcctatgcgcatgttgccttgcttcttcccttgatgctcgccgtcgctagtactggacgttccctctctcttgtcgcgtcctggtagccactggtccggctgtcttttccctcggcgtccagatccaatcccaactccaagcgttgtccatggagctgctcgccgatcaccgcccacaatcgtgcccctttactgtgctcgcccatgtcgccgccgtcgcccagctcgatgccttccctgctcgccagcacttgttcagtcgtctcagctcgccggtgtcgtgttctagtcagcatcatgctctgcgcgatgcgctccaatgtcatttgtcgcgttttgcgcgttctcttctccgcaggttccatggagctcgcgccgtgatctctcagcttgccagctgtactcgtcttcctcgccagcgtgacctctcggcttgctcggcctcaatctccatcgcgccgcggcaacttcccgtttatctggtgccgcacacgctgctggtccttgcaagtccaccttggttcggccagtgatacctgtgtcggctctctaatgcttgcgcgtgtttgtccacgtcgccagtagctcggtctctacgtatgtctctctcagcatctcgacatcggaactccatcctgtctgtatgtgtgtggaagaacgagatcgatggagaagaaaggagttaaaggaagaaggaagcaacgcccaatgcaacgctcgctgcgtgttcggtagaattcctgagccaagagtcgtcgccgtttgcgtgaatgtcaagtttatgttggtcgcagtgcacgcggtggtgttcattaaggaagaatgtgaagccctgcggtgttcgatggactattcaaaccgaagagcgtggacgatttcgcgaagttaaatcgaattggtcatggtaagccgatttaaatttctgttagcttaattattgaattagtacgatgaaatatatgtgaagcatatattttcatgattttgaagcagtcgcgtcgcggtaggattaaatatatgtgaagtacgatagagttagtaatgtgaaagatagattaatttaggtaatattcgggcgagctgatgacaaaagaaataagtttagtattttatccagctagtcgataggatctgtcgatattgttgtgtcaatttagtataattaagaaaatcgatgccttgctagt

SEQ ID NO: 93125 - DNA, 773 bp, Zea Mays
gtctgttgccggcccacagaccataggattgtggctgccactcaccacggcccattcagtcgtaaccctagcaggccgccacgaccacgaggtgcatccatgagaggagatcgaaggaaactccaattccagtcgcccccatccgttgctcatctcaccagaagcgaagccggaggagggaggaaggagatcacgagcagccggagccggaggccgagaggatgaagacgttcgacccgtggccggtcttcttccaccgggagtggaagcgcaactgtcccttcctcacggggttcaccatcaccggcttcatcatcaccaagatgacagccaacttcaccgaggaggacctcaagaactccaagttcgtccaggaacacaagaagcgctgaccaaccggaaacatttttagtctattagctcagcgggagctctcacctcgaacaaaaaaccaagcaaaaaatctttggaccaaacctccaagacttgatgcttgtcctattgaatcgaaattttggggcacctatgctcagcatgatctcctttcttgggctgaagcagagttcttgcattggtggattcccaaagattgccctctcacgccttcttcgaaggcaactattgcagccgcatttagtacagatgggagagtacttgcatctacacatttgtattttctgttaggagtttatggacctgctgataaagtaattgatatattatcaaactatgttgtaggaagaggagctggaagcaaggatcagattgcttga

SEQ ID NO: 93126 - DNA, 1177 bp, Zea Mays
atcagcgctttgcctctttatgccccctttcgctttcggtgcgtaagggcagcaaggcaagtcactctgatctctgtcttgctttcggatgcgtatatatagccgtcgagagcaaccaaaatcttcacaaaacatatctatatatctgcaacgtcaaatcaacacaggctgttgtttgcttcttttggtaaaggctttagctgcggcagatccaccggcggcgccccgagaatcgaagatgccggtgaaggtgttcggatcgccgacgtcggcggaggtcgcccgcgtcctggcctgcctgttcgagaaggacgtcgagttccagctcatccgcgtcgactccttccgcggcaccaagcgcctgccccagtacctcaagctccagccgcacggcgaggcgctcaccttcgaggacggcaacgtcaccctcgtcgagtcgaggaagatcctgcgccacatcgccgacaagtacaagaaccaggggtacagggacctgttcggcccgggcgcgctggagcgggcctccatcgagcagtggctgcagacggaggcgcagagcttcgacgtccccagcgccgacatggtctacagcctcgcctacctgccgcccgacatgcagctcgacggcaggggcgtcggcggcctcccggcggcgacggggacgatgaacccggcgcaccggcagaaggtggaggagatgctgcagctgttcgagaagagccgcaggcagctgggcaagctgctggacatctacgagcagcgccttggcgaggaggccttcctggccggaggcaagttcacgctcgccgacctgtcccacctgcccaacgccgaccgcctcgccggcgacccgcggtccgcacgcctcatggagtcgcgcaggaacgtcagcaagtggtgggacaccgtatcccgccgcgactcttgggtcagggtcaaggagttgcagcgcccgccgtccgcggaggcgcccttctgatgtcgatcgatcgcaaattaaggcggtggcctttgctcaagcctacgtgttcggtttctgcataattttttaataaataaacgccactggcccctctacgtcattggcgattgttcattgtgtaataaatcgttcaagagcatatgatgcttcttgccgtgagattgaactcgtcgcctccatgcttctctattgagc

SEQ ID NO: 93127 - DNA, 1240 bp, Zea Mays
atcagcgctttgcctctttatgccccctttcgctttcggtgcgtaagggcagcaaggcaagtcactctgatctctgtcttgctttcggatgcgtatatatagccgtcgagagcaaccaaaatcttcacaaaacatatctatatatctgcaacgtcaaatcaacacaggctgttgtttgcttcttttggtaaaggctttagctgcggcagatccaccggcggcgccccgagaatcgaagatgccggtgaaggtgttcggatcgccgacgtcggcggaggtcgcccgcgtcctggcctgcctgttcgagaaggacgtcgagttccagctcatccgcgtcgactccttccgcggcaccaagcgcctgccccagtacctcaagctccagccgcacggcgaggcgctcaccttcgaggacggcaacgtcaccctcgtcggtacgtacgtacacacgcaagcgacgcgagagagccaactgaccaactgaaaacgtaatggatcatggatggatggatggatgcatgcagagtcgaggaagatcctgcgccacatcgccgacaagtacaagaaccaggggtacagggacctgttcggcccgggcgcgctggagcgggcctccatcgagcagtggctgcagacggaggcgcagagcttcgacgtccccagcgccgacatggtctacagcctcgcctacctgccgcccgacatgcagctcgacggcaggggcgtcggcggcctcccggcggcgacggggacgatgaacccggcgcaccggcagaaggtggaggagatgctgcagctgttcgagaagagccgcaggcagctgggcaagctgctggacatctacgagcagcgccttggcgaggaggccttcctggccggaggcaagttcacgctcgccgacctgtcccacctgcccaacgccgaccgcctcgccggcgacccgcggtccgcacgcctcatggagtcgcgcaggaacgtcagcaagtggtgggacaccgtatcccgccgcgactcttgggtcagggtcaaggagttgcagcgcccgccgtccgcggaggcgcccttctgatgtcgatcgatcgcaaattaaggcggtggcctttgctcaagcctacgtgttcggtttctgcataattttttaataaataaacgccactggcccctctacgtcattggcgattgttcattgtgtaataaatcgttcaagagcatatgatgcttcttgccgtgagattgaact

SEQ ID NO: 93128 - DNA, 1308 bp, Zea Mays
atcagcgctttgcctctttatgccccctttcgctttcggtgcgtaagggcagcaaggcaagtcactctgatctctgtcttgctttcggatgcgtatatatagccgtcgagagcaaccaaaatcttcacaaaacatatctatatatctgcaacgtcaaatcaacacaggctgttgtttgcttcttttggtaaaggctttagctgcggcagatccaccggcggcgccccgagaatcgaagatgccggtgaaggtgttcggatcgccgacgtcggcggaggtcgcccgcgtcctggcctgcctgttcgagaaggacgtcgagttccagctcatccgcgtcgactccttccgcggcaccaagcgcctgccccagtacctcaagctccaggtactttaactgaccgtgccattgcaaatgcacacgattgttgacgagggcgaaaacaatgctgcatgtatgcagccgcacggcgaggcgctcaccttcgaggacggcaacgtcaccctcgtcggtacgtacgtacacacgcaagcgacgcgagagagccaactgaccaactgaaaacgtaatggatcatggatggatggatggatgcatgcagagtcgaggaagatcctgcgccacatcgccgacaagtacaagaaccaggggtacagggacctgttcggcccgggcgcgctggagcgggcctccatcgagcagtggctgcagacggaggcgcagagcttcgacgtccccagcgccgacatggtctacagcctcgcctacctgccgcccgacatgcagctcgacggcaggggcgtcggcggcctcccggcggcgacggggacgatgaacccggcgcaccggcagaaggtggaggagatgctgcagctgttcgagaagagccgcaggcagctgggcaagctgctggacatctacgagcagcgccttggcgaggaggccttcctggccggaggcaagttcacgctcgccgacctgtcccacctgcccaacgccgaccgcctcgccggcgacccgcggtccgcacgcctcatggagtcgcgcaggaacgtcagcaagtggtgggacaccgtatcccgccgcgactcttgggtcagggtcaaggagttgcagcgcccgccgtccgcggaggcgcccttctgatgtcgatcgatcgcaaattaaggcggtggcctttgctcaagcctacgtgttcggtttctgcataattttttaataaataaacgccactggcccctctacgtcattggcgattgttcattgtgtaataaatcgttcaagagcatatgatgcttcttgccgtgaga

SEQ ID NO: 93129 - DNA, 1160 bp, Zea Mays
gtcgctcgcgccttcttcgacggcgtcgtccggttacatgggtttccctcctccatcgtcagcgacagggaccccgtgttcaccggccatgtgtggcgcgatctcttcaagttagccggtgtcaagctgcgcttaagcacggctttccaccctcagacggatggccaatccgaggtggtaaacaaggtgatagctatgtatcttcgatgtgtgacaggtgatcgaccgcgcgcttgggtggaatggttgccgtgggcggaatattgctacaacacatcctttcacacagcgttgcgggcaaccccctttgaggtggtctacggtcgacctcctccggccctcttgccttacaagccagggaccgcacggacagagacagcggatgctctccttcgcagccgcgatgaggtcctggcagaagtccgtcaacgtcttgttcaagcacaacagatctccaagaagtattacgatgccacacatcgggagatggagttcaagaccggtgattgggtttggttgcgcttgctacatcgcaccaccaagtccttggatcctcatgccaagggcaaattgggtccgcgctatgcgggacctttccaggtgctggagcgtatcggcagcgtggcgtatcgtctacagctgccggagggtgctcgtatccacgacgtcttccacgtgggcctcctgaaagcccacaaaggagatccgcctgccatgccgacgccactaccaccgatccaggatgggcggctgctgcccgtaccagtgatagccctcaaagcacagctgcgccgtgacatctggtatattcttattcagtggcaagggatgacgcgcgaggaagcaacatgggagctactggctgaattcaaagacctctaccctgaattccagctcgaggacgagctgttttcgcaggcagggagagatgttatgaccggcatgcagtacaaaaggaaacagcaggccagggggcatgcggcaggagaaggagatcaaggctgggacagccagcagtaattcagtaatcctaggatctatttccttttgagagtttccttttatttagagataaacttccttttattcagagagattagtttccttttattaagagataagttgccttctattgagagagaggctagtataaataggag

SEQ ID NO: 93130 - DNA, 814 bp, Zea Mays
aaccgcttcaccctttgtggcgtgcagcctcctcctctccccactctccccaatcaccatcaaaatgcgggtgggcgaggagcacctccagcaaggcggagatgtgcatgcagtccaccgccgaatctgcgacgtctcgagcggaggtagagcaccaccacagtccatagaggacctcgcccgagccaccaagtcggtcgctacctccccctccggctccacctcctacacgctgtcctctccagagccaccagtcctttcccggcggtagattcaaatccctgccacatagttctccattgctctcaggcgacttctcgtgcgcgcatagccctgacagcagccacttccatggtgcaaccgctcatcgttggaggatctacagcttgatatatctgggagatgcatacctgactacatattgccaactaccttagctaagaaacttacctcatcttccatcaagactattgaggaatattgtcaagaattaacttccttggacctttgaaacttgaataggctgcgtgactaagcaatgaggtatcttcatggttgtaggctaataaggaaactaaagcttcaaagaaacacattctgaaccaaaaggatcatgaagctataatcaaacaactaaaccttgctaggtgagccagacagttactggaaatcagtgctcatcaatgcatgcagacttgtaaagtattatgatggtctgcccatggaatgttttgtaatttacctataagtgtttttagaagtgcttgacaccagttatgccaactacctagcacacctaggtggggtagacaga

SEQ ID NO: 93131 - DNA, 384 bp, Zea Mays
atgcggcggcgaaaacgaagggggggcctctttctcttctctcctctcctctcctctcctcctgtggtctctgcagcagagacactgctctgctcgattgctccgttgcgcctgcgactgcgatcgcatttgtcgaggagggggaggagtgtttgttctcgggcggagccggtgcagagggggcgagagagaaagaggtcaaaagagccacatcgcattcgcatggggcagtgcgcgtcccatccggggccggcggccggcggcggaggcggcgttgcgaggagggggtgcctggcggtggcgcgggagcagcggtcccggttctacatcttccggcgctgcgtggccatgctcatctgctggcacaagtacaagaagatctga

SEQ ID NO: 93132 - DNA, 1637 bp, Zea Mays
gagaatagcacaggctcagagcagcatatgaaaaataaaaagagagagagagaggatcgagtgatggagggtctggggcacctgctgctgttcgccttcctcttctggttctccaccttcatggtcgcaccggtgatgaccgacgtcaccatggcggcgctctgccccggccgcgacgagtgctccctcgccatctacctcaccgggctccagcaggcggtttcagggctgggggcgctggtcctgacgccggtggtcggcaacctgtccgacaggtacggccggaaggcactgctggcgctgcccgccacggcgtccatcgttcctctcggcatcctggcgtacggccggaccaagggttacttctacgcgtactacgtgaccaagacgctgacggcgatggtctgcgaaggcaccatgatgaccctctcgcttgcctacgtggccgacagggtgccggagacgaggcgcgcggcggccttcggcgtcttctccggcgtctgcagcgccggcttcgtcggcggcaccgtggcagcccgcttcctccccgtctcatccacgtttcaggtctcagcggtggcagccgtcgcgacggccgtctacatgaaggccttcctccaggagacggacggcggagcctccgtatcctcctcttcctcctcctcctccggcagcggcagcgacgaggaggcggcctgccgccggccgctctgcctcccctcctccagcagtagcgaggaggcggcgtcgctgccaaggctcccgccacttcggaaggcgccgtcgctgtcggagattgcagccgctcttaccagcagctcgaccttctgctgtgcggccgtcgtcacgtttttccacggcctcggtgagacgggcctactgagcgcactactgtacttcctcaaggcgaaattccactacagcaagaaccagtatgccaatctgctacttatcatcggcatcacaggaagcttctcgcagctaactgtgatgccactcctagtgcgaaagctaggtgagcagaagctacttgtcatatcactagtggcgagctgcgggcaggcattcctatacagcatctcatggtcgtcctgggtcccatatcttgccgcaagcagtgtaatattaagcatgctggtcacaccttgtataagaagcatcgtatcaaagaaagtgggaccttttgaacagggaatggtccaagggtgcatgactggaataagctcgaccgcaagtgtcgtatctcctctaatctttactcctctcacagcctggtgtctatcagaagctacgcctttctacttaaaaggtttcagcgttgcctgtgctgggtttgcaacgctggtagcgttggcgacgagcataagtatgaggccagctgaagtgcagccagataggaaatagatgagctattgacctctgtttttatgggtaaaagaaggtagatacatgcctgtaaatagtatttacatcctacacttagtcttctactaccatttactattcaatgtcaaatgtagtagtattatgtaatttccttgccgggccacattattagttgatcaacactggtcctaacattttggaggtctgagtgaaaactaatatagagacctctctcatctctttctctctct

SEQ ID NO: 93133 - DNA, 1809 bp, Zea Mays
gagaatagcacaggctcagagcagcatatgaaaaataaaaagagagagagagaggatcgagtgatggagggtctggggcacctgctgctgttcgccttcctcttctggttctccaccttcatggtcgcaccggtgatgaccgacgtcaccatggcggcgctctgccccggccgcgacgagtgctccctcgccatctacctcaccgggctccagcaggcggtttcagggctgggggcgctggtcctgacgccggtggtcggcaacctgtccgacaggtacggccggaaggcactgctggcgctgcccgccacggcgtccatcgttcctctcggcatcctggcgtacggccggaccaagggttacttctacgcgtactacgtgaccaagacgctgacggcgatggtctgcgaaggcaccatgatgaccctctcgcttgcctacgtggccgacagggtgccggagacgaggcgcgcggcggccttcggcgtcttctccggcgtctgcagcgccggcttcgtcggcggcaccgtggcagcccgcttcctccccgtctcatccacgtttcaggtctcagcggtggcagccgtcgcgacggccgtctacatgaaggccttcctccaggagacggacggcggagcctccgtatcctcctcttcctcctcctcctccggcagcggcagcgacgaggaggcggcctgccgccggccgctctgcctcccctcctccagcagtagcgaggaggcggcgtcgctgccaaggctcccgccacttcggaaggcgccgtcgctgtcggagattgcagccgctcttaccagcagctcgaccttctgctgtgcggccgtcgtcacgtttttccacggcctcggtgagacgggcctactgagcgcactactgtacttcctcaaggcgaaattccactacagcaagaaccagtatgccaatctgctacttatcatcggcatcacaggaagcttctcgcagctaactgtgatgccactcctagtgcgaaagctaggtgagcagaagctacttgtcatatcactagtggcgagctgcgggcaggcattcctatacagcatctcatggtcgtcctgggtcccatatcttgccgcaagcagtgtaatattaagcatgctggtcacaccttgtataagaagcatcgtatcaaagaaagtgggaccttttgaacaggtaaaaaaacatgggtcaatcacatcacatgcaatgcaactgatagtttccgtcaacttcccagtatatatatatatatatgaacacaaatggagtttcttcagagtcttcacaaatgaaatggcaggcttcttcttatgttccaccaccatgactccttttgcattattatttaatttttaatcaagggaatggtccaagggtgcatgactggaataagctcgaccgcaagtgtcgtatctcctctaatctttactcctctcacagcctggtgtctatcagaagctacgcctttctacttaaaaggtttcagcgttgcctgtgctgggtttgcaacggtaggttccagttgaatatgcccattgctacaatgaagctgttatgttctttgatatcaacttgttgcagctggtagcgttggcgacgagcataagtatgaggccagctgaagtgcagccagataggaaatagatgagctattgacctctgtttttatgggtaaaagaaggtagatacatgcctgtaaatagtatttacatcctacacttagtcttctactaccatttactattcaatgtcaaatgtagtagtattatgtaatttccttgccgggccaca

SEQ ID NO: 93134 - DNA, 1729 bp, Zea Mays
gagaatagcacaggctcagagcagcatatgaaaaataaaaagagagagagagaggatcgagtgatggagggtctggggcacctgctgctgttcgccttcctcttctggttctccaccttcatggtcgcaccggtgatgaccgacgtcaccatggcggcgctctgccccggccgcgacgagtgctccctcgccatctacctcaccgggctccagcaggcggtttcagggctgggggcgctggtcctgacgccggtggtcggcaacctgtccgacaggtacggccggaaggcactgctggcgctgcccgccacggcgtccatcgttcctctcggcatcctggcgtacggccggaccaagggttacttctacgcgtactacgtgaccaagacgctgacggcgatggtctgcgaaggcaccatgatgaccctctcgcttgcctacgtggtactcctactacctacctacactacataccaagctgccgccgtttgtccgtcaccatctgacagacgggtgcaagtttgtccccctggatccctccctcccgcgcaggccgacagggtgccggagacgaggcgcgcggcggccttcggcgtcttctccggcgtctgcagcgccggcttcgtcggcggcaccgtggcagcccgcttcctccccgtctcatccacgtttcaggtctcagcggtggcagccgtcgcgacggccgtctacatgaaggccttcctccaggagacggacggcggagcctccgtatcctcctcttcctcctcctcctccggcagcggcagcgacgaggaggcggcctgccgccggccgctctgcctcccctcctccagcagtagcgaggaggcggcgtcgctgccaaggctcccgccacttcggaaggcgccgtcgctgtcggagattgcagccgctcttaccagcagctcgaccttctgctgtgcggccgtcgtcacgtttttccacggcctcggtgagacgggcctactgagcgcactactgtacttcctcaaggcgaaattccactacagcaagaaccagtatgccaatctgctacttatcatcggcatcacaggaagcttctcgcagctaactgtgatgccactcctagtgcgaaagctaggtgagcagaagctacttgtcatatcactagtggcgagctgcgggcaggcattcctatacagcatctcatggtcgtcctgggtcccatatcttgccgcaagcagtgtaatattaagcatgctggtcacaccttgtataagaagcatcgtatcaaagaaagtgggaccttttgaacagggaatggtccaagggtgcatgactggaataagctcgaccgcaagtgtcgtatctcctctaatctttactcctctcacagcctggtgtctatcagaagctacgcctttctacttaaaaggtttcagcgttgcctgtgctgggtttgcaacggtaggttccagttgaatatgcccattgctacaatgaagctgttatgttctttgatatcaacttgttgcagctggtagcgttggcgacgagcataagtatgaggccagctgaagtgcagccagataggaaatagatgagctattgacctctgtttttatgggtaaaagaaggtagatacatgcctgtaaatagtatttacatcctacacttagtcttctactaccatttactattcaatgtcaaatgtagtagtattatgtaatttccttgccgggccaca

SEQ ID NO: 93135 - DNA, 1967 bp, Zea Mays
ggggacgctcatcatcactgccatctctctctgactctgtgtccgtctctaaactctagtctgtgcgaatctgctgccagcagcgaggaacagaacagtagccaatttgccatctcacagttgcgttcctccgattccccgtcccccgatggacctgtctcccagctcgtcggcgccatccgcgccgccggtgccgtgcgagtggtccggcgccgggctcggctccgcggcgtgcggcctcgcctgcagggtgctctgcgccgtcgccacctgcgtcttcgcggccgtggggtcgctggtcggggcggtgacggggtccatggtggggctggcgaccgagagcgggatgctgcgcggcgccggcatcggggccatctccggcgccgtcttctccatcgaggtcgccgagtcgtcccgcgacctctggcactcgggcgactccggcgtctggaccctcctctacatggtggacatcatctccagtctcttgagcggcaggctggtccgggagaaggtggggccggctgttcagagcgccgtgcagagccaggtagccaccccccacccaacctcactcatctgatgaaataaactgagcgtgatctgatcagactttttttttatatctctgacgctctgatcctccttctggtgccgattgcttatgcttaatgcactgcaaaatcctaaatttggtctcggttggtccattggctggctctatcgatcaacaacaagtttaggtagcagcagcatactaaacaaacaaaggatatacatatggagatgcttgtgcgcataatctgactgagtggtggttagtccatgtcctccatgcattgccctgccctgaagccaacgcgtcgatttcttcctagatggagtaacaccagcaattcaaaggcgcgcgcgccctctttttagacctttaatacccttgttagttatagaagggagcaagaattgttaccttaaaaaatggggctgtgctggtgcctgccttctagatcactttcagagaggccatcaggctcaagtaaattaaagacacttcggcatcgatgacaaatgagatgacgtgtctcagttaattgcccccacctgctctcccgacccaaccgcgtgtattgcactgccagtgccagcaacgcaggagagaagctcatggtcagcgtcagcctgctgtaagcatgtaactgacctgtttcttccgtctgtttgtcgtggacgcacgcagatcagcgccatcagctcgccgttcgaggagacgagcgacctgttcgagaccggcagcgtgaggggcctccccgaggccgcggtgcgccggctgccggtgacggtggtcgcggaggacggcgccgtggacgcggcgggccaggcgctgtgctgctcggtgtgcctgcaggacttccgggtgggcgaccgcgcgcggaggctgcccggttgccgccacctgttccacgtgccctgcatcgactgctggctcctcaggcacggctcctgcccgctgtgccggcgagacatctgaaactcggtcgtctgctctgtgaaccgccacccacgtcgccggaaacgtggtgtagtgttgctgctttggacgagatggtcagttagttgagtagggttcctactttgtaggacggcaccctgatgcccgtaagggaaatggtgcgctctgacgctctgttaactaaaaaagaagaagagagaaaacagcccctcagcttcaaagaatcaaaaggggaaaaaaaccataatagtgaacaaacgttcaacgacaaaacggcacaactgacggtcgcatgcaggttcaggccgagcttatctgcggattcagaattattcgtagttagctatagttggagaatgaaaccctaatcagggtgattagggttgatagtgaatatatatagctgagtgttatgggtcaaagctaattaacgaaggtatatacagagacgtaaaca

SEQ ID NO: 93136 - DNA, 1140 bp, Zea Mays
ggggacgctcatcatcactgccatctctctctgactctgtgtccgtctctaaactctagtctgtgcgaatctgctgccagcagcgaggaacagaacagtagccaatttgccatctcacagttgcgttcctccgattccccgtcccccgatggacctgtctcccagctcgtcggcgccatccgcgccgccggtgccgtgcgagtggtccggcgccgggctcggctccgcggcgtgcggcctcgcctgcagggtgctctgcgccgtcgccacctgcgtcttcgcggccggtgcgtacgctggcgagtagaaacccgcgccgcgcgagccgctggcggtggggtcgctggtcggggcggtgacggggtccatggtggggctggcgaccgagagcgggatgctgcgcggcgccggcatcggggccatctccggcgccgtcttctccatcgaggtcgccgagtcgtcccgcgacctctggcactcgggcgactccggcgtctggaccctcctctacatggtggacatcatctccagtctcttgagcggcaggctggtccgggagaaggtggggccggctgttcagagcgccgtgcagagccagatcagcgccatcagctcgccgttcgaggagacgagcgacctgttcgagaccggcagcgtgaggggcctccccgaggccgcggtgcgccggctgccggtgacggtggtcgcggaggacggcgccgtggacgcggcgggccaggcgctgtgctgctcggtgtgcctgcaggacttccgggtgggcgaccgcgcgcggaggctgcccggttgccgccacctgttccacgtgccctgcatcgactgctggctcctcaggcacggctcctgcccgctgtgccggcgagacatctgaaactcggtcgtctgctctgtgaaccgccacccacgtcgccggaaacgtggtgtagtgttgctgctttggacgagatggtcagttagttgagtagggttcctactttgtaggacggcaccctgatgcccgtaagggaaatggtgcgctctgacgctctgttaactaaaaaagaagaagagagaaaacagcccctcagcttcaaagaatcaaaaggggaaaaaaaccataatagtgaacaaacgttcaacgac

SEQ ID NO: 93137 - DNA, 1092 bp, Zea Mays
ggggacgctcatcatcactgccatctctctctgactctgtgtccgtctctaaactctagtctgtgcgaatctgctgccagcagcgaggaacagaacagtagccaatttgccatctcacagttgcgttcctccgattccccgtcccccgatggacctgtctcccagctcgtcggcgccatccgcgccgccggtgccgtgcgagtggtccggcgccgggctcggctccgcggcgtgcggcctcgcctgcagggtgctctgcgccgtcgccacctgcgtcttcgcggccgtggggtcgctggtcggggcggtgacggggtccatggtggggctggcgaccgagagcgggatgctgcgcggcgccggcatcggggccatctccggcgccgtcttctccatcgaggtcgccgagtcgtcccgcgacctctggcactcgggcgactccggcgtctggaccctcctctacatggtggacatcatctccagtctcttgagcggcaggctggtccgggagaaggtggggccggctgttcagagcgccgtgcagagccagatcagcgccatcagctcgccgttcgaggagacgagcgacctgttcgagaccggcagcgtgaggggcctccccgaggccgcggtgcgccggctgccggtgacggtggtcgcggaggacggcgccgtggacgcggcgggccaggcgctgtgctgctcggtgtgcctgcaggacttccgggtgggcgaccgcgcgcggaggctgcccggttgccgccacctgttccacgtgccctgcatcgactgctggctcctcaggcacggctcctgcccgctgtgccggcgagacatctgaaactcggtcgtctgctctgtgaaccgccacccacgtcgccggaaacgtggtgtagtgttgctgctttggacgagatggtcagttagttgagtagggttcctactttgtaggacggcaccctgatgcccgtaagggaaatggtgcgctctgacgctctgttaactaaaaaagaagaagagagaaaacagcccctcagcttcaaagaatcaaaaggggaaaaaaaccataatagtgaacaaacgttcaacgac

SEQ ID NO: 93138 - DNA, 1627 bp, Zea Mays
ggggacgctcatcatcactgccatctctctctgactctgtgtccgtctctaaactctagtctgtgcgaatctgctgccagcagcgaggaacagaacagtagccaatttgccatctcacagttgcgttcctccgattccccgtcccccgatggacctgtctcccagctcgtcggcgccatccgcgccgccggtgccgtgcgagtggtccggcgccgggctcggctccgcggcgtgcggcctcgcctgcagggtgctctgcgccgtcgccacctgcgtcttcgcggccggtgcgtacgctggcgagtagaaacccgcgccgcgcgagccgctggcgggtacggtacttactttccacctgctggtgtctgatgatgcttgccctgcgctatggtttttttttccccgcagtggggtcgctggtcggggcggtgacggggtccatggtggggctggcgaccgagagcgggatgctgcgcggcgccggcatcggggccatctccggcgccgtcttctccatcgaggtcgccgagtcgtcccgcgacctctggcactcgggcgactccggcgtctggaccctcctctacatggtacgctacgcacattgatctgcgtccattccatcgtactctgccaaactggtcactggcacttcgggtcgtgtagtttggttgcaaatcgcagagagtacttgcccgcccgagcacaccacactcgtttccgcggcctgatggggggcttcagcttgatgttgaccaagacgattaggttaggtgtgccccatggattccgtgggggatggcctcattccgttcgtaaaagataaaatgattttcccccatttattatcttggcgcgctatccaaatggatgtgaaaatatcgtgttcttcacctgcatctgtgttgaatgtgctgaggtaggagtagctccggttttgctcggtgcctgtctctgacgtctgaccccaagtgtttttttgcgctctgcttctgtgcacgcaggtggacatcatctccagtctcttgagcggcaggctggtccgggagaaggtggggccggctgttcagagcgccgtgcagagccagatcagcgccatcagctcgccgttcgaggagacgagcgacctgttcgagaccggcagcgtgaggggcctccccgaggccgcggtgcgccggctgccggtgacggtggtcgcggaggacggcgccgtggacgcggcgggccaggcgctgtgctgctcggtgtgcctgcaggacttccgggtgggcgaccgcgcgcggaggctgcccggttgccgccacctgttccacgtgccctgcatcgactgctggctcctcaggcacggctcctgcccgctgtgccggcgagacatctgaaactcggtcgtctgctctgtgaaccgccacccacgtcgccggaaacgtggtgtagtgttgctgctttggacgagatggtcagttagttgagtagggttcctactttgtaggacggcaccctgatgcccgtaagggaaatggtgcgctctgacgctctgttaactaaaaaagaagaagagagaaaacagcccctcagcttcaaagaatcaaaaggggaaaaaaaccataatagtgaacaaacgttcaacgac

SEQ ID NO: 93139 - DNA, 102 bp, Zea Mays
gaaaaaatccagcatacaaaaatgatgtatccatacattatttcaagaatgtgcaatgaatgcgacatattttacattatagtaagacttacccatagctct

SEQ ID NO: 93140 - DNA, 2171 bp, Zea Mays
ctctctttcgcggcaagcgccagcgcggcaacttggcgcgttgacgctgcacgcaatttcaaccgtccgaccagcatcctagggcttcctctcacgagcggttggccctgaccggcccactcgtctaccacagatttggagttcgaccacgacgacagaacccgccgtccgacccattcacccccgtggaccgtgccggtgccgcggcacgccgccgccgcaacgccatggggaagcgatccggcggccggaagcttccgttcttcaccagatcctcctcgtcctcctccaagcggaatcgctccgggcgtcgcctcccttccccctccaagcaggacaacgcgacgagggctcttctcgcctcccccaccgccgcctcgccgtccgcgaccccggactctgcagcggcggggcagaccgcccagccgccctctcccctctcagtcaccgcgggcgccgggggtgccttgtcggggaagatcaccaagaagaagcccggcgcgcgcctgtggatgcggctggaccgctggggtgcctccgaggtcgtcgagctcgacaaggccaccataatccgccgcgctggccttccctcgcgcgacctacggatccttggtcccgtattctctcgctcctccagcatcctcgctagggagaagacaatggtgatcaacctcgaattcatcagagcgatagttactgccgaggaggtgctcctgttggaccctctcatgcacgaagtgctccctttcgttgatcaattgaggcagcacctgcctctgaggagccttgtgggtgggaatggtgaatgtgcccctgatggcaatggagaaaaacaggggggctcgcatggaggccaggtgccccgtcttaatgaggcgaccggggcagagcatgagtttccatttgagttccatgtgctggaggtcgcgctcgagattgtgtgctcatcgttggaccttagcgttgatgaccttgagaggcatgctactccagtgcttgacgaactgacaaagaatgtgagcacaaggaaccttgagcgagtgcggagccttaagagtcatcttacccgtttgcttgcccgtgtgcaaaaggtcagggatgaaatagaacatcttctggatgataatgaagacatggaacatctgtatctaacaaggaagcaagtacaaaaccaacaggttgaggctttaatgtcatctgctgcttccaacagcattgttcttgctggacctggtgtgcccaggttgaactctagcttccggcgtagcttgagcgttgctacgagcatgcatttggataatgatgtggaagacctagagatgttacttgaggcctacttcatgcagctggatggaattcgcaacagaatcttgtcggttcgggagtatattgatgacacagaagactacgtcaacattcaacttgacaaccagcgtaatgaactaatccaactccagcttacactgaccattgcatcctttggcatagctgccaacactttcattgttggagcttttgcaatgaacatcccgagctctctgtacaacaccgataacaccctcttctggccatttgtcgggggtacctcatccggctgctttgtgatcaccatcctcttgtttgggtatgcctggtggaagaagttgctgggtccttgaacacgaaacaagatggcagagggccttgtcatgtttgcagaaagggagcaggcgctcgaaggatattagagaaccgtggggatagcatggaaaccgtatataacatctcactgagtggcccataagatgagtacatgtgatttctcattagcataaatgagatggtgttgatcgatatactttattgttaacatcattagattagatcttgctggcaatagaaaaatgttgccatgcgattttaagatccagcaacggttggttttgcttacagattgcttttctttctagtcttggaggtgccatcttcggtgcttcagtttttggggaatcggcaggtaatggttgtttagccgagtatagtcacatctagtgcccagtttactggtcggtctcccccacctgacgaattgtaataactctcatgatgagttggttgctcagttgagcccaatctttgttcaaaggatcagctcttcgaatatttttgtgagcgcgttggttgctcagttg

SEQ ID NO: 93141 - DNA, 1513 bp, Zea Mays
tgcactattaaatatattttttgtttgttttatttgaaaccaatgtatcactagacactggaacattttgaaatgtcatactaagataataaacacagaatcaagaagaatagaaattaaaaagagatcagaaaaagagaaattgctaaaaaagaaaacgcgaaacggcccaggacaaggcccgtgggccgtggtgagctctccgtgtccgtcggccgagccgaaccctcggactgggctaccgccgcatgccccgtcccgaatccattccgttcaccccgtccccctcgttctctctctcgttgcgacgactgtgtggagtaccgcccccgccccctcaccctcaccccccgacgccgacgccctaggcggctacgccaggtcccgagggacgggcccttcatcttcgtcagtctattcgccgggcgacgagcacccgccagtttggttggagcttggagtttagagggaagatttggtgatgagcagccgcagcctgccgccgaaggatcgcaggatgcgtactgaacgcacctcataccgtgatgcaccatatcggagggacagccgccatggtccaagcaggtttcgtaatgatttgtgcaacaattgtaagcgtcctgggcattttgctagagagtgtcctagcgtggctgtctgccatacctgcgggcttcctgggcacattgcagccgaatgttcttccaaaggtgtttgctggaactgcaaagagcctggccacatggctaacagctgcccaaatgaagggatatgccgtaactgtggcaagtccggtcacattgcaagagactgcaccgctccaccagtgccgccaggagaagtgatcctttgcagcaactgctacaaaccagggcattttcgtgaggaatgcaccaatgagaaggcctgcaataattgccggcagagcggccaccttgcccgtaactgcaccaatgatcctgtttgcaacctgtgcaatgttgctggccatctggcccgtcagtgccccaagtctgatacattgggtgagaggggtgggcctcctcccttccgtggtgttggcgctcccttccatgatgttggcgctcccttccgtggtggcttcagtgacgtggtctgccgggcctgcaaccagattggccatacgagtcgtgattgcatggctggtgccttcatgatctgccacaactgtggcggccgtggccacatggcttatgagtgtccctctgccagtctcatggaccggttcccccctcgccgtttctgaaggaaggacatccaagggctgttcagatggctgttgttttcagcccattttgtcaggagcacctgttttgctttgctttatgtatttctaaacccgaatggattctagatatttcagattcataactcgtcagcgctatttgtaattctggatatgttacccgactccgatgttcttgatgataatgtttgaagacggggatacttgcccttacgaactcaaattcatctcatgagttttaaataa

SEQ ID NO: 93142 - DNA, 1572 bp, Zea Mays
tgcactattaaatatattttttgtttgttttatttgaaaccaatgtatcactagacactggaacattttgaaatgtcatactaagataataaacacagaatcaagaagaatagaaattaaaaagagatcagaaaaagagaaattgctaaaaaagaaaacgcgaaacggcccaggacaaggcccgtgggccgtggtgagctctccgtgtccgtcggccgagccgaaccctcggactgggctaccgccgcatgccccgtcccgaatccattccgttcaccccgtccccctcgttctctctctcgttgcgacgactgtgtggagtaccgcccccgccccctcaccctcaccccccgacgccgacgccctaggcggctacgccaggtcccgagggacgggcccttcatcttcgtcagtctattcgccgggcgacgagcacccgccagaaagaagatcagcggtttgttggagtatcgaaggtggtgatttcgtagcgtggtgttgcagtttggttggagcttggagtttagagggaagatttggtgatgagcagccgcagcctgccgccgaaggatcgcaggatgcgtactgaacgcacctcataccgtgatgcaccatatcggagggacagccgccatggtccaagcaggtttcgtaatgatttgtgcaacaattgtaagcgtcctgggcattttgctagagagtgtcctagcgtggctgtctgccatacctgcgggcttcctgggcacattgcagccgaatgttcttccaaaggtgtttgctggaactgcaaagagcctggccacatggctaacagctgcccaaatgaagggatatgccgtaactgtggcaagtccggtcacattgcaagagactgcaccgctccaccagtgccgccaggagaagtgatcctttgcagcaactgctacaaaccagggcattttcgtgaggaatgcaccaatgagaaggcctgcaataattgccggcagagcggccaccttgcccgtaactgcaccaatgatcctgtttgcaacctgtgcaatgttgctggccatctggcccgtcagtgccccaagtctgatacattgggtgagaggggtgggcctcctcccttccgtggtgttggcgctcccttccatgatgttggcgctcccttccgtggtggcttcagtgacgtggtctgccgggcctgcaaccagattggccatacgagtcgtgattgcatggctggtgccttcatgatctgccacaactgtggcggccgtggccacatggcttatgagtgtccctctgccagtctcatggaccggttcccccctcgccgtttctgaaggaaggacatccaagggctgttcagatggctgttgttttcagcccattttgtcaggagcacctgttttgctttgctttatgtatttctaaacccgaatggattctagatatttcagattcataactcgtcagcgctatttgtaattctggatatgttacccgactccgatgttcttgatgataatgtttgaagacggggatacttgcccttacgaactcaaattcatctcatgagttttaaat

SEQ ID NO: 93143 - DNA, 3170 bp, Zea Mays
acccctctattttccctagccgccacttccttctccccctgtcttcttccacctcgcgcaggaatcctcccacggcagcagcagccagcgcagggagcttcctccacccatggcgcccaagcccttcttcttcctcaagccagcggcgccctcattcctccctgcgcagcgccccttttcttgtgcctccagcagcaagaagccatcgcccctctccattttcccccacgtctcttccctctgtttttcctgtacgtgcgcaggagtatggggcctcccatggcgccctcctccctggtctcccttgcgcagggcagccatggccgagctcgccctcgcctcctgctctccatgggcgtgggtccccatcctctccctcctcccaaagtgcaggtagcagtccagcagccatggacgcccaggctgggaaacgctggaactcgcgctctctctggtttgggtggagcagcgcctctccctgcgctcagcctccccaactcggtgcccttgctgcaggcgagcagtagctccctatccatggcgccattgcaatattccccttcctccccctcggccagccatggcgcagcgcctctgatccttcatcctcgcaacgcagcagccgagctcgccccacctcccctcgctgcgcagcccctcggcgaaacgccgctgttcctgcaagccccggcttcctcgctgctaccgctgcgcgtatgccaagtgctcggcataatgtcaagggagatgtgttgttgcagcacgttgtgacgctcgccgggtgttcactgtttttggcgcagccccgttcgcgatgtcgtcgaccctcgctagtggtcgacgccgcgcttcgcgccttgcccgttcgacaaaatgccgagccatgtgtatagcccatgcgtctagccacgattcgttcaggttgattgatttataataatacctatgctttggttgatgtcgggcagtgcatgtatatatgtgaatgtgtgtaatatgtttcggctatacacgttggtaggatcgcatttgcggttaaagaacaagaggttgttcaatgcgtgagatttgtagtttgtctaattatgttttggtcgatgtggtgtacatgggtgtttaattatgtgtgggtataaaatgtttgtttatacaccgtggcaaggtcgcattcatgttttggtaaataaatgtgtcgtgcttattttatgtgatgagtaagtctgcaaatacatgggatgcgaggatttaattagtgcacgtatgtgtgtgtgtgctgtggtgtgatatggtagtggtggcgtgagatatttgtttgaggtgtgcgggtatatgccgtgatatggttatactcgcaacaagaaaagatgtacacattgggtaacacgacgcttaggtcactgtggtataatcgaataaaggatgtattattgaccttgaatcaaaatgtggggtactagtggtacgctaggcggtgtccaaataaattaaccgggtcgatgtggtagtggtcgtgcgtaatttattgttagtgagtagttggaattccgagctatatgaggattatgttaaaaactagtaagcggcgggtaacctgcgttcgtatggtgaataataggtcggtaggtattgttgatgccagtagcaaatgtagtcttatggagttttacgccatgtgtaaatgcctccacgatagaccccaaaaatgtgctatttaggtgacttgtgtgttaactaattcaagttgagcaatggttgagaaacactgatcaatcggccccaacccatgttcttgagttacgatgtctaaaatggttcgctaggtcttctactgtgattagccaactcatgttaaataggagtcgatttcgttaagtgtttgatatatatgtgttgtttcggattgcaatgataagaggcaagccgacgtgtaggatgtatagcgggctatgccgttgctctagttagccgacttgttagatgacttggtcaagcgcgtaatcacggtaaattgcttgttgtggtctaaatgtgtatggttatggtcgcggatgaaaagtagtagtgctcatgggaggtctaagttaaaatgcaaattattgggtgaaaagcgcttcgatgttgatcatcgtggagagcgtgtggttaattgagtatggtaaatctagagcacgaaatgactcggataaaatttatgagtcaacttgatggtcctaatttgactaatttaactctaatcaacggtgaagtgttagaataattcaagtctctagaatgcggcaattcttgaattatatagaagctggaatttgttgattgctgttttggactgcacacgctgtttttgtcgtgctgtatgtttgataaactaaattgtgttttccgtagatatgtgctatagaaaagtggtagataaccttattatcttgctggtgttaaaatttgacagccacaggtctaacagtttaggagttgtgctttttacaaattcagtaactgaatctgtccaaattctgtacaaatttcagaaattgtattgtttgctcaatttaatgttgcaacctgttcatgatcattataagaaagttgtagaggcttttcttatcttgcttgtgtcaaaatttcataactataggcctgacggtttaagagttatgaattttacaaactggttgctgtgttctgtccaccgtcagaacagatttcgaaaactgtaatatttgatttagttaaacctggaatcacttcttggtgattataaaagttatgtattacttttgctaagcttttcaaaaagtcttagatcactctttttggtggtctgaagattaagttacatgtgtttgaagtgtgaagactgaatctgtccagttttggacagcaccgccttcatagtatattttaactttgatacatgctaaaccagccagggatgtttataaataatttgtagaacatttaattagctttccagaaagtctaggatcaccttgtttggatgcctgaatcttcagttatgaatttttaaagtcataagtctgaatctgtccaaatctggacagcgctgttgtattagcacgttttgaccttgctaagtgttgaattatgttgtgatgaaaataccaaagttgtagttcactttttaagctttccggaaagtcctagtttgatat

SEQ ID NO: 93144 - DNA, 1171 bp, Zea Mays
acccctctattttccctagccgccacttccttctccccctgtcttcttccacctcgcgcaggaatcctcccacggcagcagcagccagcgcagggagcttcctccacccatggcgcccaagcccttcttcttcctcaagccagcggcgccctcattcctccctgcgcagcgccccttttcttgtgcctccagcagcaagaagccatcgcccctctccattttcccccacgtctcttccctctgtttttcctgtacgtgcgcaggagtatggggcctcccatggcgccctcctccctggtctcccttgcgcagggcagccatggccgagctcgccctcgcctcctgctctccatgggcgtgggtccccatcctctccctcctcccaaagtgcaggtagcagtccagcagccatggacgcccaggctgggaaacgctggaactcgcgctctctctggtttgggtggagcagcgcctctccctgcgctcagcctccccaactcggtgcccttgctgcaggcgagcagtagctccctatccatggcgccattgcaatattccccttcctccccctcggccagccatggcgcagcgcctctgatccttcatcctcgcaacgcagcagccgagctcgccccacctcccctcgctgcgcagcccctcggcgaaacgccgctgttcctgcaagccccggcttcctcgctgctaccgctgcgcgtatgccaagtgctcggcataatgtcaagggagatgtgttgttgcagcacgttgtgacgctcgccgggtgttcactgtttttggcgcagccccgttcgcgatgtcgtcgaccctcgctagtggtcgacgccgcgcttcgcgccttgcccgttcgacaaaatgccgagccatgtgtatagcccatgcgtctagccacgattcgttcaggttgattgatttataataatacctatgctttggttgatgtcgggcagtgcatgtatatatgtgaatgtgtgtaatatgtttcggctatacacgttggtaggatcgcatttgcggttaaagaacaagaggttgttcaatgcgtgagatttgtagtttgtctaattatgttttggtcgatgtggtgtacatgggtgtttaattatgtgtgggtataaaatgtttgtttatacaccgtggcaaggtcgcattc

SEQ ID NO: 93145 - DNA, 1111 bp, Zea Mays
cccaaaagcagaccatatccccaggcaaaggccaaggccaagcgagacagggagggaggagaagtaaccaagtgtctcaagcaacctaccgcccgcccgcccgccggccgcttcatttcctccactccacactcaccacgacacaccgccctcttcccttctcttctctcaagaaagaaccagctagcgcgcgcgcgcacacacaagcctgaagcctccccatacccgccatgtctgcgtcgccggagttctacaagccagcgccgccggcgttctcgccgtgcagctcgccgctcctgctgcccggggcaggggcggcggtgggagcagtggccgaggagagcgccgccgcaaccgtgtcgcagcaggaggaggaggactaccgctgccggacgccgacgggcggggagagccaggtgaggccgccggggacctgcccgccggcgccgcggaagccgcgggcgcccgcggcccccgcgccgtgccggaagcgcctgttcgaggtggaggtgttcagtctgcggctggaggagctggagcgcctcttctggcgcccgcgccccgcggcgccgccaccgccgccgccgtccgcccagaagaagcgccggagggtggcctgcccggagcccaagaagagatagtagctaccttcgtctggcaggtgctagtcgtagtagtagtacaggtcgtgtagcagcggtagctagctaggtgcagagccaagtggttttggcttggatcgatcacatacagcagcttattattaggatcggaggtccatggtagggggggtgcttaggagaggactgctgtacttgtactgctacagctcgtcggcacatctctctagctagtttcctctatctatagctcacaatcagttcctgtagttgctagatgctgttcagtgtgtgtatgtggtgatgatagtgtcatggtgtcaaaaggtgtagcgcaatactagctagctagctagctgtaggcactaggcaggagctgcatgccctgaatctccattcttccatgtagcccctgtgtgtaacgaagaagctaagctcacttgtaccactagcgtcatatatatatactctcattcacttgttacgcgatc

SEQ ID NO: 93146 - DNA, 97 bp, Zea Mays
ccactctccactgtccagttctagtattcatatttgttttgtttggtaatttggttaccttgatattgcctcctatatgctatattgctatatgcta

SEQ ID NO: 93147 - DNA, 1158 bp, Zea Mays
atgccgaacctggtatttttgctgttcactgccggattgctcgggctggcctggtggatacgcggacgcgaacaaaaagcgcctgccgaacccaaaccggtaaaaatggcagagaataataccgttgtcgaagcgacgtggaacgatgtacaactggaagattctctgggaatggaagtgggttatcgactgatcccgatggtcgatttccagcaggatggtgagttgttgggccgtatacgcagtatccgcaagaaatttgcccaggagatgggatttctgccgccagtggtgcacattcgcgacaatatggatctgcaacctgcccgctatcgcattttgatgaaaggcgtggagattggcagtggtgatgcttatccggggcgctggctggcgattaaccctggaaccgctgccgggacgttacctggtgaggcgaccgtcgatccggcatttggcctgaatgctatctggattgaaagtgcgctaaaagaacaggcgcagattcaggggtacacagtggttgaggccagcacggtggtagcaacgcatcttaaccacctcattagccagcatgccgcagagctgtttggtcgtcaggaggcgcaacagctgttggatcgcgtcgcccaggagatgccaaagctgacggaagatctcgttcctggcgtcgtcacgctcaccacactgcataaagtgctgcaaaatctcctcgatgaaaaagtaccgattcgcgatatgcgcaccattctcgaaacgctggcggaacatgcgcccatccaaagcgatccacatgaattaaccgccgtcgtgcgcgtggcgttgggacgggcgattacccagcagtggtttcctggcaaagatgaagtccatgttattggcctcgatacaccgctggaacgtttgttactacaggcgctgcagggcgggggaggactggagccagggctggcggatcgtttactggcgcaaactcaggaagcgctatcccgtcaggagatgctgggtgcgccgccagtattgttggtgaaccacgcgctgcgaccattattgtctcgcttcctgcgccgcagcttgccgcagttagtggtcctgtcgaatctggaactgtctgataaccgacatatccgcatgacggcgacaattggcggcaaataa

SEQ ID NO: 93148 - DNA, 733 bp, Zea Mays
aagcatggtagaattcacaacctaatgagagagaagctaggtggtgatcttgttaggccaggtgtgactcgatttgctacctcatttctgacattggcgagcatgcttaggcataggaatggtctaaagagtatatttgttagtgatgagtggcacctaactaagtttcccaacactgaagaagggaggtaaatcacaagaattgtgctttctatgccattttgggaaaacgtggaaaactgtctaagggcttcacaaccactcctcgttgctctaaggattgttgatggagatgagacaccagcaacccaagaaatcatggcaacattggatgttgcaaaagccaccataaaggagtcattgaaagataagccaagattacaagcagatgtactatcatgctttgaaaaagatgggaaaatcaaatggagcaaaaactgtatggatcagccctatacttgaatccaaacaagttctttgatttaagggataaagataggagacaagttgctagacttagatccatgttcaatgatgtgatgtggaagatgatgatgagcaaacaaaaaatagcaagcaagcggatgactatgagaggtttgaagttctttggtggggagcttatggtggcctagcatatgaactataatgcttagcaaagatgattgtcagcgatgaactataatgcctatgttgttcaacatctagatgtgaacgaaattggagtgacttt

SEQ ID NO: 93149 - DNA, 371 bp, Zea Mays
ttagggactaaaatggagggactaatatttagcccctcaaaccaaacggcgcctgaggtacttttgatgtttgcaggggtagcgagtccagtaatatcaggattcttgagctgctcaagctgcttcttccctctcctcaacaagtactctatgtgtacaaagttcctacggtcaacactccttgcgttgtcacggaactctgcaaagacaacagactcgatcctgcggcgttcttcaggggccttaaggcgtgctgtccgaaggaatcccctgtacagcgccaaaacctgcttctgaataccagacagctttgggcgggaggccatatcatccttgtacagcaatcatcaaagcctgatgcacatgtaact

SEQ ID NO: 93150 - DNA, 1120 bp, Zea Mays
accaacaccgtcgtcgtcgtctgtcaccggccacaacgacactgataaactgatgacactgtgatcggtatcgacacacacgtccaaggaaacacagtattatattactctagcggcagagagatgggatccctgcagcccaacaatgctgtcgccgtggcagtggccgccgccgtagtcctggctgcgctcgccaccggcgggtcgtgctggaccgacgaccgcctcaaggcggtgccgccgggccccaacatcacggccgactacgacggcaagtggctcgccgcaaaggcgacctggtacggcagtcccgtcggcgccggccccgacgacgacaacaacggcggcacgtgcgggttcacgggcgtgaacctgccgccctacagcggcatggctgcctgcggcaactcccccatctacaaggacggcaagggctgcggctcctgctacgagatcaggtgcacgtcgccgcaggagtgctccgacgagccggtggtggtcttcatcaccgacgcgaacgactaccccctcgctcgctaccacttcgatctcagcggcacggcgttcggctccatggccaagcccggcctcgccgacgagctccgccaccgtggcatcatcgacctggagttcaggagggtgcggtgcaagtacgcgcccggcaagaacatcgtgttccacgtggagcacgggtccgatccgtcccacctggcgctgctggccaagttcgtggcgggcgacggcgacatcgtgcagatggacctcaagcagggggcgtcgctcaagtgggagccgatgaaccactccgtgggcgctatctggaggatagagacggccccgcacaagccgctcaagggccccttctccatccgcctcaccagcgagtccggccaggaggtcgtcgccgccgacgtcatcccggaggactggaagcccgataccacctaccagtccaacgtccagttctagatccactcagttaactgatccgagcatgcataccataccgttaattattcatcgggctgaggggctactttttgcattctatctagtatatgtaatgagagagcccaccttgtgtttgggtttacaactaactaaaacttgcctatgcata

SEQ ID NO: 93151 - DNA, 1279 bp, Zea Mays
atggtcccgaggcttttcgaaaagctaaaggatgagtctccgaggagaaggaacacaattgtgactagggtgccaaatattgcgagagaagtctgcgtactttccattcgtaaaattgaaatgttccgattacaattaaatgacatgggaaccgctacgaggagtgatgatatatctggagatgttagagcggcggaggccaacctccgtaggcaactggagcaaaccctcgccgctgaaccctccagcccgctccaccactacaaccttggcgtcttcctatgggaccgcgccgaggcagagcaggagggtgatggggaagaggcgcggaagctccgcgcggaagcgtcggagcattttctcgcggcggccaagctgaatcccaacgatggcgtccccttccgcttccttggccaccactatgcgcgcggcggtgacaatcaacgagcggtcaagtgctatcaccgtgccgtgaccctcaaccctgacgactctgaggctggtgacacactctgtggcttgctagatgttgaagggaaggagagcttggagcttgctgtctgcaaggaggcagctggcaagtcaccgcgtgcgttctgggcttttcggagacttggctatttacaggttcatcagaggaaatggtcagagggtatacaaagccttcagcatggaatacgaggttacccaacatgtgcagatttatgggaggcacttggtctggcataccaccgtttgggcatgttcaccgcagcagtaaagtttttgccggcagtcatatggacgagctattgaacttgatagttccagggtctttgcattgatagaaagtggaaacatccagttaatgcttggttactatagaaagggagtggagcagtttcgttctgctttggaaatggctccatgtaatcattcagcatactttggccttgcttctgcattgcttgcatgggcaaggaattgtgtaactactggggcctttggttgggctgctagcctgttgaaggaagcttcagaagcttccagaatttgtacttctttgactggaaacctttcatgcgtctggaaattgcatggagatgttcagctcacacttgcgagatgctttccatgggtggatgggaaaatcaaaagggtcatggatgcacagatgttcaaaaattctgttcaagagtggagaaatacatgtttgttagcagcaattgttcaaaactctcatatcaacgtgctttgcatcttactacctgacgaattcaagctgaatctccacaggtaa

SEQ ID NO: 93152 - DNA, 1657 bp, Zea Mays
ggccggaagggggactgggggagggaaaagaataactgaggaagcgggcggtgcctgcctgggtgcgcgtcgtcgccagacgcgggcgcaatgccgcgcctccgcctccctctggtcctcctcctccccatagccctcaccatcatcctcctcatcctgttcccattttccccaagcccgcgctcgcccccgcctcagccactcccctgcggcgccgcgctctccgatgcggcggacggccggtgggtgccgaccccatcgcccgcaccgccgccactatattctccgtcctgccccttccaccgcaatgcctggaactgcctccgcaacggcaggccccagctcgcggcgctctcctgggcgcccgcccgctgcggcggcgccgtcgtgccgagggtcgacgccgcggggttcctggccgctgccagggggcgacggattgggctcgtgggggactcgctgtctgagaacctcgttgtcgcgctcctctgcgcgctccgctcggcggacgacggcgcccgcaagtggaagcggcgtggcgcgtggcgcggaggctacttccccaaggaggacgtcgtcgtcgcttaccaccgtgccgtcctgctcgccaaatacaccttacttggtggtgactaatgataaaaaggtggcttcctgtggagaattcagaagttaggaaggatggaataaaaggaacatacagagtggatgttgacattcctgctaatgattggataaacgtcaccaagttctatgatgttctaattttcaacactggacactggtgggatagatataaattcccaaaagacactccccttgttttctacaaagggggaaagccgattgaacctccacttgacatgcacaacggactgaaagtagtcctgaaaagtattgcttcttacatcgaaagggaggttcctaggaaaacactgaagctgtggcgcacgcagtcacctaggcacttctatggaggtgagtgggatcacaatggcagctgtgtatctgatagacgtcttgaagagcatgagctcaattcttggtttgatccccagtttgggggagtgaacaaagaagcgagaaccgtgaatttagcaattcaggaagccctggctggcacggaaatccagttgctcaacctcacttacatgagcgagttccgtgctgacgcccatccagctatctggctcggcaagaaggacgcggtggctgtctatggacaggactgcatgcattggtgcctgcctggcgtgccggacacttgggtcgacatcttggctgcacagatcatgcatcacttcaagcaggagaaaggctgatcacaatttctttaaatctgtagttttgcgataactacagcaactgtgctagaactttttagatttgtattttagggataacataacaaacattaaatagttttgcaaatattcattaggttaggtctcccataatgctatagtgatgcacaaaactaatgggcaccacaccgaacatcggaacatcccagtgctggagttttcaaataaggtcctctttaaatctgtagtgtttaaataagggtttggtagagtttctcttaattctgattcaccaaactaccaaagcatgttcttgccctgctataagttttacaggcatgaattagtgtcac

SEQ ID NO: 93153 - DNA, 1569 bp, Zea Mays
ggccggaagggggactgggggagggaaaagaataactgaggaagcgggcggtgcctgcctgggtgcgcgtcgtcgccagacgcgggcgcaatgccgcgcctccgcctccctctggtcctcctcctccccatagccctcaccatcatcctcctcatcctgttcccattttccccaagcccgcgctcgcccccgcctcagccactcccctgcggcgccgcgctctccgatgcggcggacggccggtgggtgccgaccccatcgcccgcaccgccgccactatattctccgtcctgccccttccaccgcaatgcctggaactgcctccgcaacggcaggccccagctcgcggcgctctcctgggcgcccgcccgctgcggcggcgccgtcgtgccgagggtcgacgccgcggggttcctggccgctgccagggggcgacggattgggctcgtgggggactcgctgtctgagaacctcgttgtcgcgctcctctgcgcgctccgctcggcggacgacggcgcccgcaagtggaagcggcgtggcgcgtggcgcggaggctacttccccaaggaggacgtcgtcgtcgcttaccaccgtgccgtcctgctcgccaaatacacgtggcttcctgtggagaattcagaagttaggaaggatggaataaaaggaacatacagagtggatgttgacattcctgctaatgattggataaacgtcaccaagttctatgatgttctaattttcaacactggacactggtgggatagatataaattcccaaaagacactccccttgttttctacaaagggggaaagccgattgaacctccacttgacatgcacaacggactgaaagtagtcctgaaaagtattgcttcttacatcgaaagggaggttcctaggaaaacactgaagctgtggcgcacgcagtcacctaggcacttctatggaggtgagtgggatcacaatggcagctgtgtatctgatagacgtcttgaagagcatgagctcaattcttggtttgatccccagtttgggggagtgaacaaagaagcgagaaccgtgaatttagcaattcaggaagccctggctggcacggaaatccagttgctcaacctcacttacatgagcgagttccgtgctgacgcccatccagctatctggctcggcaagaaggacgcggtggctgtctatggacaggactgcatgcattggtgcctgcctggcgtgccggacacttgggtcgacatcttggctgcacagatcatgcatcacttcaagcaggagaaaggctgatcacaatttctttaaatctgtagttttgcgataactacagcaactgtgctagaactttttagatttgtattttagggataacataacaaacattaaatagttttgcaaatattcattaggttaggtctcccataatgctatagtgatgcacaaaactaatgggcaccacaccgaacatcggaacatcccagtgctggagttttcaaataaggtcctctttaaatctgtagtgtttaaataagggtttggtagagtttctcttaattctgattcacc

SEQ ID NO: 93154 - DNA, 170 bp, Zea Mays
tatgaaccgtggctgcctacatgctttggttggtgggggcggctcctccgttgtgggtaaacgggaaacccgactctacgaacccgaggaaaggatgcacaacttccttagggtcgttaagtccagagctttttgtagtgctagcagaaatgcaagtgaatgaatccaac

SEQ ID NO: 93155 - DNA, 106 bp, Zea Mays
ggacgtctacactacatacttatatagtagtagagattttgtggtgattcttctactactattttgtggtggtatcactactacaaccttaggctattcacaatag

SEQ ID NO: 93156 - DNA, 1578 bp, Zea Mays
ccctatcttatttattgtccttattagtcgcgcgtcccatcccaacccaagccacagagccgtccgaatctgctgccagaatgcggtggttctaccgcaaaggctcatcgggcttctccagcgcctccacggctgaggatgtcaccgccggcgtcgacggccaaggtctggtcgccgtcatcacaggtgcgtcgagcggcatcgggctggagacggcgcgtgtcctggcgttgcgcggcgtgcacgtcgtcatggccgtccgcaacgtctccgccgggctcaaggccagggaggccatcgtggctaagatccccgtcgcacggattgacgttctggagctggacctcagctccatagcttccgtaaggagattcgcctccaattttgactctctaaacttgcctctcagcattctcatcaacaatgctggagtgatgacaaggagctgcacacgttcctgcgacggcctggaactgcatttcgcgacaaatcacattggccattttcttctaacgaacctcttgctagaaaacatgaagaagacatgtagggacagcggtatcgagggacggattgtcaatttgacatcttcggcgcattccataacctatcgtgaagggatatgttttgacaaaattcatgatccatctagtttgaacgactttgttgcttatgggcaatccaagcttgccaatattcttcattctaatgaactgtctcgaatactcaaggaggatggagtgaatatttcagccaatgcagttcatcctggtgtcatcatgactaacctttttaggaacaggactattgtctctgctttactgaactccattggaagaatcatatgtagaacagttgagcagggtgctgcaacgacatgctatgttgcaatgcatcctcaagtgagggggataagtggaaagtacttcaccaattgtgatgtagccaacccgagctcacaagcttcagatgctgagttggccaagaagctatggcaatttagcttgcaaattgtgtcttcttgatctagtgcttatctgaacaagcggtgcacaaattgatgtgctaaattgcagatgcttaggctctcttcagaacaaatggaaaaccatatgaattttttagatcaaaggcattcacccggatttattagaaaaccataagtattttggatgactacaatcctgtaggaaaatgtatgcccttttggaaaaaatgattgcttcctatgagattccttgtattcctataatgatgcatgaattcatattccaaagaaaatttggaggcaaacaaaaataaggttggaccttatagaaacttccctttctgctcctctctctttggttgagttcatctgtttttcctatgttgcatccacctgtgtttttcatgttcctacgttttgagaattttgagtttcaggggggccctcgtattgcttcactttacgtatgtatgtattgccaccaacatcaaatttgaaatccaaacgaccacacaatcacatgattattgcattttttacccccacaaatctcaaataaaacggttgaatagtaaatctaaaatctcgag

SEQ ID NO: 93157 - DNA, 1785 bp, Zea Mays
ccctatcttatttattgtccttattagtcgcgcgtcccatcccaacccaagccacagagccgtccgaatctgctgccagaatgcggtggttctaccgcaaaggctcatcgggcttctccagcgcctccacggctgaggatgtcaccgccggcgtcgacggccaaggtctggtcgccgtcatcacagcgcaggtgcgtcgagcggcatcgggctggagacggcgcgtgtcctggcgttgcgcggcgtgcacgtcgtcatggccgtccgcaacgtctccgccgggctcaaggccagggaggccatcgtggctaagatccccgtcgcacggattgacgttctggagctggacctcagctccatagcttccgtaaggagattcgcctccaattttgactctctaaacttgcctctcagcattctcatgtaagtaccaatcctactacttcgtcgtgccactgctatcacgagctgtcaaaagccagcctaaaatcatagtagtatgtgtttggctggttgacttggtgttcttttcgacagcaacaatgctggagtgatgacaaggagctgcacacgttcctgcgacggcctggaactgcatttcgcgacaaatcacattggccattttcttctaacgaacctcttgctagaaaacatgaagaagacatgtagggacagcggtatcgagggacggattgtcaatttgacatcttcggcgcattccataacctatcgtgaagggatatgttttgacaaaattcatgatccatctagtttgaacgactttgttgcttatgggcaatccaagcttgccaatattcttcattctaatgaactgtctcgaatactcaaggtatctcaggcctttgttactgaataactattggtacatatgaatatatgaactgcacaataaagaaagaggttatcttcttgaacaggaggatggagtgaatatttcagccaatgcagttcatcctggtgtcatcatgactaacctttttaggaacaggactattgtctctgctttactgaactccattggaagaatcatatgtagaacagttgagcagggtgctgcaacgacatgctatgttgcaatgcatcctcaagtgagggggataagtggaaagtacttcaccaattgtgatgtagccaacccgagctcacaagcttcagatgctgagttggccaagaagctatggcaatttagcttgcaaattgtgtcttcttgatctagtgcttatctgaacaagcggtgcacaaattgatgtgctaaattgcagatgcttaggctctcttcagaacaaatggaaaaccatatgaattttttagatcaaaggcattcacccggatttattagaaaaccataagtattttggatgactacaatcctgtaggaaaatgtatgcccttttggaaaaaatgattgcttcctatgagattccttgtattcctataatgatgcatgaattcatattccaaagaaaatttggaggcaaacaaaaataaggttggaccttatagaaacttccctttctgctcctctctctttggttgagttcatctgtttttcctatgttgcatccacctgtgtttttcatgttcctacgttttgagaattttgagtttcaggggggccctcgtattgcttcactttacgtatgtatgtattgccaccaacatcaaatttgaaatccaaacgaccacacaatcacatgattattgcattttttacccccacaaatctcaaataaaacggttgaatagtaaatctaaaatctcgag

SEQ ID NO: 93158 - DNA, 1777 bp, Zea Mays
atgcgaacaccttgcagtgagtgacacacctcctgctcttccatacgcctccagtagtccagtgcagcctgagctgagctgcactgaggtacgagtagctcacgacaccactcggtgataaactaatggcgtcggcctccgccgctcccgcgccggacagggaggagattgtgttcctggacgtggagacgtcaaccccgccgtgcgtgctcctcgagttcggtgccgtagtcgtgtgctcgcgcaggctcgtggacgtctcctccttcgccacgctcgtgcggcccgcgaacctcgacgcgctcccggacccgaccgcgcggagcaacggcatcacgcgcggcaccctcgctgacgcgccgccgttccgcgacgtcgccgacatggtctacgacgtcctgcacgggagggtgtgggcagggcacaacatcgtgcacttcgattccatgataatcatggacgcgttcgccgagattgggcgaccccctcctcaacccaaggccatgatcgacacccttccgttgcttacccagtgtttcgggccgagagcaggggacatgaagctggcaagcttggcaaactattttggtctagggaagcaaaggcacaggagcctggatgatgtgaaaatgaatattgacgttttcaagaactgtgctacagtcctgttcctggaggaaagccttcgaggtgtgcgtgtgcctaccgttcagaacatgtcgtcggggggtgcaacaatcagaacccaaggaataacaagtgatcctgcaccgaacagggataatcccaacgagtcgttgctggtgggatcgtccactgtgcatgtggaggaaatgatgctagacaccactgtcactgtgcagacggatacaaggagctcaggtgccttttctgggttcgttgagctagacgacgtttcaacggagagtatcaagatctcagctccgctgttcctacgcccgttcggtccgagagcaatcgtccagcacaagggttccccgctccagctcatctgtccaggtctggaagtcctctgggtcaacacaaaggggttcccaaacagcccacatcgaccaaaggtgggcataaaggtcgacatacctgagaaccttagtaaggtactagggttttgcgacgatctagcgcagagctcgtcgtcgtcgccaggaccaggagcaatatgcagtaattccagatggaaatccctgattgagagagacgcggatcggcgtccaacggtctggctgaagattcctacctttggcagtggcgacaccgcagcctgccggacacatgtatacgaaaaggagtgcgacggtgtcgttccaaggcttgtttccgaaagggtcgatccatcggaactggcctcgatgcttcaagggaacaaggtggtggatgcgttcgtctcggtggaaacattcgaccactaccaaagcgctggcattcggttggttgccaataggctggatgtgcacttcaaaaggcaacagcaggcctagctagttccttatggtgctctccggtcaggccgaggctggattgaaggggattgacccatccaattctcctgtgattctcttgttaccgaatcgatccaggactatataaataagtaagtttatgtcgtctccgtatgtgcttgcaaaacttccgaccatattttatatgtgttcagacttcttatttgatgacgctagctaggagaatgctaccgttactatcgacatggcatttttttgtttgtagtcgacgatgtcaaacatctttgcagacttca

SEQ ID NO: 93159 - DNA, 1907 bp, Zea Mays
atgcgaacaccttgcagtgagtgacacacctcctgctcttccatacgcctccagtagtccagtgcagcctgagctgagctgcactgaggtacgagtagctcacgacaccactcggtgataaactaatggcgtcggcctccgccgctcccgcgccggacagggaggagattgtgttcctggacgtggagacgtcaaccccgccgtgcgtgctcctcgagttcggtgccgtagtcgtgtgctcgcgcaggctcgtggacgtctcctccttcgccacgctcgtgcggcccgcgaacctcgacgcgctcccggacccgaccgcgcggagcaacggcatcacgcgcggcaccctcgctgacgcgccgccgttccgcgacgtcgccgacatggtctacgacgtcctgcacggtgggtgtaggtgtagctagtgctgcgcctgcgcgcccccgcggcctcactcgaccacatgcatggtatgtatcgtactctcgtgcgcaagctatagctaactagctaaaggatgccaacgccgtggacagggagggtgtgggcagggcacaacatcgtgcacttcgattccatgataatcatggacgcgttcgccgagattgggcgaccccctcctcaacccaaggccatgatcgacacccttccgttgcttacccagtgtttcgggccgagagcaggggacatgaagctggcaagcttggcaaactattttggtctagggaagcaaaggcacaggagcctggatgatgtgaaaatgaatattgacgttttcaagaactgtgctacagtcctgttcctggaggaaagccttcgaggtgtgcgtgtgcctaccgttcagaacatgtcgtcggggggtgcaacaatcagaacccaaggaataacaagtgatcctgcaccgaacagggataatcccaacgagtcgttgctggtgggatcgtccactgtgcatgtggaggaaatgatgctagacaccactgtcactgtgcagacggatacaaggagctcaggtgccttttctgggttcgttgagctagacgacgtttcaacggagagtatcaagatctcagctccgctgttcctacgcccgttcggtccgagagcaatcgtccagcacaagggttccccgctccagctcatctgtccaggtctggaagtcctctgggtcaacacaaaggggttcccaaacagcccacatcgaccaaaggtgggcataaaggtcgacatacctgagaaccttagtaaggtactagggttttgcgacgatctagcgcagagctcgtcgtcgtcgccaggaccaggagcaatatgcagtaattccagatggaaatccctgattgagagagacgcggatcggcgtccaacggtctggctgaagattcctacctttggcagtggcgacaccgcagcctgccggacacatgtatacgaaaaggagtgcgacggtgtcgttccaaggcttgtttccgaaagggtcgatccatcggaactggcctcgatgcttcaagggaacaaggtggtggatgcgttcgtctcggtggaaacattcgaccactaccaaagcgctggcattcggttggttgccaataggctggatgtgcacttcaaaaggcaacagcaggcctagctagttccttatggtgctctccggtcaggccgaggctggattgaaggggattgacccatccaattctcctgtgattctcttgttaccgaatcgatccaggactatataaataagtaagtttatgtcgtctccgtatgtgcttgcaaaacttccgaccatattttatatgtgttcagacttcttatttgatgacgctagctaggagaatgctaccgttactatcgacatggcatttttttgtttgtagtcgacgatgtcaaacatctttgcagacttc

SEQ ID NO: 93160 - DNA, 1858 bp, Zea Mays
atgcgaacaccttgcagtgagtgacacacctcctgctcttccatacgcctccagtagtccagtgcagcctgagctgagctgcactgaggtacgagtagctcacgacaccactcggtgataaactaatggcgtcggcctccgccgctcccgcgccggacagggaggagattgtgttcctggacgtggagacgtcaaccccgccgtgcgtgctcctcgagttcggtgccgtagtcgtgtgctcgcgcaggctcgtggacgtctcctccttcgccacgctcgtgcggcccgcgaacctcgacgcgctcccggacccgaccgcgcggagcaacggcatcacgcgcggcaccctcgctgacgcgccgccgttccgcgacgtcgccgacatggtctacgacgtcctgcacggtgggtgtaggtgtagctagtgctgcgcctgcgcgcccccgcggcctcactcgaccacatgcatggatgccaacgccgtggacagggagggtgtgggcagggcacaacatcgtgcacttcgattccatgataatcatggacgcgttcgccgagattgggcgaccccctcctcaacccaaggccatgatcgacacccttccgttgcttacccagtgtttcgggccgagagcaggggacatgaagctggcaagcttggcaaactattttggtctagggaagcaaaggcacaggagcctggatgatgtgaaaatgaatattgacgttttcaagaactgtgctacagtcctgttcctggaggaaagccttcgaggtgtgcgtgtgcctaccgttcagaacatgtcgtcggggggtgcaacaatcagaacccaaggaataacaagtgatcctgcaccgaacagggataatcccaacgagtcgttgctggtgggatcgtccactgtgcatgtggaggaaatgatgctagacaccactgtcactgtgcagacggatacaaggagctcaggtgccttttctgggttcgttgagctagacgacgtttcaacggagagtatcaagatctcagctccgctgttcctacgcccgttcggtccgagagcaatcgtccagcacaagggttccccgctccagctcatctgtccaggtctggaagtcctctgggtcaacacaaaggggttcccaaacagcccacatcgaccaaaggtgggcataaaggtcgacatacctgagaaccttagtaaggtactagggttttgcgacgatctagcgcagagctcgtcgtcgtcgccaggaccaggagcaatatgcagtaattccagatggaaatccctgattgagagagacgcggatcggcgtccaacggtctggctgaagattcctacctttggcagtggcgacaccgcagcctgccggacacatgtatacgaaaaggagtgcgacggtgtcgttccaaggcttgtttccgaaagggtcgatccatcggaactggcctcgatgcttcaagggaacaaggtggtggatgcgttcgtctcggtggaaacattcgaccactaccaaagcgctggcattcggttggttgccaataggctggatgtgcacttcaaaaggcaacagcaggcctagctagttccttatggtgctctccggtcaggccgaggctggattgaaggggattgacccatccaattctcctgtgattctcttgttaccgaatcgatccaggactatataaataagtaagtttatgtcgtctccgtatgtgcttgcaaaacttccgaccatattttatatgtgttcagacttcttatttgatgacgctagctaggagaatgctaccgttactatcgacatggcatttttttgtttgtagtcgacgatgtcaaacatctttgcagac

SEQ ID NO: 93161 - DNA, 1838 bp, Zea Mays
atgcgaacaccttgcagtgagtgacacacctcctgctcttccatacgcctccagtagtccagtgcagcctgagctgagctgcactgaggtacgagtagctcacgacaccactcggtgataaactaatggcgtcggcctccgccgctcccgcgccggacagggaggagattgtgttcctggacgtggagacgtcaaccccgccgtgcgtgctcctcgagttcggtgccgtagtcgtgtgctcgcgcaggctcgtggacgtctcctccttcgccacgctcgtgcggcccgcgaacctcgacgcgctcccggacccgaccgcgcggagcaacggcatcacgcgcggcaccctcgctgacgcgccgccgttccgcgacgtcgccgacatggtctacgacgtcctgcacggtgggtgtaggtgtagctagtgctgcgcctgcgcgcccccgcggcctcactcgaccacatgcatgggagggtgtgggcagggcacaacatcgtgcacttcgattccatgataatcatggacgcgttcgccgagattgggcgaccccctcctcaacccaaggccatgatcgacacccttccgttgcttacccagtgtttcgggccgagagcaggggacatgaagctggcaagcttggcaaactattttggtctagggaagcaaaggcacaggagcctggatgatgtgaaaatgaatattgacgttttcaagaactgtgctacagtcctgttcctggaggaaagccttcgaggtgtgcgtgtgcctaccgttcagaacatgtcgtcggggggtgcaacaatcagaacccaaggaataacaagtgatcctgcaccgaacagggataatcccaacgagtcgttgctggtgggatcgtccactgtgcatgtggaggaaatgatgctagacaccactgtcactgtgcagacggatacaaggagctcaggtgccttttctgggttcgttgagctagacgacgtttcaacggagagtatcaagatctcagctccgctgttcctacgcccgttcggtccgagagcaatcgtccagcacaagggttccccgctccagctcatctgtccaggtctggaagtcctctgggtcaacacaaaggggttcccaaacagcccacatcgaccaaaggtgggcataaaggtcgacatacctgagaaccttagtaaggtactagggttttgcgacgatctagcgcagagctcgtcgtcgtcgccaggaccaggagcaatatgcagtaattccagatggaaatccctgattgagagagacgcggatcggcgtccaacggtctggctgaagattcctacctttggcagtggcgacaccgcagcctgccggacacatgtatacgaaaaggagtgcgacggtgtcgttccaaggcttgtttccgaaagggtcgatccatcggaactggcctcgatgcttcaagggaacaaggtggtggatgcgttcgtctcggtggaaacattcgaccactaccaaagcgctggcattcggttggttgccaataggctggatgtgcacttcaaaaggcaacagcaggcctagctagttccttatggtgctctccggtcaggccgaggctggattgaaggggattgacccatccaattctcctgtgattctcttgttaccgaatcgatccaggactatataaataagtaagtttatgtcgtctccgtatgtgcttgcaaaacttccgaccatattttatatgtgttcagacttcttatttgatgacgctagctaggagaatgctaccgttactatcgacatggcatttttttgtttgtagtcgacgatgtcaaacatctttgcagac

SEQ ID NO: 93162 - DNA, 1413 bp, Zea Mays
atggctccgcgctctgtgctgcatgacggtcctggaaccgatagcttctccagcccgtctttgtcgttgttcgccactttggtttgggcacccaccgtcgtcatgggagcgtgtgctgctttcggaaggatatatgatatatgttcatgtccacacgctcgatatagattggcccagagcagacctaacaaggttcatggagcatggttaccaccttggttagcgacacactatgctcgttacatggaggttgtctcaggtcactggaattatcatggaaaacctgttgtgcagaatgttttgcataaggcatcagaaaaatcagcacatgcaaagaaatgggctgaaccacatattgagactgctaagatgaaatggattcctgttaaggagaaattggttgtcctcaagaaaaatgcagaaccttatgtacagaaggtatcgacaagatcagtggagttttatgagtcatcaagggatgctgtgacacctcacgttgtcaaagttaaagagtttgctcatccctactaccaggaagccaagaagttttctaagccttacattgatcaaattgctgagatcactaagccacatgttgagaaagttagaactactctgaagccatacactaagagagcagttcatgcgtatgggtcatttcttgcgtctgcaaccacataccatcgacaagctcaggcgaccatcatggactacctccatcagcatggggtacccaagtcacttgcaacgaaggagttagtttggttcctggcttctgccttgctagctctgcctgtcttcgtcatatacaggcttgtagtagagaccttctgcaccaaaaagaatagaaggcctcgtggcggtaatggtaacggtaaccatggccagaagagacacaagcggcgatacgccgacaagtagaccaatctacccaacactttagggttcagcatgcggtgtttgcattgtcgcgcatctttgagcaatgagcaagattgggttgctcctccctcccggaggcactgctgaaccatacatggaggaaggagactcgggtcatgggcaccctttaccgtgagaagcgttgtagcctacaccaccaacatttctctttcttttacttcttcttcccaggtgtactatgaacttcggtgcaggtgcaacggaccttttatattatctgcactttgctggggttcagggggttaggactttgttttattggtcgttgtttattgtaacttgtgaattcgtttgagttcgtctgtttgtttttttgttggcgacctacattcgaacttgttagctaactggatgttgaagtttgactcaagttgctggagtgtcatgaacaggagaagagtgtctaactgacattgatgtaagcaaggagggcactaggaactttgtggt

SEQ ID NO: 93163 - DNA, 1599 bp, Zea Mays
aaagcagagagtggtcgcaacaaggtgagttccattccatcccatccatcagccatgtcgcagctggcgcctctgcccaaggtggtgatgggttcgctggcgttcggcgtgttctggatgctggcggtgttcccctcggtgccgttcctgccgatcgggcgcacggcgggggcgctgctgggcgcggtgctgatgatcgtgttccacgtgatcagcgccgacgacgcgtacgcctccatcgacctcccgatcctgggcctgctgttcgccaccatggtggtgggcggctacctcaagggcgccggcatgttcaagcacctgggcaagctgctggcgtggcggagccagggcggccgcgacctgctgtgccgcgtctgcgtcgtcaccgcgctcgccagcgcgctattcaccaacgacacctgctgcgtcgtgctcaccgagttcgtgctggagctggccgccgagcgcaacctccccgccaagccattcctgctggcgctcgccaccagcgccaacatcggctccagcgccacgcccatcggcaacccgcagaacctggtcatcgccttcaacagcaagatcaccttcctcagcttcttcttcggcatcctgcccgccatgctggccgggatgggcgtcaacacggtcatgctgctctgcatgtactggaacgacctcgagggcgccgccgcatgcggcagccccgatgatgagaaggagatggaggccgtcgaggaagggcggtcgccggcctcggtgctctcgctcaagagtagccccaccgccgcccagcacgtcgccctgcgccagcgccagaacggcaacggcaacggccacggccacggccacgacgcggacgatgacgaccccgactccatgatgtcagagaacatcccgacaaagcaccggtggttcatgcagtgctcggagcaccggcgtaagctgttcctcaagagcttcgcgtacgtcgtcaccgttggcatgctcgtggcatacatgctcggcctcaacatgtcgtggaccgccattaccaccgccatcgcgctcgtcgtcgttgacttccgcgacgccgagccgtgcctcgacaaggtgtcctactcgctactggtcttcttctcggggatgttcgtgacggtgagtgggttcaacaagacggggctgccaggggccatctggaacttcatggcgccctacgcaaagatcaaccacgtcagcggcgtcaccgtgctctccctcatcatcctgctcctctccaatctcgcgtccaacgtgccaactgtgctgctgatgggggacgaggtggcggcctctgcggcgacgatctctgcgtcggcggtgacgcggtcgtggctgctgctggcgtgggtgagcacggtggcgggcaacctgtcgctcctggggtcggcggcgaacctgatcgtgtgcgagcaggcgcgccgcgcgccgcgcaacgcgcacgacctcagcttctggagccacgtcgtgttcggcgtcccttccacgctcgtcgtcaccgccatcggcataccgctcatcggcaagatcgccttctagcctgctgccagtgtatgctgctaatagtgtactgattaatcagct

SEQ ID NO: 93164 - DNA, 565 bp, Zea Mays
taaccctagacacatgccgccgccacaccagagaatcaccagttgccggaccccagttgctgttcacagcatccgcccgccgccgccatttgcagcagcagtgccaacgccgttctctgcagtaactgtgccacggttgctccttgcagcagcgcctccgcgcggtctgccgccatgtgctgccatcttcacgccctcctccggcaacgatgcaccagcgtccacgggcccgaagccattgggaagtcccggcacatgcccggtgcggatccagccgcggcttggagccgccgtcgcgcccgcggtatcgctcatcggagccctccgtggggaaaccacctcagtggttaccgccgcggcaggaggaggcgtcgtctctggcggtggaatgttccacccgtgcaccgggcaaaaccccggcggaaactcagtaccagcaggatatgccatcggtggtgggatgacctgcagcggcaccggctggaggaagtccgtcggtacggacgtgaaagtgctatctcagacagacacagcccttcacctgttaactgctaatctatattaa

SEQ ID NO: 93165 - DNA, 3018 bp, Zea Mays
atggagaacggcggtggcgtcggtgaagggcgctcggagaatcgggcgggcgagaacggcggagtcgccgaggcagccactgcggcggatgagggagattgtgatgtggtggtggagggcggagatgaaggggacatgccgcccggtgcggtggcggcgggcgatcaccagccaatggtgacgccgaacaccagagcggtgctggaaacaggacagcttgcggcagacaagtgggacgaggacgatactccccgtttcattgacgtggaggaaagctttgccgatgatgtgaatcaagatcacgtcgctgcacaatctgggagcgagtatgaagatgtaaaagatggtactttggtgtatcaaagcaaagagcagccagggacgagcacggaagatattgcttcctcacatagcaggccagggacagtcacacattctgcagctgagcctgctgttgccattgaggaattggatgactcaagctcctcagctgatgagaataccgccacctctgctcctcctgcacaattctcaagcggtagttctacacctgcgcaatccagcagtgctgcttctgctcgttctactaatggtccctctttgccatctcgtcctgctggccttggatcatcgtcttccctgtcacagcctcctgctcgttctgttcaacaggtccatgccaacaggccagccattgtggaaaggggaacccagggggctactgaggatgatggagacgagaatgatgaaatccatgaaaagcttcaaatgatccgggttaagtttcttcgccttgctaacaggtttgggcaaacatatcataatatggtcgtttcacaggttctgtaccggcttgggctggcagaacaacttagaagaactacttctaatgggtcatttagcattgaccgtgcaagagacatggcagaacgccttgaagctgctggaaatgcgccccttgatttttcatgcaccatcttggttcttggtaaaactggggtcggtaagagtgctaccattaattcagtttttgatgataccaggttggatacaaacgcttttgattctagtactaggaaggttcaagaagtagttggtatggttgagggaatcaaagtgaaagtgattgatacacctggactttcctgctcatctttagaacaacaccgcaaccagaaggttctcaactctgtcaagagacttattagcaaaaaccctccagatattgttctttattttgataggttggatatgcagagcagggacaattgtgacgtccctctgctgcaaaccatcacaaaagtgtttggagcatcggtttggtttaatgccattgtcgtgttaactcatgctgcatctgcgccaccagatgggcagaatggaattcctctgagctatgagatgtttgtcacccagagatctcatgtagtgcaacaagctataaggcaagctgctggtgatgtacgccttatgaatccagtatccctcgtggaaaaccactcagcatgcaggacaaatagggctggccagagggtattgccaaatggacaagtctggaagccacagttactgctgctttgttttgcttcaaaggtgttagcagaagccaatgtgctccttaagttgcaggatagtcccattggtaaactttctcgtacaaggattcctccactgcctttcctcctctcttcccttcttcagtctcgtgccccactgaagttaccagaggagcaatttggtggtgatgatgatgatcttgaagatgatttggcagatgattctgattcagatgatggttcagattatgatgatttacctccatttaagcgtctcacaaaagctcagcttgccaagctgaacagggagcagaggaaggcctatcttgaggagctagattacagagagaagttgttctatcaaaaacagctgaaagaggaaagaaaacgtcgtaaattgatgaagaaaatggcagcagaagccagtgctcgtgcaaatgatttcagcaacagcaacctagaagatgatgctactactccaactaatgtttcagtgcctatgcctgacatggtactgccctcatcttttgattctgactaccctagccatcgctatcgtttcctggatacaccaagtgaatggcttgtcagacctgtattggaaacacagggctgggaccatgatgttggttacgagggacttaatgttgaaagattgtttgccgtaaaaggtaaagttcctctatcagtgtctggccagcttacaaaagacaagaaggattgctccctgcaaatggaggttgcaagttcaattaagcatgctgaaggtaagactacttcacttgggcttgatttgcagtctgtcggcagggatatggcatacacaatccgtggcgaatcgagatttaagaacttcaggcgcaacaatacatctgctgggatatctgctacgcttcttggggattcagtatcagctggtatgaagattgaggacaaactgatagtgaacaagcagcttagggtcctggttagcagcggggccatgagtgggaggggagacatggcctatggaggccgccttgaagcaacgatgagagacaaagattacccgattgggcggatgctttccactgttgcattatctgttgtggattggcacggggatctggcaattggctgcaacatccagtctcagatccccgctggaagagctagcaacttggttggccacgctaatctaagcaacaaggggactggccaagtcgggattcgcctcaacagctcggagcatcttgagatcgcactcgtggccctcgtgccgatattccagaacatcatgaagctgttacagaattactcggaatctggctagtccctcgtgccgatgttccagaacatcatgaagctgttacagaattactgagaatccggctagtactttttttttcatgtaagcctgagaaaacagagcatcataggttaaaatctagcttaagctagaactttacttccaattattatt

SEQ ID NO: 93166 - DNA, 3094 bp, Zea Mays
tttgttttttttacctcctgttgttgtcgtttgatccgttccgtttcctcttgatgtcggactagggtttcgctccttccgcagccgtcgggtgtgatccatggagaacggcggtggcgtcggtgaagggcgctcggagaatcgggcgggcgagaacggcggagtcgccgaggcagccactgcggcggatgagggagattgtgatgtggtggtggagggcggagatgaaggggacatgccgcccggtgcggtggcggcgggcgatcaccagccaatggtgacgccgaacaccagagcggtgctggaaacaggacagcttgcggcagacaagtgggacgaggacgatactccccgtttcattgacgtggaggaaagctttgccgatgatgtgaatcaagatcacgtggaggagaatgccatggggcaatcgatcagggaatacgtgaccgcagctgttttggctgatcgtaaaaaggagaggttagacaaggaccataacttttttgcaactcgtgataacaaggctgaggtcgctgcacaatctgggagcgagtatgaagatgtaaaagatggtactttggtgtatcaaagcaaagagcagccagggacgagcacggaagatattgcttcctcacatagcaggccagggacagtcacacattctgcagctgagcctgctgttgccattgaggaattggatgactcaagctcctcagctgatgagaataccgccacctctgctcctcctgcacaattctcaagcggtagttctacacctgcgcaatccagcagtgctgcttctgctcgttctactaatggtccctctttgccatctcgtcctgctggccttggatcatcgtcttccctgtcacagcctcctgctcgttctgttcaacaggtccatgccaacaggccagccattgtggaaaggggaacccagggggctactgaggatgatggagacgagaatgatgaaatccatgaaaagcttcaaatgatccgggttaagtttcttcgccttgctaacaggtttgggcaaacatatcataatatggtcgtttcacaggttctgtaccggcttgggctggcagaacaacttagaagaactacttctaatgggtcatttagcattgaccgtgcaagagacatggcagaacgccttgaagctgctggaaatgcgccccttgatttttcatgcaccatcttggttcttggtaaaactggggtcggtaagagtgctaccattaattcagtttttgatgataccaggttggatacaaacgcttttgattctagtactaggaaggttcaagaagtagttggtatggttgagggaatcaaagtgaaagtgattgatacacctggactttcctgctcatctttagaacaacaccgcaaccagaaggttctcaactctgtcaagagacttattagcaaaaaccctccagatattgttctttattttgataggttggatatgcagagcagggacaattgtgacgtccctctgctgcaaaccatcacaaaagtgtttggagcatcggtttggtttaatgccattgtcgtgttaactcatgctgcatctgcgccaccagatgggcagaatggaattcctctgagctatgagatgtttgtcacccagagatctcatgtagtgcaacaagctataaggcaagctgctggtgatgtacgccttatgaatccagtatccctcgtggaaaaccactcagcatgcaggacaaatagggctggccagagggtattgccaaatggacaagtctggaagccacagttactgctgctttgttttgcttcaaaggtgttagcagaagccaatgtgctccttaagttgcaggatagtcccattggtaaactttctcgtacaaggattcctccactgcctttcctcctctcttcccttcttcagtctcgtgccccactgaagttaccagaggagcaatttggtggtgatgatgatgatcttgaagatgatttggcagatgattctgattcagatgatggttcagattatgatgatttacctccatttaagcgtctcacaaaagctcagcttgccaagctgaacagggagcagaggaaggcctatcttgaggagctagattacagagagaagttgttctatcaaaaacagctgaaagaggaaagaaaacgtcgtaaattgatgaagaaaatggcagcagaagccagtgctcgtgcaaatgatttcagcaacagcaacctagaagatgatgctactactccaactaatgtttcagtgcctatgcctgacatggtactgccctcatcttttgattctgactaccctagccatcgctatcgtttcctggatacaccaagtgaatggcttgtcagacctgtattggaaacacagggctgggaccatgatgttggttacgagggacttaatgttgaaagattgtttgccgtaaaaggtaaagttcctctatcagtgtctggccagcttacaaaagacaagaaggattgctccctgcaaatggaggttgcaagttcaattaagcatgctgaaggtaagactacttcacttgggcttgatttgcagtctgtcggcagggatatggcatacacaatccgtggcgaatcgagatttaagaacttcaggcgcaacaatacatctgctgggatatctgctacgcttcttggggattcagtatcagctggtatgaagattgaggacaaactgatagtgaacaagcagcttagggtcctggttagcagcggggccatgagtgggaggggagacatggcctatggaggccgccttgaagcaacgatgagagacaaagattacccgattgggcggatgctttccactgttgcattatctgttgtggattggcacggggatctggcaattggctgcaacatccagtctcagatccccgctggaagagctagcaacttggttggccacgctaatctaagcaacaaggggactggccaagtcgggattcgcctcaacagctcggagcatcttgagatcgcactcgtggccctcgtgccgatattccagaacatcatgaagctgttacagaattactcggaatctggctag

SEQ ID NO: 93167 - DNA, 1533 bp, Zea Mays
atggcggcagcggtggtggataaggtgttcgtcgcgctgccggcggaggtgaaggcggggcagtccacgctggcgtgggctctcgaccgtttcggcggcggcggcggcggcagaaccacggttgtgatcgcacatgtgcatgtcccgccacagatgattccagtgatgggggtcaagttccactctagtaaactgagccccgagcaagtgaaactgttcagaaggattgagcatgagagggtggacaaacagctagacggttatgttcgccagtgctcaaaaatgaaggtcaaatgtgagaaactagtttttgagaaggacgacgttgtggccggtctggttgaactcgtcgtcttgcataaagtcactaggctagttattgcagctgctgcagacaggcaatattcaagaaagatggatagacccaagtgtaggacagcaacagaaatcatgcagagagctgatccatcgtgcaagatctggtttgtttgcaagggacaactgatctgtaccaggggtgtggaagaggaggttgcgccatcagctacaccttttgtccctgatgatcttgatcaccaggctctgcagttagtagtgtctcaccagaaagaggacgaagctaagtcggagctggggttatacgatgagctgaaagaggcatgcatagcagctgagaacctgatgaagagagccctaaacgaatcttccaggcgccaaaaggcagatggagaagtggcctccgcgcttcagaaagcaaaggaataccaggagttgtactttgaggagacgaggaagcgtgaagagctcgaaggagctcttgcaagagcgcaccgagagatcgcgcggttaatgcaggcgaagcaggtgttcgtggtcgagcgaaacacggcagcggacgaactccaggaggccatgtcagagaggtcgtccctggaaggccacgacgtcgacgaggatgccgttttgcgaacagccggcggtcaagcgactgagcaacaggaggaggaggaggagcatgtccagacacaacacgatctgggcaccggtgaaagggacctggaactggaagcgcggctcaaccagagcaagctggccgcgttctcgccgtcgtccgtcatccagtcgccgtacgacgaagaccgcgtcccggcctgcttcctctgcccgatccttcaggtgtgggtgcttgcattgcatcctccgcaggcgctgagtacagtgcatgcttggcgctcttgtttgaatgtcgttgaattcacgtatatgcaggagcccatgagggatccccacgtcgcggcagacgggttcacgtacgagggcgacgccatcagaggctggctggacggagggaacggcgcctcccccgtgaccggccagccgctcgcgcaccgggagctggcaccgaatctcgcgcttggcgccgtgatccaagattacacggtgatgaggcggcggcagtgccggttctgcgattcgcacgacggcgttgctgcgcttcaattttttccatcgcctgtgggctgccagcggtga

SEQ ID NO: 93168 - DNA, 1761 bp, Zea Mays
atggacagggacagcagctcgtcggtctcggcgtcggacgggagctcggaggcgggggagcgcggcgggtgctgctcgtcgccgccgtccacgcggagcctcgtcgacacggcgggcaacaacctcatcagccgcaccgcgtccgacgcgtccacgtccctctcggaccggtgcagcagcgtcgacgtcgaccacagcgggccgttccagcccgccgccgccgtggccaagctcatcggccggtcgtccccgccgtccgccgccgcgtcgctcagacggctcagcatcaagccccgcgccgacgtgctcgaccgccgctccaccgaggacgagatggagctggtgaaggagcgcttctctaagctcctgctgggcgaggacatgtccggcggcggcaagggcgtctgcaccgccgtcgccatctccaacgccatcaccaacctctacgcgacggtgttcgggagctgccacaagttggagccgctgccggcggggaagaaggcgatgtggacaagagagatggactgcctcctctccgtctgcgactacatcgtccagttctacccgtccacgcagaccctgcccgatgggaccaaagttgaggtcatggcgaccagaccaaggtcggacatctacatcaaccttcccgcgctcgagaagctcgacgccatgctcatcgacattctggacagcttccagaaggcggagttctggtacgcggacgccgggacgaggtcgttcggctcggtcacctcgtcctcgtcgtcgaggatgtcgtgttcgtcgtcattcaggaggtcggctcaccggaacgacgataagtggtggctgccggtgccctgcgtcccggacgccggcctcaccgacaaggcgcgcaaggacctgcagcagaggcgcgactgcgccaaccagatccacaaggccgctgtctccatcaacagcggcgtcctcggagacatggaggtgccggagtcgttcatggccgtgctccccaagagcggtcgggcaagcgtgggggactcggtgtaccgcgtcatgcttggcgccgacaagttctcgccggagttcctgctcgacacgcttgacatctcgtcggagcacgacgcgctggcgatggccgaccgggtggaggccgccatgtacgtgtggcggcgcaaggctagcggcagccacggcaagctgccgtggagcaaggtcaaggagctcgcggccgacgacgacgacaagaacgtgacgctggccaacagggccgagagcctcctgctctgcatcaagcaccgcttccctggcctgtcgcagaccaccctggacaccagcaagatccagttcaacaaggatgttgggcaagcgatcctggagagctactcgagggtgttggagagcttggctttcaacattgtttcgtggatcgatgatgtccttttcgtcgacaggtcgataaggaaactgagtgataacctcaagtcctgagttctttatcctgcactgaagcttcccagcaaaaaggttttagatgtctgttggtgaagctgcagaagaagggtgcgtgactgtagtagcggtagtagggtgattttgctgacctagagagatgcaagcctctagctttgcaagaatgcacaatgcagagtagcgtgtctgaccaacagtgaacgtgtgtgattttcgtgtcctttttatttttcagctctcgcgctcttagcttggcagcacgaagattggtgaaagggatcaaaatgtccaatagcataaatggagtca

SEQ ID NO: 93169 - DNA, 405 bp, Zea Mays
atggccggctgcaccgtcgcgtactccgcgtccaccagcagcgggatgccgtgctccgcgcaccgcgcgcacaccgccagcagccgcgagtgcgccagctgcagctccctctcctcctccgccgtcagcgccgccggctccgacgcggtcaggtggagcgggctcgagtcagacagcaccgggaaggagtgcgtcttccacggcaggctgaacgacgggtgcttcttctgccaacgcagcaggtcgctcgccttctccagcagcgcgatcgggcagagcgccgtgatcttgatgcacacgctcgccgagcccggaggcagcgaggcggcgacgtcgacggcggagacgaacccggcggcgttgcggtcgcaggcgtggccgtcctccgcgtcctcgatcccgtag

SEQ ID NO: 93170 - DNA, 123 bp, Zea Mays
atggcctccagccggtcccgcgcgtcgcggaggtacgcctggatggtgccgtgcacgatgggtcgcccgccgtccgccgcgccggcgtcgttgaacgccagcgcgcccaccagcgtgaagtag

SEQ ID NO: 93171 - DNA, 2619 bp, Zea Mays
cccccacatccctcctcacaccccctctcatcacaaattcacaagacgagagacagaagaggaggtagtagagagagaagggccgagtaagtaggtgggtagtacgggagcgtaccgaatgatgatgagtccttggactctacaacagccaagcgctatctgaagcgagaagagaagcaaccagcccgtaggacaagacgtgtcgggaggaggaagaacaagtagccagggagcagcagccatcgccattcctgcctggttttgctcctgctgttatgaggagctggactagatgaggggaatgctctttgctggtagcgcacgagaagggcacgcggggacactgctgcaactgcaactgcaacaccaacgacaggggctcgccgccggcaaagtctcaggcgccggcgacctctgggagcccacctcggtgcttgaccgccgacacagccccagcccgagcccgccgacctcggttcccacgctgtcgtcgcccctgggcgccgcgaccgccggtgtggcggccctcgccggtgctaacgccaagaacgtctccccgccgccggtggcggcggcggcatggccagggggaggaggggcggaggaggccgtggcggggggcaaggaggagtggcagctcacaccgcttgacatgggccttggcgccggcgaggggtgggacgcggccgacgccgcggcgccgccggggctcgcccccgaccacaccttcctcaggtggatcatcggcggcgaggacgcgtctgcggccatggggtctgtcatggacccgccggtccttgagctggaccacgcgccgtccatgatgtcgccggcgtttgggtccaccatgccgttcgcgccggccatggaggacgccaagccggtgcccttcggccacacgcccaacttcctgctccaccactgccaccagcaccacccccagccgcacgccgccttcttcggctcgcacccgtccctggacgcggcgccgcagccgaagcgaccacacccgatggccggggcgccggcgccgaagctgccgtctttccctgggcctgtcgcccaggcgggcggcgggttcgcgtcggccttgaagcccaaggcggaggcgggtaacgacgaggcggccgctgcggtggaccagcttgccgaggcggccagacttgccgaggccggcgacgccttcggcgcccgcgagatattggcgcggctcaattatcggctccccgccgtgcccacggccgggacgccgctgctccgctcggccttctacttcaaggaggccctgcgcgttgcgctctccccgaccggcgaggcccttgcgcccccggcggtgtcgacgccgtacgacgtggtcctgaagctcggcgcgtacaaggccttctccgaggtgtcccccgtgctccagttcgcgcacctgacctgcgtgcaggcggtgctggacgagctcggggccgccgggcgcatccacgtgctggacctggacatcggcatgggcgagcagtgggcgtcgctgatgcaggagctggcgcagcgcagccccgcggcgacgctcaaggtgaccgcattggtgtcgccggcgtcgcaccacccgctggagctgaacctcatccacgagaacctgtcgggcttcgcccgcgagctcggcgtgttcctccagttcgcggcgtacaacgtggacgccctggaccccgcggagctggtggccatcaccagcggcgacgccgtggccgtccacctccccgtggggtcggcccacgtggccgcaatgccggccgtgctccgcctcgtgaagcggctcggcgccaaggtggtggtgtccgtggaccgcggctgcgaccgcacggagctgtcgttcagcacgcacctgttacaggcgttccagtcctgcgtgtccctgctggactccatcgacgccgtggggggcgcggacgccgaggcggtcggcaggatcgagcgcttcatggtccagcccgacgtggagcggcgcgtagtgtcgcgccaccgcgcggcagtggccgtggacaagccgccgccgctgccgtggcggaccgtgctcgcgtcggcggggttcgtgccggtgcaggccagcacgttcgccgagtcgcaggccgaggccctactcaagcggatggcgctgatggggttccgcgtcgagaagcgcggcggcgcgctctgcctctactggcagcgcggcgagctggtctccgtgtcggcgtggcggtgctgaccgccgggagtacgccgccgccgccgcaaccaagagccagccgtgaatctaccacaagcccgggttagctaggactaatgatcctactactgcaagcaaaaaaaatattttccaccgtcgtcgtttgtaacgatctcatctggtctggtctcgtctgtctgcttattagtgtgtcctacccgattaatcgtggagtacgtcgtccgttgcctggctttgcagcctcggtgggctctgctcatgttgatttgcggagcgcgccgtggtttgcaggttgtaaaacgtaggcgtggtgcagtgcagtgaccagcgcatcctaccgcccgtcgtgttgctactcttttttttccattgctgtgaaatcaattaatggttatggcgtttgaaaa

SEQ ID NO: 93172 - DNA, 365 bp, Zea Mays
ggttcatcgtcgtgcccgaagccggcgccggcgccggcgtcgtgctccccgccgaccccgaaagcgcggggcgacggggacaggtgcccagggtgaacgcgctcaagcttggcgcgtgcgccagcgtgctaggcgggctggtgagcctggagctcggccagcagcgcccggcgtcgtccatgtccagttccatgcagccgtgctgccagctcctgggcgggcttgccgacctggacgcggccgtgtgcctgtgcacggcgctgcgggacaacgtgctgggctccgtgcagctgagctgagggccgttgagctcagcgtcctcgtcaactactgcggcaagaagctcccgctcggatggctgtatt

SEQ ID NO: 93173 - DNA, 852 bp, Zea Mays
gcagctcgaactagctttagctactacgtgtgcaagtgcaagcagctcactcgttcgaccatggctgcgagagcggcgctcctccagctggctgtcagcctggttatccttgccgccgtggcgagcgcgagcgcgaccgactgcccaccgccaccgctgccgccggccccaaagccgccgacgcccggcggccaccacggccacgggtcgtgccccaggaacgcgctgaagctgggcgtgtgcgccaacgtgctgggcctggtgaaggccaaggtaggctcgccgccgtacgagccgtgctgctcgctgctggacgggctcgtcgacctggaggccgccgtctgcctctgcaccgccgtcaaggccaacatcctcggcatcaaccttaacctccccatcgacctcagcctcatcctcaacaactgcggcaagaactgccccaacgacttccactgcgcgtagatcatcagtcagtcagttattgatcgtcgtccatcgccggccggccgtggttcatcgtcatcattccgttttgcttaattgttgatcgatcgtcttcttcctgtcagtcccagcagcttatttattttaaatttgtctctttatacatatatatgagtggtgtggttacacttctacatagcccaggcagcggctacgacgcgtgcgtgtatatgtctggcctggggtgatcagttaattactgatcggtgttgcgcagtagtgcagtacgtatattcttcatttgtagtcatgacgatctgtttgcatggttcgttcaataaatgaagttgacaagttgtactttctttctcataaaaccgagtatggaattcgtttgaccaaataaac

SEQ ID NO: 93174 - DNA, 1799 bp, Zea Mays
cttccactggagggccacacttctcttttgaggaccagtccaccgtccactcccagagtccaaaaccctacgatccgcgccaccatgccgcgcctcgccgccgccgccgccgtctcacgccgcgccggcgaggccctgcgccgcggcgcgtttgggggactgcggcctctctcctccctgcaaccgttaaacgccgcctccagcgacgaggtgctcgttgaaggaaagacaagtgcgcgcgctgccgtgctcaaccgccctggctacctcaacgccctcaccaccaccatgggagctaggctcaataaattttatcaatcatgggaggacaacccagacattggctttgtcatgatgaagcggccgagcattctgtgctggtggggatgttgttagattacatgaacttatcagtgaaggcaagctggaggaatgttgccattcttgatggcattactatgggtggtggtggaggtgtttccatccctggaacattccgtgttgcaactgataggacagtctttgcaactccagaagttcatattggattccatcctgatgctgcagcctccttttatttgtcgcatctaactggccatgttggggaatatgtggccttgaccggtgaaaagcttaatggaacagatatgattgctcttggccttgctacacactatttcatgagtggccatctggatctgatcgatgaacgacttgcaaagttagtaactgatgatccatcagttattgattcgtcccttgcacaatatggagacatggtttatccggacaaaaaaagcattgttcataggctggaggtgattgataaatgcttcagccatgacacagttgaagagattgttgatgccttggaaagtgaagcagccagctcaaatgaagaatggtgtatcttggcgctgaaacgattgaaagaggcctctccgttagctttgaaggtttcactgcgatcgatacgcgagggtagatatcagacacttgatgagtgccttgtccgtgagtaccgcatgtccatgaatggaatctcaaagcaattttctcatgaattctgcgagggagtcagagcacgactagtcgacaaggacttcactcctaagtgggatcctcctgcccttgagtatgttacgaatgacatggttgacgcatacttcgcacctcttggcgattcggagcctgagttgaagctgcctatagaatcgcgagaggcatttgtatgatcacaaatcattccaagaaccggatcattgcaaggaccggactgggacctgataaacgtgttataatctgtgtagccattatttttggcagcacaaccagcccgattggaccaactattcacgtgccgtatactcattcagactatcttcgctagcttacctatacatatattcaaactatactttagaaacagtgcaatgtactatgcaaaacggtgcaacagtgttttggttgaccatatgggtgtaacgtacagtagttcatctataaggtcaccaaaaacaccgtttttatactgtatattgtactgtctgtagagtatagtttgaatatcggtataagtacgagtaagctaccagagatgaggttttctgcggtgtgaaactcagcatatcatctgctgatttgttcacatgaatggaaacgaccagtggagtacgcgaatcatttctgatttggagtctgttcttcacgagggaaaccccgtctacaattctctggctctgtattccactgccactcacttgtcagcaatagcaggctgttgcagatgtttttccttt

SEQ ID NO: 93175 - DNA, 1864 bp, Zea Mays
cttccactggagggccacacttctcttttgaggaccagtccaccgtccactcccagagtccaaaaccctacgatccgcgccaccatgccgcgcctcgccgccgccgccgccgtctcacgccgcgccggcgaggccctgcgccgcggcgcgtttgggggactgcggcctctctcctccctgcaaccgttaaacgccgcctccagcgacgaggtgctcgttgaaggaaagacaagtgcgcgcgctgccgtgctcaaccgccctggctacctcaacgccctcaccaccaccatgggagctaggctcaataaattttatcaatcatgggaggacaacccagacattggctttgtcatgatgaagcggccgagcattctgtgctggtggggatgttgttagattacatgaacttatcagtgaaggcaagctggaggaatgtaaggattttttcaagactttgtacatgttcatttattttctgggcacgtacttgaaaccacatgttgccattcttgatggcattactatgggtggtggtggaggtgtttccatccctggaacattccgtgttgcaactgataggacagtctttgcaactccagaagttcatattggattccatcctgatgctgcagcctccttttatttgtcgcatctaactggccatgttggggaatatgtggccttgaccggtgaaaagcttaatggaacagatatgattgctcttggccttgctacacactatttcatgagtggccatctggatctgatcgatgaacgacttgcaaagttagtaactgatgatccatcagttattgattcgtcccttgcacaatatggagacatggtttatccggacaaaaaaagcattgttcataggctggaggtgattgataaatgcttcagccatgacacagttgaagagattgttgatgccttggaaagtgaagcagccagctcaaatgaagaatggtgtatcttggcgctgaaacgattgaaagaggcctctccgttagctttgaaggtttcactgcgatcgatacgcgagggtagatatcagacacttgatgagtgccttgtccgtgagtaccgcatgtccatgaatggaatctcaaagcaattttctcatgaattctgcgagggagtcagagcacgactagtcgacaaggacttcactcctaagtgggatcctcctgcccttgagtatgttacgaatgacatggttgacgcatacttcgcacctcttggcgattcggagcctgagttgaagctgcctatagaatcgcgagaggcatttgtatgatcacaaatcattccaagaaccggatcattgcaaggaccggactgggacctgataaacgtgttataatctgtgtagccattatttttggcagcacaaccagcccgattggaccaactattcacgtgccgtatactcattcagactatcttcgctagcttacctatacatatattcaaactatactttagaaacagtgcaatgtactatgcaaaacggtgcaacagtgttttggttgaccatatgggtgtaacgtacagtagttcatctataaggtcaccaaaaacaccgtttttatactgtatattgtactgtctgtagagtatagtttgaatatcggtataagtacgagtaagctaccagagatgaggttttctgcggtgtgaaactcagcatatcatctgctgatttgttcacatgaatggaaacgaccagtggagtacgcgaatcatttctgatttggagtctgttcttcacgagggaaaccccgtctacaattctctggctctgtattccactgccactcacttgtcagcaatagcaggctgttgcagatgtttttccttt

SEQ ID NO: 93176 - DNA, 1805 bp, Zea Mays
cttccactggagggccacacttctcttttgaggaccagtccaccgtccactcccagagtccaaaaccctacgatccgcgccaccatgccgcgcctcgccgccgccgccgccgtctcacgccgcgccggcgaggccctgcgccgcggcgcgtttgggggactgcggcctctctcctccctgcaaccgttaaacgccgcctccagcgacgaggtgctcgttgaaggaaagacaagtgcgcgcgctgccgtgctcaaccgccctggctacctcaacgccctcaccaccaccatgggagctaggctcaataaattttatcaatcatgggaggacaacccagacattggctttgtcatgatgaaggcaagctggaggaatgtaaggattttttcaagactttgtacatgttcatttattttctgggcacgtacttgaaaccacatgttgccattcttgatggcattactatgggtggtggtggaggtgtttccatccctggaacattccgtgttgcaactgataggacagtctttgcaactccagaagttcatattggattccatcctgatgctgcagcctccttttatttgtcgcatctaactggccatgttggggaatatgtggccttgaccggtgaaaagcttaatggaacagatatgattgctcttggccttgctacacactatttcatgagtggccatctggatctgatcgatgaacgacttgcaaagttagtaactgatgatccatcagttattgattcgtcccttgcacaatatggagacatggtttatccggacaaaaaaagcattgttcataggctggaggtgattgataaatgcttcagccatgacacagttgaagagattgttgatgccttggaaagtgaagcagccagctcaaatgaagaatggtgtatcttggcgctgaaacgattgaaagaggcctctccgttagctttgaaggtttcactgcgatcgatacgcgagggtagatatcagacacttgatgagtgccttgtccgtgagtaccgcatgtccatgaatggaatctcaaagcaattttctcatgaattctgcgagggagtcagagcacgactagtcgacaaggacttcactcctaagtgggatcctcctgcccttgagtatgttacgaatgacatggttgacgcatacttcgcacctcttggcgattcggagcctgagttgaagctgcctatagaatcgcgagaggcatttgtatgatcacaaatcattccaagaaccggatcattgcaaggaccggactgggacctgataaacgtgttataatctgtgtagccattatttttggcagcacaaccagcccgattggaccaactattcacgtgccgtatactcattcagactatcttcgctagcttacctatacatatattcaaactatactttagaaacagtgcaatgtactatgcaaaacggtgcaacagtgttttggttgaccatatgggtgtaacgtacagtagttcatctataaggtcaccaaaaacaccgtttttatactgtatattgtactgtctgtagagtatagtttgaatatcggtataagtacgagtaagctaccagagatgaggttttctgcggtgtgaaactcagcatatcatctgctgatttgttcacatgaatggaaacgaccagtggagtacgcgaatcatttctgatttggagtctgttcttcacgagggaaaccccgtctacaattctctggctctgtattccactgccactcacttgtcagcaatagcaggctgttgcagatgtttttccttt

SEQ ID NO: 93177 - DNA, 1869 bp, Zea Mays
cttccactggagggccacacttctcttttgaggaccagtccaccgtccactcccagagtccaaaaccctacgatccgcgccaccatgccgcgcctcgccgccgccgccgccgtctcacgccgcgccggcgaggccctgcgccgcggcgcgtttgggggactgcggcctctctcctccctgcaaccgttaaacgccgcctccagcgacgaggtgctcgttgaaggaaagacaagtgcgcgcgctgccgtgctcaaccgccctggctacctcaacgccctcaccaccaccatgggagctaggctcaataaattttatcaatcatgggaggacaacccagacattggctttgtcatgatgaagggcagcggccgagcattctgtgctggtggggatgttgttagattacatgaacttatcagtgaaggcaagctggaggaatgtaaggattttttcaagactttgtacatgttcatttattttctgggcacgtacttgaaaccacatgttgccattcttgatggcattactatgggtggtggtggaggtgtttccatccctggaacattccgtgttgcaactgataggacagtctttgcaactccagaagttcatattggattccatcctgatgctgcagcctccttttatttgtcgcatctaactggccatgttggggaatatgtggccttgaccggtgaaaagcttaatggaacagatatgattgctcttggccttgctacacactatttcatgagtggccatctggatctgatcgatgaacgacttgcaaagttagtaactgatgatccatcagttattgattcgtcccttgcacaatatggagacatggtttatccggacaaaaaaagcattgttcataggctggaggtgattgataaatgcttcagccatgacacagttgaagagattgttgatgccttggaaagtgaagcagccagctcaaatgaagaatggtgtatcttggcgctgaaacgattgaaagaggcctctccgttagctttgaaggtttcactgcgatcgatacgcgagggtagatatcagacacttgatgagtgccttgtccgtgagtaccgcatgtccatgaatggaatctcaaagcaattttctcatgaattctgcgagggagtcagagcacgactagtcgacaaggacttcactcctaagtgggatcctcctgcccttgagtatgttacgaatgacatggttgacgcatacttcgcacctcttggcgattcggagcctgagttgaagctgcctatagaatcgcgagaggcatttgtatgatcacaaatcattccaagaaccggatcattgcaaggaccggactgggacctgataaacgtgttataatctgtgtagccattatttttggcagcacaaccagcccgattggaccaactattcacgtgccgtatactcattcagactatcttcgctagcttacctatacatatattcaaactatactttagaaacagtgcaatgtactatgcaaaacggtgcaacagtgttttggttgaccatatgggtgtaacgtacagtagttcatctataaggtcaccaaaaacaccgtttttatactgtatattgtactgtctgtagagtatagtttgaatatcggtataagtacgagtaagctaccagagatgaggttttctgcggtgtgaaactcagcatatcatctgctgatttgttcacatgaatggaaacgaccagtggagtacgcgaatcatttctgatttggagtctgttcttcacgagggaaaccccgtctacaattctctggctctgtattccactgccactcacttgtcagcaatagcaggctgttgcagatgtttttccttt

SEQ ID NO: 93178 - DNA, 2517 bp, Zea Mays
gcatgcgtccgcggtgggtgcgcctagagcctgcagccaccgtagcgaaatctccaatcttgatgttgcgcggggcgaagattgcctctgccgtcgttagggtcaagcaccgagtcgccggctgctgccccctctccctatcgtcgcgccatccatttcctcgccgttgacgacgacgagcgagactagggaccggccttcgacgaagtggcggctactgctcgatctagcgagggtggctggcatcgagctggggcggcggccatgagccatctcttcgacaacaggtgagaatgaatcttacagttcaaccatatatcctcttccggacaatgtaaatatcaactccagtagatcgatcagtcggtgtcctagccatggcatcagaatagcaatggacagctgcgacagaaactcaactagcagaatcacagggaaggatattaagcaggcgattatgttcagtgcctctttgaacaagctcacattaaaccaagatgaggccaccgaatacacaaatttgatcctagaagaacttcagacaggtcaaggagtcctccagatgaatgtcatgagcaagggcctgtcaagggatctccaaccaacctgcgggccaataccagtgccaatgaaatgcagccgacagcgacatatacttactgcaaccgtagtcttcttccaagctcactggaggcgtatatttgtggttttcttgtggctcatggcatgtgctgcactcttcacatggaagttcatgcagtacagacagcggttggctttcgaggtaatggggtactgcctgtcgacagccaagggggctgcagagacgctcaagctcaacatggccattgtgctcctacctgtttgccgcaacacggtcacttggctcaggagaagccgtgttatcaactcggtcatcccatttaatgacaatattaacttccacaagcttgttgcagcgggaattgtgatcggtgtaatccttcatggaggcatccacctggcatgcgacttcccaaggatcacaaggacagataaggccttctttggacgcacaattgccgctgactttgggtaccaccagccatcctacctggagatagtggtatcaaccgaggggacaactggtatagcaatggtggtactaatgtttgtcgcattcttgcttgctagtagtccttcgagaagaaatccaggaatgctgccacctctcgtcagacagttagctgggttcaatgccttctggtactcgcaccatgtgttcatcgctgtctatgtgctcctcattgtgcattccatgttcctattcctagcaaaggatgtagcagagaagacgacgtggatgtatgtcgcaattcctgtggtgatctacattggagaacggatgttcaggatggtcagatctatggtgttcgatgtcaagatcctcaatgccacagtttatccagggatggtacttgcactcaaggtgacaaagcctccaggttttcggtatcaaagtggaatgtatgtatttgtccaatgtccagaagtatcaaagtttgaatggcacccattttcccttacatctgctccagacgatgatcacttgagcatccatataagatctcttggtgattggagctaccaaatgtatgatgtcttccaacagatgctactttccagcaactccagcatgcctaaaatattctttgatggtccctacggtgcagcgtcacaggatcactcaaagtacgaaattatattgttaattggacttggaataggagcaacgcctttcataagtgttctcaaagacattgccaatggattagataaggggcatggcaacttaaattatcactctgaccgactgaagaaggcctacttttattgggtgacaagagagcaaggatcctttgagtggttcagggatatcatgaaagaggtttcggttctagacagcaagcagggtgtgatagaaatgtataactacctgacaagtgtctaccaagaaggtgataagcggtcgatgctaataagtgcgattcaagcacttcattttgcacgccatggcattgatatcatctcaaaaactcctgttcatacgcacttttcgaggccaaactggcctagagtgctacatggccttgcaagaaggcatatcggggagaggataggggttttctactgtggtccggacgatttgggaaggcagctggagaagctctgccacaaagtgaacacaaaaacattcacgcgatttgtgttccacaaggagcatttctaataatagagactagcatagatcaactccttaggaacaaacctgtcaagtatgatctcaaagctgccaagcacttcatttttttcgcatcactccttcctatcttttgctttagtatctctgtcttcatttaaccattataaagctgatcttacttgaggagctttgtatctaactagaaaaaaacagcgccctatcgggcgcttagacgatttcttgaatgtgatctttgtgatttttttttcttttca

SEQ ID NO: 93179 - DNA, 886 bp, Zea Mays
gccaaccaaaagctatcacataatacgcacgaatgatcacgagtcaattcctaactcaccatggcaccttctcccggactaccaaacccaaccgcacggcaccaccactgaaagacaaagacggccagccctgctcttgtacccttgcacaaacgactacccagaccgatatgctgcattacataggtgctcgtgctctcgtgttgcctttcttcacacaccgtatgcattccaagtttccaaccaaatcataatggcgtcctccgacgaacccgactctcgctcaaagaaccctgccatgcagccgagctcgccactatcctccgagtatgcatttcaaggcacttctccagcctggccggcccgcagcccttccatacagttcgtgtccaacgtcgttgtcggtgacggcgacgcggtggcagcgtccctgagcgcctgcccgtcgtcgacggcgagctcgtctcgtgggagctcatcggacattgagatccaggtgctgttccaggggggcgacgacgacgatggctccacgacgacgtcgccggcggcagcgtggtcgcgcagcacgtctttccgtgggtgcagcgacggcgagctggatgtggaggccgggaggtcaaggctgctgcgggcgcattcgtcggtgaggtcggtggaggagttcatccagcgcgactgcacgggggagctgaggtggagtgctctggagggagggcttcagttcgcctccaagtcgcggagtaacgcagctttactagacgtatttacacatgaaactaagaaaaatagctactcgctttcatccagatatgcattgcattctacacacacagtggtccgcttgagcgtgacgatgacaaagctcgccaagctgttgaaatag

SEQ ID NO: 93180 - DNA, 1946 bp, Zea Mays
ggcagtagaagccgagaaggtaggcccgctcgttccaacatcacaaactccacacggctctcctgtctccgctgcccgctccacctccctccatgccgtcggcttccctccgcctcgccgtcgtcggcgcgggcgcggcgggcctggttgccgcccgcgagctacgccgcgagggccatgcgcccgtcgtcttcgagcgcgccgccgccgttgggggcacttggctctacacgcctcccgccacgtcctccgacccgctcggcgccgcggcgacgcattccagcctctacgcatcgctccgcaccaacctgccacgcgagaccatgggcttcctcgacttccccttcgccgctggcgccgcgggctcccgagacccccgccggtttcccgggcacgaggaggtgctccgctacctggaggcgttcgcgcgccggttcgacctgctccggctcgtccgcttcgagacggaggtgctcagtgtgaggagggaagacggagggaggtgggctgtgacgtcgaggaagctcggggataaggggagcggcgaggaggagttctatgatgccgtcgtggtctgcaatggtcactacacggagccacgcctcgccgtcattcccggggtagatgcttggccagggaagcagatgcatagccacaattaccgtgtgccggagccattccttgatcaagtagtgatcataattggggcctcggcaagtgcagttgacatttcgagagacatcgcaagcatggcggaagaggtacatattgctgatagatcagcaccggcttccacctgtaacaagcagcctggctatgataatctgtggcttcattccatggtaaactaccttttatgagtttatcctggtgaatcaagatatggaagcttttatctactggaggagctgccacagttagtgttgtggcgaatctaatgctcgggctgcagattgaccatgcgcaggaggatggcactgtggtgttccaggatggcagctcaatcaaagctgatgttatcatgcactgcactgggtatagtgatctgcagtatcacttgcatcccgtttcctacaaaagcatgccattttgcgttaatttggaatctgataatgtgcttcttgcatttgtatgttgcctagctacctgtatgactttccattccttggagatgacagcactatcaccgtggacgacaaccgtgtcgatccactatacaagcatatttttccacccgaagtggcacctcatttgtccttcatcggattgccttggaaagtcagttttgctgcaaattgatgccccagttaagatgcacctgtaacctaccctgtgaagctcaaagatcttgaacattccaacctctgttctttccaggttatccccttcccactgtttgaactccaaagtaagtgggttgctagagttctatcaggacggattaatcttccatccgaagacaggatgatggaagatgtgaaggctttctatttgaaactagaagcacatggatggcctaagagatacacacataattttgcaaattaccagtttgagtatgatgattggctcgctgagcaatgtggccatccaccagtcgaagaatggaggaagcagatgtatgctgtaacttcaatgaacaaggcagctcgtcctgagagttaccgtgatgaatgggatgacgagcatctggtggccgaagcaaatgaatacttcaagaaattcttgtaaattctttcttactattctcatcccatattctttcggcatacccgaggctgatctcaactgcaatatgcaaatatgaataaccatttaagtgatgtggattggatacacttctgggttagcatttcatcgatcattcgatcgatgtatatatatgagactgttctggtagtaaacaatcttgtagtaaactgtggattggtcatcaattaacaaca

SEQ ID NO: 93181 - DNA, 1607 bp, Zea Mays
acgaataactggcagtagaagccgagaaggtaggcccgctcgttccaacatcacaaactccacacggctctcctgtctccgctgcccgctccacctccctccatgccgtcggcttccctccgcctcgccgtcgtcggcgcgggcgcggcgggcctggttgccgcccgcgagctacgccgcgagggccatgcgcccgtcgtcttcgagcgcgccgccgccgttgggggcacttggctctacacgcctcccgccacgtcctccgacccgctcggcgccgcggcgacgcattccagcctctacgcatcgctccgcaccaacctgccacgcgagaccatgggcttcctcgacttccccttcgccgctggcgccgcgggctcccgagacccccgccggtttcccgggcacgaggaggtgctccgctacctggaggcgttcgcgcgccggttcgacctgctccggctcgtccgcttcgagacggaggtgctcagtgtgaggagggaagacggagggaggtgggctgtgacgtcgaggaagctcggggataaggggagcggcgaggaggagttctatgatgccgtcgtggtctgcaatggtcactacacggagccacgcctcgccgtcattcccggggtagatgcttggccagggaagcagatgcatagccacaattaccgtgtgccggagccattccttgatcaagtagtgatcataattggggcctcggcaagtgcagttgacatttcgagagacatcgcaagcatggcggaagaggtacatattgctgatagatcagcaccggcttccacctgtaacaagcagcctggctatgataatctgtggcttcattccatgattgaccatgcgcaggaggatggcactgtggtgttccaggatggcagctcaatcaaagctgatgttatcatgcactgcactggctacctgtatgactttccattccttggagatgacagcactatcaccgtggacgacaaccgtgtcgatccactatacaagcatatttttccacccgaagtggcacctcatttgtccttcatcggattgccttggaaagttatccccttcccactgtttgaactccaaagtaagtgggttgctagagttctatcaggacggattaatcttccatccgaagacaggatgatggaagatgtgaaggctttctatttgaaactagaagcacatggatggcctaagagatacacacataattttgcaaattaccagtttgagtatgatgattggctcgctgagcaatgtggccatccaccagtcgaagaatggaggaagcagatgtatgctgtaacttcaatgaacaaggcagctcgtcctgagagttaccgtgatgaatgggatgacgagcatctggtggccgaagcaaatgaatacttcaagaaattcttgtaaattctttcttactattctcatcccatattctttcggcatacccgaggctgatctcaactgcaatatgcaaatatgaataaccatttaactattttatgtgatgtggattggatacacttctgggttagcatttcatcgatgtatatatatgagactgttctggtagtaaacaatcttgtagt

SEQ ID NO: 93182 - DNA, 2419 bp, Zea Mays
cccaagcccacctcgctccttgcatgcatatgcagcagcagtcacaggtaagcagatcccctagagaagattagactaacgagaggtatcaatccctatctccatccccatctcccactacccatgcggccatgcatcagtaaatcaaaatcatagcaggtgaaaaaaaagagagcatgtgagccgagagagaaacaggaaaggagcaggaaaaaaaaagagagagagaagaagccgcaggggctggcctgacggtacggacagccgcctgcctccagcagtatccagccgcgaaagaattgagaagatccagaccgagctcgacgaggggaggcgcgacaaagaagtatcgccgccacggaaagagcttttcccgttgcttcggtagctaaaggagtggttgttctccacggggacaacagaaaaatgatatggagatttggttgcttgtccaattaagatggaggatctgaagaagttttatccttctttctggaagcaatctagcagttcacgaagtagcctgcactcgatccgtgagcataagctgatggatttgggttcgaggcgcaatcaaacccaagaagtttccaccaatttcaataaacgcaaaccgttctccgaatctgtggaactgacttcagatgttaggacttcagtttggagaaaatccgatgcttatcacggagtgattgacttggagaagccatcgatttctggtgatgcgattgaagctattggttgttctggctttggcaaccctgccaaccaaaatggcaagtctcaggatggttcatgctgtatttcaccagagaacacctcacttgcagagtcgcttcagtcgtgtagagactggaacatatcgcgtgtaagcgttggttcagttggatctagtgacactccggattgccagtcccctatcaaaacaagtaacaatgaagcaagacattcactgtttgacctgaatgttcctcaagaagaaagtctttttatgtcttctactctggttccttcttcttcaacgtattgtggaattttttcagacaaccgtagagaaacttctgagaaagagcatatcgctggtatcagatcaatgaaaggatcttccatcactgtggtcacccccaactcagttgcagacagttcaagggatgtggtaactgaatcgccagttcaaccgaagtttctttttgaccttaatgtgtcacttgaaaacaccgacatgccatcagaaatctgtgattatagagataaggatgtaaataatgatgtaagtaaaggaacagcaccccgtcgttctttctccaataaagatagtctgcatgcagaaacttccacaaaacatgcggttcttggacatgatcatatgttggcgcacgaggatgatagtaaggtgcttctcacatccccaacagctaatggtatcaataaggttcagttgacacagtctggaaccattaacaaggagtttttgatccctggatctcctcttgttgatacaagtttccctccaagacttgagatatccgacaatggagcatcgaatattcaagagttaagcatgcttcaagacaaggtcgatggtgatggcacaacagctgatactgcagctagaacccttctttccattttccagcatagttctgaacgcattgctcattgctttggaagcagcaaccagacagcagctcagaacgtgaacgatgagcctcagccttcattggactcgttcgagcaaaccgtgttgaacttagaggagatccaagatgacggtcaatcgatcaatgtggcaccaccctatatcgaaggaccagcatgtcggatcaagctaaagagagggaggggtatgagaaattttcagagggagatcattcctggcctccttctagggaggcaagagatatgcgaggacttggaagttataggctatgcgccaaagaaagctcggtccaggaaaccccgcaagggtccaggcgcatcctcagctcaaccgaggccgtgcaaacgtggagctgtcaagcgctgaccaggagcatctgcattccgtggcagggtgccataaggcaggcgattcagaacaggagagtccattctaaaccatgtgaatattcgtgtgtatcaagcctagcttcaaactctggtttgctggtgaccatttagttggggatattctttcctttcccctcttgttatatctttcctggagtgatcaggttgttagattcaagattttttttttttgcctttatatttgaaagtctagcggcgaagacagtcatagtgccacaatgatcagtctcgaaattccaggcttagatcagagtcgacgaagaaggcaagatggttgttcctgatgataacctagcactttctatcttgggttataccttggattaatgcgaaaacagtatacttgctt

SEQ ID NO: 93183 - DNA, 1466 bp, Zea Mays
taatccaacaaggcaacaagatggcctgctcatagagcttcatgactattctaaccttgttcattttcaggttcagttggatctagtgacactccggattgccagtcccctatcaaaacaagtaacaatgaagcaagacattcactgtttgacctgaatgttcctcaagaagaaagtctttttatgtcttctactctggttccttcttcttcaacgtattgtggaattttttcagacaaccgtagagaaacttctgagaaagagcatatcgctggtatcagatcaatgaaaggatcttccatcactgtggtcacccccaactcagttgcagacagttcaagggatgtggtaactgaatcgccagttcaaccgaagtttctttttgaccttaatgtgtcacttgaaaacaccgacatgccatcagaaatctgtgattatagagataaggatgtaaataatgatgtaagtaaaggaacagcaccccgtcgttctttctccaataaagatagtctgcatgcagaaacttccacaaaacatgcggttcttggacatgatcatatgttggcgcacgaggatgatagtaaggtgcttctcacatccccaacagctaatggtatcaataaggttcagttgacacagtctggaaccattaacaaggagtttttgatccctggatctcctcttgttgatacaagtttccctccaagacttgagatatccgacaatggagcatcgaatattcaagagttaagcatgcttcaagacaaggtcgatggtgatggcacaacagctgatactgcagctagaacccttctttccattttccagcatagttctgaacgcattgctcattgctttggaagcagcaaccagacagcagctcagaacgtgaacgatgagcctcagccttcattggactcgttcgagcaaaccgtgttgaacttagaggagatccaagatgacggtcaatcgatcaatgtggcaccaccctatatcgaaggaccagcatgtcggatcaagctaaagagagggaggggtatgagaaattttcagagggagatcattcctggcctccttctagggaggcaagagatatgcgaggacttggaagttataggctatgcgccaaagaaagctcggtccaggaaaccccgcaagggtccaggcgcatcctcagctcaaccgaggccgtgcaaacgtggagctgtcaagcgctgaccaggagcatctgcattccgtggcagggtgccataaggcaggcgattcagaacaggagagtccattctaaaccatgtgaatattcgtgtgtatcaagcctagcttcaaactctggtttgctggtgaccatttagttggggatattctttcctttcccctcttgttatatctttcctggagtgatcaggttgttagattcaagattttttttttttgcctttatatttgaaagtctagcggcgaagaca

SEQ ID NO: 93184 - DNA, 2381 bp, Zea Mays
atggtcatcctatcaccaaagaaaggcaaccaaaacaataatttcgcaatcaaggccatcctttcaccaaagacaggcaaccaaacagtaacaattttgccaccaagcaattgccggttgcattacttaacactggcttgggctgacctcgtcagagatcgtctacttcgtgaagcaacgggagatttgacgcatctccgtccccaagcccacctcgctccttgcatgcatatgcagcagcagtcacaggtaagcagatcccctagagaagattagactaacgagaggtatcaatccctatctccatccccatctcccactacccatgcggccatgcatcagtaaatcaaaatcatagcaggtgaaaaaaaagagagcatgtgagccgagagagaaacaggaaaggagcaggaaaaaaaaagagagagagaagaagccgcaggggctggcctgacggtacggacagccgcctgcctccagcagtatccagccgcgaaagaattgagaagatccagaccgagctcgacgaggggaggcgcgacaaagaagtatcgccgccacggaaagatggaggatctgaagaagttttatccttctttctggaagcaatctagcagttcacgaagtagcctgcactcgatccgtgagcataagctgatggatttgggttcgaggcgcaatcaaacccaagaagtttccaccaatttcaataaacgcaaaccgttctccgaatctgtggaactgacttcagatgttaggacttcagtttggagaaaatccgatgcttatcacggagtgattgacttggagaagccatcgatttctggtgatgcgattgaagctattggttgttctggctttggcaaccctgccaaccaaaatggcaagtctcaggatggttcatgctgtatttcaccagagaacacctcacttgcagagtcgcttcagtcgtgtagagactggaacatatcgcgtgtaagcgttggttcagttggatctagtgacactccggattgccagtcccctatcaaaacaagtaacaatgaagcaagacattcactgtttgacctgaatgttcctcaagaagaaagtctttttatgtcttctactctggttccttcttcttcaacgtattgtggaattttttcagacaaccgtagagaaacttctgagaaagagcatatcgctggtatcagatcaatgaaaggatcttccatcactgtggtcacccccaactcagttgcagacagttcaagggatgtggtaactgaatcgccagttcaaccgaagtttctttttgaccttaatgtgtcacttgaaaacaccgacatgccatcagaaatctgtgattatagagataaggatgtaaataatgatgtaagtaaaggaacagcaccccgtcgttctttctccaataaagatagtctgcatgcagaaacttccacaaaacatgcggttcttggacatgatcatatgttggcgcacgaggatgatagtaaggtgcttctcacatccccaacagctaatggtatcaataaggttcagttgacacagtctggaaccattaacaaggagtttttgatccctggatctcctcttgttgatacaagtttccctccaagacttgagatatccgacaatggagcatcgaatattcaagagttaagcatgcttcaagacaaggtcgatggtgatggcacaacagctgatactgcagctagaacccttctttccattttccagcatagttctgaacgcattgctcattgctttggaagcagcaaccagacagcagctcagaacgtgaacgatgagcctcagccttcattggactcgttcgagcaaaccgtgttgaacttagaggagatccaagatgacggtcaatcgatcaatgtggcaccaccctatatcgaaggaccagcatgtcggatcaagctaaagagagggaggggtatgagaaattttcagagggagatcattcctggcctccttctagggaggcaagagatatgcgaggacttggaagttataggctatgcgccaaagaaagctcggtccaggaaaccccgcaagggtccaggcgcatcctcagctcaaccgaggccgtgcaaacgtggagctgtcaagcgctgaccaggagcatctgcattccgtggcagggtgccataaggcaggcgattcagaacaggagagtccattctaaaccatgtgaatattcgtgtgtatcaagcctagcttcaaactctggtttgctggtgaccatttagttggggatattctttcctttcccctcttgttatatctttcctggagtgatcaggttgttagattcaagattttttttttttgcctttatatttgaaagtctagcggcgaagaca

SEQ ID NO: 93185 - DNA, 515 bp, Zea Mays
aggctttcaggtggtgggcatagctatttttgagatagtgatgaggcaagattaagattcaaacgaaagttctgggacaaggctgtggagatagatgatctatgtggaaaggatggtgcatggtggggtattaaaggttacatgcgagacaatttcaaccataacaataaggtcacctcgcacaaagagcattttcagaacagtaagctcatgaaatctgtgttggatatgtattgtgagcttcgtcctgttaccggttcatccttaacacaccaaacaaggtatgacccaacacgtgcagttgacccaatcattgaacatggtcactacatcttgtttcgaagcctagggagattggacgccttagtgttcaattgttacacgtagatggtatttgtttagttatcaggtttaatgttgagcagatacaatatttaaaggttttctgtgttgagcttgttttgcttttggccaactgttgatagtgtttttttacaaaagtgatgcattgtact

SEQ ID NO: 93186 - DNA, 99 bp, Zea Mays
cgggaccatcatgaactcggatttcacctttcaggattccgaaatgcacacatacaaaaaacattaatatgcctatcacaacggcaagcagttaccatt

SEQ ID NO: 93187 - DNA, 214 bp, Zea Mays
atattttatattatctattttaacttatttaattcaagtttgaatcccaattcaaatcaggcctttgaatttcaaaatttatttaaaatgaacaaccaaagaaatttaccagcatccaatgcaaagttcattttatttatttatttaagaatttaatttcaaattcataattcacaccacctaaaatttaaataacctttctatcttggaaacc

SEQ ID NO: 93188 - DNA, 552 bp, Zea Mays
atgacggtggtgaggtcggacacgaagtgcgccgccttgctgctcagggacggcaggtaccccatcgaccctccttacggcagcggaactgggaggggagcagagggggaggagggcgttgatggcgggtgcagcatcggatcacggcagcggatcaccgtgcacctgttgcgaagggcgcttacctctgcaggagtcgcgtctggcgtctttgcctgcattttcaccaccgcgtcaggggattacctcagcgggaatcgcgtctggcgtcttcgccggtgcctttcactgccgccatgggtgggggagggggcgagtcgcagggtgggggagggggcgccgcgcttccagatgcggtacgtgtcgccggcctgggccccgccaaccggcgccggagacggggacgggggcgcggtggagttgtgcagcgggggagtggtggagcggtggagtggcggtggcgctgggcactggaggccgcgaccgcggctggaggtgagcaagcgggcgggggcgcaaccgtgcagagctggatgccgcgggcggggctag

SEQ ID NO: 93189 - DNA, 801 bp, Zea Mays
atggctcaagagctccaagaaacgtcctcttcctctgccaccaccaccacctcgtcgtgtaccacctcttgctgctcgtccactgtcacggactcgtcctcgtcgcccccgtcaccggcggcggccaatgccgcgcccgcgccacggaaggcggaggccgagactggcggggacgaggacggttgtgctggtaaggcggcgccggcgaagaagcgggagcggagcagcgaggggaagcacccgacgtaccgcggcgtgcggatgcgggcgtggggcaagtgggtgtcagagatccgcgagccgcgcaagaagtcgcgcatatggctcggcacgttcccgaccgccgagatggccgcgcgcgcccacgacgccgccgcgctcgccatcaagggccgcgccacgcaactcaactttccggtcctcgccggcgtgctcccgcgcgccgcgtccgcggcgcccaaggacgtccaggccgccgccatgctggccgccgcgttcacgtcgccgtcgtcagcaccatcggagctcgacgccggcgcgccggcgccacgcgaagtgcccgccacaaagaacggctccccgtccgaggacgaggcaggcgctgaggcgccggtaccaccggcggcggcctctcagccagggacgccgtcgagcggcgtggacgaagagcggcagctgttcgacttgccggacctgctcctcgacgtccgggacgggttcgggcgcttcccgccgatgtgggccccgttccatgacgtgttggaggtcaatgcggaggaggagccgctgctttgggaatag

SEQ ID NO: 93190 - DNA, 1431 bp, Zea Mays
cccctctcgctcgctcctgctgcctgcctgtgcctgcctccacacccctggccttgtgcttcgtgcgtgcgtgcctctgcctccctccctataagtacacacgccgcctccgtctcggacacttgcagaaccatccatcactagttgagtggcctgcaaagacacgtacgcacggcacgcgaccacagcagcagctggtctgaggcagctagcttggaaccacaggacggcgcgatgcagaagcgctggaagccgagagacgccgctgccggtgctttcagcatggcgctggagctggtggacgacgaggacgacgcggcgccgccggcgataccgccgccgcagacgccgctggagcccatggagtacctctctcggtcgtggagcgtgtcggcgtcggagatctccaagatcctcgtcgccggaggcaacaagcccagcagcgttgccgccgcggcgtgccgccttccggaggcggctatgtctataccggagcaggcgcctgtgctcgccacgtcctccaccgtccatctcccgtctcctcagcagcatagagatgcgaggaggtactccacgagcggcggccaccaccaatcgatcggcaggtggttccagcaggctcaccacagggaaacgtgccgggcgaagcagagcggcaaggagaagcagcgcgccgagaaggcccacgtgcacgccatggtgtccgtggcccgggtggcggccgcggtcgccgccgtcgcgggctccggcgacacccagacccaggccaccaagatggccagggccatggcgtcggccaccgagctgctagcctcccactgcgtcgaggcggcccagcacgcgggcgcgcgccacgatcaggtggctgccgcggtgcaggccgcggtcggcgtcggaagccccggcgatctggtcacgctcacggcggccgccgcgaccgctctgcgaggagcggcgacgctgaagcagagggtgcagcgagagacggcgaggagcaacgcgagcgtcctcccgtacgagagagggagttcgtggagcccggacatctggtgcaaggagggggacctgctgaaacgcacgaggaaagggggtttgcacaggataagagtatctatctacatcaacaagaggtcacaggtgatactgaagctgaaaagcaaacaccttggaggcgcgctgtcaaagaacaacaagagcgtggtttacggcgtgtacagcgagcttccgacgtgggctgggaagggctccgtagaggagacatgctgcttcggccttagcaccgcgcaaggtctcgtggagttggagtgcgagggcagcgcgagcaagcggaagtgggttgacgacgtgcagagcctgcttcgtgaggcggctctgcatggccatggtcaagtagggaatggaatgggactagtaaaactcagctagtgcagc

SEQ ID NO: 93191 - DNA, 168 bp, Zea Mays
atggcggcggacgcgcagtcaagatcaagcgaagagcacgggccgagaccaggggaccgacagcgtccagagctccttgtttgtcctatcgctaccgggggaacagggtttgcaaaacggaacccgttggcagaaaaacgaagcagtagcagggcatgtacaacctag

SEQ ID NO: 93192 - DNA, 1116 bp, Zea Mays
tcccatttgatttggcccactgcagcccactaaaccgtcctgtacgcagagcccatgcacggttttgagacgagagcagctcagcagcagagcgccagccgccggactcccacgcagcacgtacggacgccatcgaggaaccctaacaagagcacatcacacggggcgacggtttggcgccgcgccaccggcgactggcggctggtgccccctctcggtccccactccccagcacggtgacggcctgctgcagcagatggtaaattatttctcagactcagagtgcaagaaagttggttcgtccagggaagaggaatagaggttatggttttgtgtgagattgattagcatctaccttcaaatcattctcttggtatttattgagcactgcaagtggttgaggacttgaggtaaacatgctgaagtgcatcttgagccagtcatggaagagaggagcacatatgctacatgcaggaaattcagcaccagctgtactaacttgctggagtcaatttcacagtgggcaggtctggagttcttccaggagcttcttcggcgtggaggacttcgtggacgaggacaacagtaggccatacacgtacaagaaggagaagaggtccaagaacccccacaagcacatctcgttcaagcagcgcaccatcgcccacatggagccgttcacgctggacgtgttcatctccaagcgcttcgtctcggcgtccctcacgcaccggtcgacctgcaggcaggtcgcggtcgccgggaccaactccaaggacatcaaggcggcgctcaggtcgaggtccgacgtgccggcctgcctggccgtcgggcggttcctggccgagagggcgaaggaggccgacgtgtacacctgcacgtacacgccgagggaacgggacaagttcgaggggaagatcagggcggttgttcagtcgctgatcgataacgggatcaatgtgaaactttaccttgactgagttcggtgctgtatgagtatgagtagtagttctgttggaacttgcgcgtgggtttatctgttgccagggttgcaggtcgaattattttgtgtccttatgttgatattttttttgctcaaatgaacatcattggata

SEQ ID NO: 93193 - DNA, 1748 bp, Zea Mays
tcccatttgatttggcccactgcagcccactaaaccgtcctgtacgcagagcccatgcacggttttgagacgagagcagctcagcagcagagcgccagccgccggactcccacgcagcacgtacggacgccatcgaggaaccctaacaagagcacatcacacggggcgacggtttggcgccgcgccaccggcgactggcggctggtgccccctctcggtccccactccccagcacggtgacggcctgctgcagcaggtgatctctgatgtctgattctcttctccagttctccccagtccccgtctccccgacttcctgttcagtgttcaccgttgagtggcctgctgccctgctgtgctcatgtgatgtgctcgttgtgaatttgtgatccgatccgagccagtccccacccagttattaatgaaaatgagatccttgaagatgatgaagaatctgaggaaggaaatgcaaatgaatgaggaagatggttctgggccttctagctcatttgggactgaaaatgcatttcaagtggatgaagatttactttagctagtagatcatttatcacttatcaagtggatgaagatttgctcatttgtttcatgtttgactttgctgcagttggactttgtacttttttgctggacaacctgcagcaatgcagttttactaatgtaatggcttattaacccgttcctgtgagtttgcaatggctgtactgttttttactatgttttacttttacctatggtaatgtctgacagccatacagtgcaggagaaagcagatggtacacttatcctgtgatttttgttgtgttcctaactttgctgggatttttgtttgattaattgattccattgttttgtgtggttgttgctgcagatggtaaattatttctcagactcagagtgcaagaaagttggttcgtccagggaagaggaatagaggttatggttttgtgtgagattgattagcatctaccttcaaatcattctcttggtatttattgagcactgcaagtggttgaggacttgaggtaaacatgctgaagtgcatcttgagccagtcatggaagagaggagcacatatgctacatgcaggaaattcagcaccagctgtactaacttgctggagtcaatttcacagtgggcaggtctggagttcttccaggagcttcttcggcgtggaggacttcgtggacgaggacaacagtaggccatacacgtacaagaaggagaagaggtccaagaacccccacaagcacatctcgttcaagcagcgcaccatcgcccacatggagccgttcacgctggacgtgttcatctccaagcgcttcgtctcggcgtccctcacgcaccggtcgacctgcaggcaggtcgcggtcgccgggaccaactccaaggacatcaaggcggcgctcaggtcgaggtccgacgtgccggcctgcctggccgtcgggcggttcctggccgagagggcgaaggaggccgacgtgtacacctgcacgtacacgccgagggaacgggacaagttcgaggggaagatcagggcggttgttcagtcgctgatcgataacgggatcaatgtgaaactttaccttgactgagttcggtgctgtatgagtatgagtagtagttctgttggaacttgcgcgtgggtttatctgttgccagggttgcaggtcgaattattttgtgtccttatgttgatattttttttgctcaaatgaacatcattggat

SEQ ID NO: 93194 - DNA, 901 bp, Zea Mays
attttgcataagtaacaggtttctgtcgctagttggtggtgctgatgtgaatcggcaagttcaacgtgtttgttgtttattacagaagtggataaggtcgttagatgggctagaaaccactatctatcatcaacagctcttccttctatcaagggagacaagttaatcattccccatgagagtctggatatatcaattgagaggctgaaggaacatggtataacaactaagaaatcctctcaaaattagaagaaaattggggcttgccacatgagcatcagtcaaaggtgtttcatgttaagcatctagaagtattggctttatttgctctcccagcaagtgctatctgcttcttttgttctgatgttgtcctgtgctgaatattgttctaatattgcccaaatttgcatattctaactttgctcatgtattttgagcacatgaacaaaaagagcagaacatgcgtattcatcctgttgaccctactgatcttcgcaggcttgccttaagttaagctgtcatcctgctgtctaatctgagcaaattctcagcagggagggcaggttgtagttcgttccactaccgggtacccaaacggccacagggtaaaggagccccgccgggcagcaccacacaggtgatagacactgcagtggccagcaagaatggagtcatggaacatcgacaggaggggtgcggcagcggcaaccgatgtatcccttggacaatctggttttgacatgatgcaaatcaatctgctgtactttgtattctgcacttgcacagattgtttgactaattacaagattatctcagtgttttggtttggatttagagtacacttatgtatgaaatattgattggcactcatctatattatattaattatattattattaaa

SEQ ID NO: 93195 - DNA, 6597 bp, Zea Mays
atggatcatgatgatactgattttcagagccaaaactttcaactagctggtgaaggcagtaacaaattctcatcaggtttgcgaccatttgcactaccaaaacttgatattgaggaccaattacaaggccatcttcgatttgataatttgatagatacagaagcatttttcagtgtacaagggcacgggaatagttggattgaggttctgtccactggaagcagtgttgttgattttagctctagcgcagctgaatcttgctcaatatctaaaactaataatgtctggtcagaggcaacatccactgaatctgtcgaaatgctattgaaatcggtgggagaaaatgagacaactggtgacatggataataatgcccaccttaagttaagtggtatggacagtcaaattgatcaatcgagtgtccatcctaaatctagtaactccctgccagatagtactgtagtgccaactgaggaagatcagtctttgagtactcattctagaatgacagacgatcttgatcgttctcagatatctcattctataatgactgccgacctttcaaacaccgagagtcagcttgaacattttcggcctttcttaatggacaagaaagctgagcaggcagtggattctgttggtgagaagtgcattgcaggtgagaagttgtcctcttcaaacaacgcaccaggaagctacccagccattgacaactattttggggcaggtcatgatgatcgttctttggacaaacttaatataccctcaactggagtagattcaaagaacttgaataatgaacctttcccagagttggctcccctgcagaacatatatactgattcatatcacttcaaggaagatactacagaatccgaggctggtgttactcctcaagattcaaagtttcgtcatatcaacgaaaataaagttgaaggtggactacaagaactgcaaagtttgtcatgtgctggtcagtccttgggcgctgtaaacttgtctagtcaagcaagcaatgaaactcttttgtcagaaagttctgatggattgctagaggccataacaaatccagttaagatgctgcacaggagtgatgatacttgcaataaagtgaacagcactcctcaaccatctttttcagcagtgcaacatggagctgaaggcctggaaaattcagttcacaggagcaatgagttcgttgttaaggagtttagtatcggttcaaattctcttttatctcaccaacctgaggcagacccaaaattttttaatccacatcctattagttctctgtctccgaaaagtaaaatttccgatgccacttgtgttcctgaagaaacaaagaatgttggatccaatagtataaacacctgctgtacaggtgatgaatcaaaacatgtagtgttggagaaccgacaatattctgttgacaacctaaaaagtggtgacatgggagaaaagatgtctggggaggaaatacccgcagtttcagggaacattgatcaaatgatagagaatgatcatgaagaaaaggctgccaatgctactggtacatccaaagataaggttgacccttctgacagtattgcacttgaaaactttgcagctgacactttcaatgcttcagaggattcagacattccgtcactaaatcataagaggtcatttgaggaacatgaatcttctgctttaggagtggagcctaaaaacacaaatttactccaatctacttctgggcttcaagagaaaatttcagcatcagtgatcagttctagtagtggcatcacacctaccattgttactgacaactttgatatttctgaggataaaaatggctgttcaataggtgtttcttctgttgattctcctgctttactagctgagaaggatttgaatatgtccacagtgaatactgaggagccattcaaggaaggggttaagtccgctttaggagatcaacacaatggtatttcttctggctctggacaaggaggggaaatgccagctgtcccaatggactcaaagattgccgtgtatagtggtactgtttctgctacagaaagggagaaattcaaggagcagcctaattctttgggttgtttgaccacaggagaaactcaggataaatcagatagtatggatccaaccacagcatctacattgggtggaaaggtggctgtgaagattgtaaaaactccactgaatgcaagtgatgatttgaatgcacatatgcaagatatagtgttaaatcaaggtacagattgtagttctggtactgtgccatctcaaggaaacgaaggctcaagcttattggaacctggtaatggtgatggaatctgcactggggttacatgtgggtccccttcagtgattagttgtgctgaatcctgtccccaagaaggtggacatggcagcactgctttacttcatcacacactatgtgggcaatctgaggatcctgaagatcatggggcctcagttgatggtatccagagctcaaaacaatgcaataccagaaatatagaatctgcacctggttctcaggagactagtgcagcaggaggtgatagaagcttctcatttgaggtgggagctccaccaaatgttgctgagaaagcccatagccctgtttggagccctttccctaaatacattacttctcagagtagcaagatggccacagaaaatactcaagctggaggttctttgaaggatactagtgatgatagtaagaaaatatctactgtggagtctggtaaagaacagctatcagaaaggaaagtaactgaaagttctgggggtggcctctcagacaactgcaatatagacgacatcattaagggtagaagttcaccgccgcggcagcatccaatccctgagtgttctgatttagtgaattttccattcacagatccacagcatttgcagctacgtgcacagatatttgtttatggagctcttattcaaggaacaccaccaggagaggcttacatggtggcggcttttggagaacctgtaggtggtggcaaacctacatgggaggctgcttggcgagctgcttttgaaagatttcagtataaaaaatcacctcatgtcagtttagagactcccacaagttcacttataggtagttctgtgcctgagaaagctagcaaaggtacagcaattacaactgtgccagctagcaaaaaagttggtaaaactgtggcgccagcacatcctgctgtaaccctacactctccaacttctgattttccttttggtagttctacatttaatctgcaacgaggcactcatctggattttagccaggcagtatcaccatttgcgtataattcacacatgagacatccgtctcctggtgttgccccctggtatacgcagagccctggtccacgccctgcagcctggttaattccaccacaaaacttaatatttgattcatcaatgcaaccggttattcctacaaatgaaactgcgaagggtgcatcatccaaaaacatatccgtttcacatactgtttcatctggtgttcttcccagcctggcaccttctattgtttcttctccaatagcagttgtgagtgatggaaaacagaaggctgcttctagctctaagcgtggcacaacatcacaaaagtcaagaaaaaaaaagaaagcttcagcaagttcagaacagcaacctgtaattgcttctcctcatctcaaaatgaacatgccatcttttactcctgccattaagcacacagcaggattgaccttatgcggtagcaagcctgttcctaacatgggccagattgcctctgaacataactaccagatcactggtggtatggatagtgatcaaagaatcatcttttcagaacagatccgtggtgcagtagaacaatcagctgcacaagctaaaagtgcaagcattgactcagtggaggcagttaagcacaaggagggcatatggagccatctatctacaatctcaaggaataagttacctccaaaagttgaagagaaacttacctcagttgcagctgctgctgaagcagcagtttctgttgcaaaggcagctgcagaagctgccaagatggcgtcagaggctgcattgcaggcaaaaatgatggcagatgaagctcttagctcttctatatctgtaatgtccatgcatcacgaagctgatcaatataatgtcattagcagtccgcctatcttgtcaagttcaacgccagcatcatctctgaaaaccaagaacaagagtcatgccccaggttccatcatttctgtggcacgggaggctgctagaaagagggttgaagaggcatctgcagctgcaaaacgtgctgaaaacttggatgccatattgaaagctgcagagcttgctgcggaagctgtgttcagggcaggaaccattattggaatgggagaaccactaccttttaccctaagagagcttttggaagctgggccgaatggctactggaagtctgcgagtgcgagaaataaatctggaagttgtaatgataatccagtaacagaaacattggaggtagatgcacctgctaactttaacaaatctggcagaaagcgcggtcggaaacctaaatatgatcaagcactaccaaattcggagccatcttcaagctgcaaagaattacagtcatatggaatacactcaggagtaggacatggagttgttgaagatgttcccattactgtgtcacctaatggtaacaatgttacatcaccaataaacattatctggaatggcattgaaaagggatctgcagttgaggttttatctgacaaaggtgggtttggagtagcttggttttctgctaaggttattgatataaatggaaataatgtttttgtcaactatgacaaccacaatggatctggtcctcatgaagaatgggtgccattgcgacaagagggggataagccgcctcagatacgtcttgcgcaccctgctaccctctcaaaattcaaaactaggaaacgactcagggaaacagcaggaagttgtttatgggttatcggagatcatgtagacgcttgggtcaacaatagctgttggcgagagggagttatttctcagaattatgagactgatgagacgaaatatgatgtacatttttcagttggaggtggtggtgagtccttagtagttgatgcttggagccttcgtccatcgcgtgtttggaaagatggtcaatgggtagagtggtcccatgcaagagaaaggaaatccaaatctaataagggcgattcacctcctgagaaacgccaaagaatcgacttgcttcaaactggtggcaatctatctgttcttggcgaagtggggggttcttcgaaggacaataatataaacaatgcaaaaaacccggaggaattaaagccattgtctttgtctcagggggaaattgttttcaacattgggaaaagtgtagttgagaataaatctgattctcttgcattcagacgtcctggactacaaaaagaaggatcaaaggtcgtctatggtgttccaaaacatggaaagaagaagaagtttatggaagtaagcaaacattatgatgcaggccaatctgacaagatttctgagggcaattcatctaacagattcgtgaaacatctgatgccacaattgccaaggccacgtgaaaatgcttccaaagttgaccctattagaggaaggagagtaggtgaaacaaggtctagattacctaaacctacgaagtcccacaatgttggagctagcagtgttcctggaaaggattccttgcctatgcaaatgcatgttccaaattctggtgtttctgaaaggagttctagttttgcaggaagttcgacaagcacttccaacaatgagaagcccacttcagaaaataataatccggtgcttggtgtgggccttagaactgaagtttcttctggtcctgaactgcaaactgcatctactgttcctagttccaagccaaatgtatccactactaatcgagctaaaaggaaatatgttcccactgtcagtaacacaaacagaggtatactaaaaacctctgaaaagtcgagttctgattctgctgagccccgaaggactacttctgattctgctgaacctagacgatctaacaggcgaattcaaccaacttcaaggttactagagggcttgcaaagttccctcgtaatctcgaaagttcctggcgagaaggttcataggagcaattacaaaagtgcatcctcaagagggagaactcaagctcatgggtgagtgaaggcaccacatagctcatagctgcttttggtgggatagctctcgtgtacatagctgtagccgtccagtatggaaggaggatagggttggagtaggaagtctttattggagcgcaaggattcagatgtattataaactagcttaagtgcattgtgttaaccttttcttttacttgctcgaattatacttttccgtgttgtagaatacctggaaatatccttttagtatgtgtggatacaccgggaaagaaattgggtgccgtttaaattcatccgataatttaacgtgagtctgaacgtcaatttgactcgctactatcgtttgatcata

SEQ ID NO: 93196 - DNA, 6563 bp, Zea Mays
atggatcatgatgatactgattttcagagccaaaactttcaactagctggtgaaggcagtaacaaattctcatcaggtttgcgaccatttgcactaccaaaacttgatattgaggaccaattacaaggccatcttcgatttgataatttgatagatacagaagcatttttcagtgtacaagggcacgggaatagttggattgaggttctgtccactggaagcagtgttgttgattttagctctagcgcagctgaatcttgctcaatatctaaaactaataatgtctggtcagaggcaacatccactgaatctgtcgaaatgctattgaaatcggtgggagaaaatgagacaactggtgacatggataataatgcccaccttaagttaagtggtatggacagtcaaattgatcaatcgagtgtccatcctaaatctagtaactccctgccagatagtactgtagtgccaactgaggaagatcagtctttgagtactcattctagaatgacagacgatcttgatcgttctcagatatctcattctataatgactgccgacctttcaaacaccgagagtcagcttgaacattttcggcctttcttaatggacaagaaagctgagcaggcagtggattctgttggtgagaagtgcattgcaggtgagaagttgtcctcttcaaacaacgcaccaggaagctacccagccattgacaactattttggggcaggtcatgatgatcgttctttggacaaacttaatataccctcaactggagtagattcaaagaacttgaataatgaacctttcccagagttggctcccctgcagaacatatatactgattcatatcacttcaaggaagatactacagaatccgaggctggtgttactcctcaagattcaaagtttcgtcatatcaacgaaaataaagttgaaggtggactacaagaactgcaaagtttgtcatgtgctggtcagtccttgggcgctgtaaacttgtctagtcaagcaagcaatgaaactcttttgtcagaaagttctgatggattgctagaggccataacaaatccagttaagatgctgcacaggagtgatgatacttgcaataaagtgaacagcactcctcaaccatctttttcagcagtgcaacatggagctgaaggcctggaaaattcagttcacaggagcaatgagttcgttgttaaggagtttagtatcggttcaaattctcttttatctcaccaacctgaggcagacccaaaattttttaatccacatcctattagttctctgtctccgaaaagtaaaatttccgatgccacttgtgttcctgaagaaacaaagaatgttggatccaatagtataaacacctgctgtacaggtgatgaatcaaaacatgtagtgttggagaaccgacaatattctgttgacaacctaaaaagtggtgacatgggagaaaagatgtctggggaggaaatacccgcagtttcagggaacattgatcaaatgatagagaatgatcatgaagaaaaggctgccaatgctactggtacatccaaagataaggttgacccttctgacagtattgcacttgaaaactttgcagctgacactttcaatgcttcagaggattcagacattccgtcactaaatcataagaggtcatttgaggaacatgaatcttctgctttaggagtggagcctaaaaacacaaatttactccaatctacttctgggcttcaagagaaaatttcagcatcagtgatcagttctagtagtggcatcacacctaccattgttactgacaactttgatatttctgaggataaaaatggctgttcaataggtgtttcttctgttgattctcctgctttactagctgagaaggatttgaatatgtccacagtgaatactgaggagccattcaaggaaggggttaagtccgctttaggagatcaacacaatggtatttcttctggctctggacaaggaggggaaatgccagctgtcccaatggactcaaagattgccgtgtatagtggtactgtttctgctacagaaagggagaaattcaaggagcagcctaattctttgggttgtttgaccacaggagaaactcaggataaatcagatagtatggatccaaccacagcatctacattgggtggaaaggtggctgtgaagattgtaaaaactccactgaatgcaagtgatgatttgaatgcacatatgcaagatatagtgttaaatcaaggtacagattgtagttctggtactgtgccatctcaaggaaacgaaggctcaagcttattggaacctggtaatggtgatggaatctgcactggggttacatgtgggtccccttcagtgattagttgtgctgaatcctgtccccaagaaggtggacatggcagcactgctttacttcatcacacactatgtgggcaatctgaggatcctgaagatcatggggcctcagttgatggtatccagagctcaaaacaatgcaataccagaaatatagaatctgcacctggttctcaggagactagtgcagcaggaggtgatagaagcttctcatttgaggtgggagctccaccaaatgttgctgagaaagcccatagccctgtttggagccctttccctaaatacattacttctcagagtagcaagatggccacagaaaatactcaagctggaggttctttgaaggatactagtgatgatagtaagaaaatatctactgtggagtctggtaaagaacagctatcagaaaggaaagtaactgaaagttctgggggtggcctctcagacaactgcaatatagacgacatcattaagggtagaagttcaccgccgcggcagcatccaatccctgagtgttctgtttcttctgcagatttagtgaattttccattcacagatccacagcatttgcagctacgtgcacagatatttgtttatggagctcttattcaaggaacaccaccaggagaggcttacatggtggcggcttttggagaacctgtaggtggtggcaaacctacatgggaggctgcttggcgagctgcttttgaaagatttcagtataaaaaatcacctcatgtcagtttagagactcccacaagttcacttataggtagttctgtgcctgagaaagctagcaaaggtacagcaattacaactgtgccagctagcaaaaaagttggtaaaactgtggcgccagcacatcctgctgtaaccctacactctccaacttctgattttccttttggtagttctacatttaatctgcaacgaggcactcatctggattttagccaggcagtatcaccatttgcgtataattcacacatgagacatccgtctcctggtgttgccccctggtatacgcagagccctggtccacgccctgcagcctggttaattccaccacaaaacttaatatttgattcatcaatgcaaccggttattcctacaaatgaaactgcgaagggtgcatcatccaaaaacatatccgtttcacatactgtttcatctggtgttcttcccagcctggcaccttctattgtttcttctccaatagcagttgtgagtgatggaaaacagaaggctgcttctagctctaagcgtggcacaacatcacaaaagtcaagaaaaaaaaagaaagcttcagcaagttcagaacagcaacctgtaattgcttctcctcatctcaaaatgaacatgccatcttttactcctgccattaagcacacagcaggattgaccttatgcggtagcaagcctgttcctaacatgggccagattgcctctgaacataactaccagatcactggtggtatggatagtgatcaaagaatcatcttttcagaacagatccgtggtgcagtagaacaatcagctgcacaagctaaaagtgcaagcattgactcagtggaggcagttaagcacaaggagggcatatggagccatctatctacaatctcaaggaataagttacctccaaaagttgaagagaaacttacctcagttgcagctgctgctgaagcagcagtttctgttgcaaaggcagctgcagaagctgccaagatggcgtcagaggctgcattgcaggcaaaaatgatggcagatgaagctcttagctcttctatatctgtaatgtccatgcatcacgaagctgatcaatataatgtcattagcagtccgcctatcttgtcaagttcaacgccagcatcatctctgaaaaccaagaacaagagtcatgccccaggttccatcatttctgtggcacgggaggctgctagaaagagggttgaagaggcatctgcagctgcaaaacgtgctgaaaacttggatgccatattgaaagctgcagagcttgctgcggaagctgtgttcagggcaggaaccattattggaatgggagaaccactaccttttaccctaagagagcttttggaagctgggccgaatggctactggaagtctgcgagtgcgagaaataaatctggaagttgtaatgataatccagtaacagaaacattggaggtagatgcacctgctaactttaacaaatctggcagaaagcgcggtcggaaacctaaatatgatcaagcactaccaaattcggagccatcttcaagctgcaaagaattacagtcatatggaatacactcaggagtaggacatggagttgttgaagatgttcccattactgtgtcacctaatggtaacaatgttacatcaccaataaacattatctggaatggcattgaaaagggatctgcagttgaggttttatctgacaaaggtgggtttggagtagcttggttttctgctaaggttattgatataaatggaaataatgtttttgtcaactatgacaaccacaatggatctggtcctcatgaagaatgggtgccattgcgacaagagggggataagccgcctcagatacgtcttgcgcaccctgctaccctctcaaaattcaaaactaggaaacgactcagggaaacagcaggaagttgtttatgggttatcggagatcatgtagacgcttgggtcaacaatagctgttggcgagagggagttatttctcagaattatgagactgatgagacgaaatatgatgtacatttttcagttggaggtggtggtgagtccttagtagttgatgcttggagccttcgtccatcgcgtgtttggaaagatggtcaatgggtagagtggtcccatgcaagagaaaggaaatccaaatctaataagggcgattcacctcctgagaaacgccaaagaatcgacttgcttcaaactggtggcaatctatctgttcttggcgaagtggggggttcttcgaaggacaataatataaacaatgcaaaaaacccggaggaattaaagccattgtctttgtctcagggggaaattgttttcaacattgggaaaagtgtagttgagaataaatctgattctcttgcattcagacgtcctggactacaaaaagaaggatcaaaggtcgtctatggtgttccaaaacatggaaagaagaagaagtttatggaagtaagcaaacattatgatgcaggccaatctgacaagatttctgagggcaattcatctaacagattcgtgaaacatctgatgccacaattgccaaggccacgtgaaaatgcttccaaagttgaccctattagaggaaggagagtaggtgaaacaaggtctagattacctaaacctacgaagtcccacaatgttggagctagcagtgttcctggaaaggattccttgcctatgcaaatgcatgttccaaattctggtgtttctgaaaggagttctagttttgcaggaagttcgacaagcacttccaacaatgagaagcccacttcagaaaataataatccggtgcttggtgtgggccttagaactgaagtttcttctggtcctgaactgcaaactgcatctactgttcctagttccaagccaaatgtatccactactaatcgagctaaaaggaaatatgttcccactgtcagtaacacaaacagaggtatactaaaaacctctgaaaagtcgagttctgattctgctgagccccgaaggactacttctgattctgctgaacctagacgatctaacaggcgaattcaaccaacttcaaggttactagagggcttgcaaagttccctcgtaatctcgaaagttcctggcgagaaggttcataggagcaattacaaaagtgcatcctcaagagggagaactcaagctcatgggtgagtgaaggcaccacatagctcatagctgcttttggtgggatagctctcgtgtacatagctgtagccgtccagtatggaaggaggatagggttggagtaggaagtctttattggagcgcaaggattcagatgtattataaactagcttaagtgcattgtgttaaccttttcttttacttgctcgaattatacttttccgtgttgtagaatacctggaaatatccttttagtatgtgtggatacaccgggaaagaaattgggtgccgtttaaattcatccgataatttaa

SEQ ID NO: 93197 - DNA, 78 bp, Zea Mays
ctcgggcttcgctcgttcggatcgacaagtgataaaaaacaaaactcgggtacgatcaagcatgttttagtgaggaaa

SEQ ID NO: 93198 - DNA, 3037 bp, Zea Mays
caattgcttccagaaattctttaagctaccattgttgagtggatgtggaattaacatttctagagaaacaattatatgatggcgcatcctggatcaatactgaatatttaaatttgtggtccacagcttagctgtgctcttcatgctgtttttttgttacagattatcatggattctgtagaaagtatcttgttcagactttccatctgatgtccacatcagacttatgaaccatgagttgattggttcaaataattgtgtgtttctattcagcattgtagctttcatatttctactcatgatggttgattgaagtatgctgttttgcttatcctaacatgggaaatattctaattgttaagatacagtacctaaatgatgttcttacttgtatgattatattgtggtcctgtcaaatcacagtgagaaacttattttcattaaatgagtcacttagctgtgtaaagtaaatgttgtttccttcaggagcacagaattgctacacgtttggcatttttttctgtcagtttctcttggttactctccaaactagtttataaggcttagtttgacatggcatgatctaccaggttaccatttggacattcttttctttaaaatatattgtttataatatgaacgcgtggttgaagggcaggtctagtgcaatggtgaaatctttctcattgagtcgggtctgaaacagtttatatttgtgggcaaggcttgccttcgtttattcatttatggcctgttcattttcgtcacaatccatatggattggaggggattggttgggtttaaatccatagcgagttaaaattactaaaatttttcaatcccatccaacccatgtgtcataggaataaccgaataaggccttaccagtccccacaaccgaacaaggccttaccagtccccactcgtattggagcctttcacactgttcgtcattttttccccataaacttaacttacggttattggatacttcattggattagaaatccaaacatatctaatttatactataacggttaaaaaaatgccagccaaattactatttaaaatttgtaaagattgaatcttgatgcgtgtgcttgccttataaattggtctcgatggaatgctgattttctcatggtatgacttacatttgtttgcagtatctcatgaccaccgaacctcaaggatcacatcaacatggttcaaaacgtgatttgccttcatgccgaaaaaatgtgcccggcacatcatttgtctcagatttgagagatcacatccacgagttcatcaacgcctcttctgatgaacacatgacatgcttcacaaagactatcaagaagatgttcgggatgtcaatgactgtcgcacataaatcctcgaaagcagaggaagctgggcccgcatgactgcatctcaccatttcatatttgactaggtagcagccagtaaacatatcttgtgtagataacactttgtccacacttttgactgataagattatgtacacttttgactgataagattatgtacagttacatgggccatgtatgtaataattttactgtccaaataccaaactataaaaggagaggcacaagtctcacacaatttgtgtgcaaaaacaaagataaaatcccacaagagattctctcctgtagcaggatcattgtgttttttcattctgtttctgttcttatcctttttgtgtattatagacatgtctatctacaagtgcgtcactagcatgaccagaactgcacaaactaatctagccgaggcaggaagccaactgctccctcccgacgccatggaggagtcctgctggtaaagcgagctgaggctgaatcccgggttggacccatacagccactggacgccttcgatgtcgtcgacggtgagctccgccttcttttcccgcgggctgaggctcgggtacatgaccgccttgggtgacgacgagtgccccagcccgaggacgtgcccaatctcgtgcgtggccacggactccaagtcgacggccgagtgcaccgtttccgtgtccatgtcaaccgcccacctctctgcggcgtcgaggtggaggcgcccgttcttcggggagaaggcatggccgagcacgccgagcggtccgtcgaaggggatcccatcaccgtggctgcccacgtagaagcccaccctgatgtcggccgcctcgtagtcttcggtctcgacgaagcccacggggatgacccgcgcccaccgcgcgaacgcgcgccggaacaccgcgcgcacggtcccggcaggcaggtagtcgacggtggcggtcggcgagatggcgtacgtgagcacgagcgggtccggctgcgtccaccgcggctcacccttgaagaacgtgaaccggctgacggcgccgtccgggctcgccgccgccgaccccgagagggataccggcacagcgtggccgccgtcgccgacgccgcagcgcggggccatgatccggtccagcgtggtggagtcgagctgccccgtgaccggcaggctaagcatggactggtaccgccgtacggcggcctccatgtgcgcgtcgaacgcgtccgtcgtcggctcgtgctccgcccccgccccaggcatgtacccgaacctcgccaggtagcgcttgagctcgccgaggccctcaacgtggctgcctcgccgcgcgtccagcagctgcttgaacgagcgccacgcggtgccgtcctgccggtgaaccgtcgccgtcacgggcccgtcggcggtcacgtggaccaaggagacggggagggggccaagcaacaggaacagcaccgatacgatacgaggcgcgcgcgacatggcagcatcagagccaagcaagctgccccgttaggctatgcgcggggcgggcggttattcccgttgcaggccggcctagttgtcgcggaggcggcaaagaattttgtgctcgccgcacgagacgaaactaaaaggctgcggtgcggataggggaagcgggtcagacgatggcgccccggttggccatcggctgacctcgtcgtct

SEQ ID NO: 93199 - DNA, 2045 bp, Zea Mays
acgagagcgatgcatgaagtgttcgagtaacatcgaaggaaccctaattcgctaggccaactttaaaaccctagccgccgctcccagctccggagctgtctgttgccaccccgtccttggctaccgtagcagttcctattgaagaaaaaaacttcaccggtggatttcgtctggtatctcatgaccaccgaacctcaaggatcacatcaacatggttcaaaacgtgatttgccttcatgccgaaaaaatgtgcccggcacatcatttgtctcagatttgagagatcacatccacgagttcatcaacgcctcttctgatgaacacatgacatgcttcacaaagactatcaagaagatgttcgggatgtcaatgactgtcgcacataaatcctcgaaagcagaggaagctgggcccgcatgactgcatctcaccatttcatatttgactaggtagcagccagtaaacatatcttgtgtagataacactttgtccacacttttgactgataagattatgtacacttttgactgataagattatgtacagttacatgggccatgtatgtaataattttactgtccaaataccaaactataaaaggagaggcacaagtctcacacaatttgtgtgcaaaaacaaagataaaatcccacaagagattctctcctgtagcaggatcattgtgttttttcattctgtttctgttcttatcctttttgtgtattatagacatgtctatctacaagtgcgtcactagcatgaccagaactgcacaaactaatctagccgaggcaggaagccaactgctccctcccgacgccatggaggagtcctgctggtaaagcgagctgaggctgaatcccgggttggacccatacagccactggacgccttcgatgtcgtcgacggtgagctccgccttcttttcccgcgggctgaggctcgggtacatgaccgccttgggtgacgacgagtgccccagcccgaggacgtgcccaatctcgtgcgtggccacggactccaagtcgacggccgagtgcaccgtttccgtgtccatgtcaaccgcccacctctctgcggcgtcgaggtggaggcgcccgttcttcggggagaaggcatggccgagcacgccgagcggtccgtcgaaggggatcccatcaccgtggctgcccacgtagaagcccaccctgatgtcggccgcctcgtagtcttcggtctcgacgaagcccacggggatgacccgcgcccaccgcgcgaacgcgcgccggaacaccgcgcgcacggtcccggcaggcaggtagtcgacggtggcggtcggcgagatggcgtacgtgagcacgagcgggtccggctgcgtccaccgcggctcacccttgaagaacgtgaaccggctgacggcgccgtccgggctcgccgccgccgaccccgagagggataccggcacagcgtggccgccgtcgccgacgccgcagcgcggggccatgatccggtccagcgtggtggagtcgagctgccccgtgaccggcaggctaagcatggactggtaccgccgtacggcggcctccatgtgcgcgtcgaacgcgtccgtcgtcggctcgtgctccgcccccgccccaggcatgtacccgaacctcgccaggtagcgcttgagctcgccgaggccctcaacgtggctgcctcgccgcgcgtccagcagctgcttgaacgagcgccacgcggtgccgtcctgccggtgaaccgtcgccgtcacgggcccgtcggcggtcacgtggaccaaggagacggggagggggccaagcaacaggaacagcaccgatacgatacgaggcgcgcgcgacatggcagcatcagagccaagcaagctgccccgttaggctatgcgcggggcgggcggttattcccgttgcaggccggcctagttgtcgcggaggcggcaaagaattttgtgctcgccgcacgagacgaaactaaaaggctgcggtgcggataggggaagcgggtcagacgatggcgccccggttggccatcggctgacctcgtcgtct

SEQ ID NO: 93200 - DNA, 162 bp, Zea Mays
gttcttgcattggatatctgataatcacaaaggtattgtttttaatctttattctacagctctgaagtccatatctatgagactaatagcctgcatggatcaagcatctctacctaattatttctctcagtggcccatacttatttcatcatggtataaaaa

SEQ ID NO: 93201 - DNA, 1685 bp, Zea Mays
tctgctgctaactgcgtacacacacagacctctccctctccctcccctccctcgccgccgctgcccagtgcccactgctcgccgctagaggaatctgagagagagaggggaaagggcgaaggaggcgcaggcaggcatgggctccccttcctccctccccgccgcggcggcgctcgtgctcctggccctgctcgccggagcccagtgccgcgaggcccagttcgacgccgcggacgccggcgcggagaacttcaacaccagcgaggccgccgtgtactggggcccctggcagaaggcccgggccacctggtacggccagcccaacggcgccggcccggacgacaacggtggtgcgtgcggcttcaagcacaccaaccagtaccccttcatgtccatgggctcctgcggaaaccagccattgttcaaggacggcaagggatgcggctcctgctacaagattcggtgcaggaaggacccgtcctgctccgggcggacggagacggtgatcatcaccgacatgaactactacccggtgtccaagtaccacttcgacctcagcggcacggcgttcggcaggctggccaagcccggcctcaacgacaagctccgccactcgggcatcatcgacatcgagttcaccagggtgccgtgcgagttccctggcctcaagatcgggttccacgtggaggagtactcgagccccgtctacttcgcggtgctggtggagtacgaggacggcgacggcgacgtggtgcaggtggacctgatggagtccaagacggcgcgcgggccgccgacggggcggtgggcgccgatgcgcgagtcctggggctccatctggcgcatggacaccaaccaccgcatgcagccgcccttctccatccgcatccgcaacgagtccggcaagacgctcgtcgccaggaacgtcatcccggccaactggaggcccaacaccttctaccgctccttcgtccagtacagctagctagctggtttgcgccctcgggccgctcggtcaccaccacccaccactactaccaccaccacccactagactactgcttctgctaccaaatactacggcggaacggaacggctggttgccgccgccgccgtcgtccttggaaaggttgaggcgtctcttggtcatccgtatcgttaccgttgtcatggtcctttgagtcgttgcaaccctgattgcaagccggcaagggggaaaaaaccaacaaagccgtgtgggaaaatggaggaggcaggcgtacaatgtacgctctcccgcccactgttgctttataatctctatatcatcatcatcttcttcttctccattccgatcggtgattaatcgaaaagtatattgtaatgtataaacaccatttcctgtttcccggagctgagctaccctgttcacacccctgtgcagggttgaggcttctgcatgttaattgttctttcgtcactaatgttttcttctgtgacaatgacatggaatgtcgacggttggcttgagcattcagcatcgctgagctgacggggagaaaactcccataggcacaccacacccccacatctcccatcccatgtccggtgccatatggggaggaaactccatatgccgtatattaattatgttatttatttgtgatattaatattcatttaacctttctaatatgataccaatgt

SEQ ID NO: 93202 - DNA, 1303 bp, Zea Mays
ggctaggacggctgcgaggccccggctcgatcgactagccagtccaggccatgtgcgccccaaccaacatggcacgttctccctcgctcctcctctctgctgctaactgcgtacacacacagacctctccctctccctcccctcccgttagctagcgggccgacgcccatctggcctataaattggcccacacggcaccacccacccaccactgctcgcactcactcacagtcgccgccgctgcccagtgcccactgctcgccgctagaggaatctgagagagagaggggaaagggcgaaggaggcgcaggcaggcatgggctccccttcctccctccccgccgcggcggcgctcgtgctcctggccctgctcgccggagcccagtgccgcgaggcccagttcgacgccgcggacgccggcgcggagaacttcaacaccagcgaggccgccgtgtactggggcccctggcagaaggcccgggccacctggtacggccagcccaacggcgccggcccggacgacaacggtggtgcgtgcggcttcaagcacaccaaccagtaccccttcatgtccatgggctcctgcggaaaccagccattgttcaaggacggcaagggatgcggctcctgctacaagattcggtgcaggaaggacccgtcctgctccgggcggacggagacggtgatcatcaccgacatgaactactacccggtgtccaagtaccacttcgacctcagcggcacggcgttcggcaggctggccaagcccggcctcaacgacaagctccgccactcgggcatcatcgacatcgagttcaccaggtcggtgcctctctctcgatttcatttgttttgtgtgttcagtttccgtaccgtatgacagcagtacagtactagtttcttcaatacctactgttgaatttggaggtagtagagagagcggaggcggcatcatctgcccaaccgctccgctcgccggacactgcatgtgcggcaaagtggcgcacctgccaaaggccacttttattgcacagcggccggcccccgaacatgctcatttttggctactagtgggcgcaaccccttttgcagcccccaacgtatctgctgcgtgcatccacggttgcaacgcaacacgccaccggcggtgaccgaacgccagccctccttccgctttctcttgtatagtaccagccctccttcggcagtagatttagaggctggctgagcaacacttgcagattagatagacgcagcaaagctctttctttgcatcgattcggttctgtgctaccgctactac

SEQ ID NO: 93203 - DNA, 1313 bp, Zea Mays
aagccatgtgacccctacgaaagaaacgtcgggtgcaacggccgttgatggcgatcgcagccggccgctatgcgttccttcgattcacttcctgcctgcctataaataccacggcaaggttgctcttcctcggccatcgagacacacacagaacttctcctgtcggcctactaatacagctagctagctgccctcttaggtatactgtgatggccacaaccttgtcctccacagtagtagttgcacttggtgcacctctcttcttgctccttgtaacgtgtggctcgtgcgcgaggccggtgagctttaacgcctccgacctcaccgccgatcccggctgggatgctgccagggccacctggtacggtgcgcccaccggcgccggccctgatgacgacggtggtgcctgtggattcaagaacgtgaatctgccgccgttctcggcaatgacgtcgtgcggcaacgagcccctgttcaaggacggcaagggctgcggctcctgctaccagatacgatgccaaaaccacccggcctgctccggcaacccagagacggtgatcatcactgacatgaactactaccccgtggccaagtaccacttcgacctcagcggcacggcgttcggcgccatggccaagcccggccgcaacgacgagctccgccacgccggcatcatcgacatccagttcaagagggtgccctgcaactaccccgggcagaaggtgacgttccacgtcgaggagggctccaaccccgtctacttcgcggtgctggtcgagttcgaagacggcgacggcgacgcggtgcaggtggacctcatggaggccaactctgcgtcgtggacgccgatgcgcgagtcctggggatccatctggaggctcgactccggccaccgcctcaccgcgccattctccctgcgcattacgaacgagtccggcaagacgctggtggctgaccatgtcatccccgccaactgggtgcccaacacctactaccgttctatcgtccagtattagccgctcccagctgctgcgccggccggataataatatacaattctgtgtcattgtgctttactattagtttggtattagtattgtatttctgcatgggactgatgaggcacagagctgaagtgaggtgcctcactccattgctaatttgctactaggtgttaagttggtgtgcggcttcagggagttgaagactgggaagtggaggaagcagtgctttttcccgcccattgtcgtgaatgcatgtaccagtgcgattaagattatataaattatattgacagtattctgtgtgccata

SEQ ID NO: 93204 - DNA, 1760 bp, Zea Mays
ccctgccgcgcgctcctttctgcaccgtgcccctggcccctttgcccgagctcgtccatagccggcttcgagctcgccggcgttcggaccgtggcttcctcctccagctcggcgcccatctccctcctctgctcgactttcttcctccctgccgagctcctgcttcccctccgtggagcaccccccctgcgccctgctcctgctccccgagctcgcccttctctcggcttcttcttcccacttcttccagccgcgcccctcagctgcctgctctgctcgccgcgcgcgctcctccctaccgtgttcctgctcggtgcccatctccccgagctcgcccctgcgccggtcgcttctttccctgctccagctcgccgtgtcgtgcggtctctttctctccctctctctctttctctctgtgtgtgtccctggattgctcgcatgtgtggccggagtcgctcaccttgatctctgcgcccagctcctgtccgcggcgtcgcgcgccgtgcgtctcccttttgtcaacccggcgtgggctctaaccgtcagctgagtgcttgatgctcgtgctcggtcatctgcagcagttcacttggtgtcagctcgccgtggtcattgtttgctgctcgtggccgtcgtctccctctcaacatccacgtggacgctccctcgccgatcgccctcttcggagtttgctgaacgccgctcccagtgggaaagctttgcaagttcgcgcgtcgttgccctctatcgccggatgccatcctcatctcaccacctcgttgcagtgccgttgttttcctcgtccagtgctcgcacgaccttgcccgaaccgtgctgctgtctcccaaccgcttgcccttgccccctgcacgtgcttgtcgcgctagtcaaccccacctcggtcattgtcatcgatactgcgcttgccggtggccgaagctcgcgtcgccctctccctcactgagtttgtgtcctcgccctcgccggagctcgcgctaacctgctcgaccccacctcactagttcgctctagactcgatctcgtcgtcgttctgtatgtcattaagaaatctcatgggtcaggcgaagacgaagctaatagcgtgatattcactaagtgctcgacaaaaagctcgaacaagtcgtcgatcgtcatcctcgtctacgccaagatccgagaagattaggcgcagaagaaaataaatcagtacgcgatcggagaattctcgatgtggatgaagatgaagcgcgattcgacgcagcactcaccctattttcggtgaaatgttgagctgaaaggcatcgtcgatttcgtggtttcaagtcggatttaattgatggtacgtgaattaaccacgtgatacggagaaccagagccgagtcgaccacaagataatgttacgcgtgagcttttccacaagatgatgttgacggatgaaactaaagatggacagacgaagcaagtatcagaacaaaagctgatcgccacttaacaaacactaacgtagtgtttattccaagcaagcctcggtgcatttgccacctccttgctgttttaaaatctttatcaccttgtttgatgcattaggtgataagagttgtgtactaaaccgttgatgcatttctttccttgaaaaattgattacccatccttgataccctttttgagaagaattttatgatgcttagccttgctttagaaaacaaaaaaatgttttgttttaaaacaaaagtgatgtttcagtggttggaaatgttttc

SEQ ID NO: 93205 - DNA, 261 bp, Zea Mays
aaatcgcatatcttttcagattcagtttgcagaatttgaagggcctatttattctgtggaaggtcttacagatagggattatggtttagtttattcagtatgctaatttgcatccattagtaagtaacctagaagtacttttgttttcgttcctaacggccgtgtaaattaaagcttgtttatgctctttgtaacattagaattgtagcttgactgcagaacttgagaaatgaaatgtgcaatgttctagttgcaggctct

SEQ ID NO: 93206 - DNA, 1218 bp, Zea Mays
ccatttccctgtcctgtgtctgcctataaataccaccccagtcgatgccctccacctcacacaccatcgaaacacaaaccagcagcaggcagagcaacgactagctgccaggcaagccggccgggggtgctgcaagagtgcaacaaacaatggccaccgcgctctccttcaaggccttggcactggccgcgctcctctccatggtcgtcgcctctggcgctcgcgccgagcaacagttcaagcgcaacgccaccaccgcctcgcaggacagatccttgttgtcctacagcagtggctggctgccggccaaggccacctggtacggcgcccccaccggcgccggccccctcgacaacggtggtgcgtgcgggttcaagggcaccaaccagtacccgttctcgtccatgacgtcctgtggcaacgagcccatcttcaaggacggcaagggttgcggctcatgctaccagatacggtgcctgaagagcaaccacccggcctgctccggcgtggctcagacggtgatcatcacggacatgaactactacccggtggccaagtaccacttcgacctgagcggcacggcgttcgggtccatggccagctggggcctgaacgacaagctccggcacgccgggatcatcgacatgcagttcaggcgggtgccgtgcaacttcccgggcctgaccatcaccttccgcgtccagcacggctccaaccccatgtacctggccgtgctcatcgagcacgagaacaaggacggcgacgtggtgcaggcggacatcatgcagagcaactccggccactgggagcccatgcacgagtcctggggctccatctggaggatcgaccccaaccgcccgctccgtggccccttctccatgcgcatcaccaacgagtccggcaggcagctggtggccaagaacgtcatcccggccaactacatccccgacgtcgactaccgctccttcgtccagtactaatgatcgagctagcttggtcattgcttaagcgtttaattgtttcttctttatttaattagtggctgccgttgccgacatgcatgtgggggaaattggaggaggcaagcatcaatgcaatgtgtgctctcccgcccactgtcactataccgttattaattaccagtgtgtaaccagcaaatcatactacatatatggttatataatttcatactatacagtataatgctgtctggcctgt

SEQ ID NO: 93207 - DNA, 892 bp, Zea Mays
aaaggcgatgtgaaaatcggctctagagctgttttgagtgttgagagccggagctaaggaaaaccggctcccaacggctccgcatcgctctcgtgctttttgccactgacagctacatgcggatgggggctgtgcttcgtgaagatctcggcggcagcggcgggtcacatctcgacgccgacagcaacgggggcggcgtggagaagggtagcaagaagccacggacataggcagctccatcccgatggtgcacaagactggccttgtacgtgagggaggcagtaggagtgtggccattaagaagacgcgcattctagctcccgcgcgtagccgtgctgcatgaaggtgatgttgtcgcaaaggcgctgtcaaggaacgcggaggcctgggacagggcggcggtcatggctcattgcaggcgcgtcgcgggatacgtgcataaggtgatcgtggaaatgtctaaaggggaaggagttgttttgctaaacagtttgtcctataaagaagttacttccgtagaggagccggagatggagcctttttatgaggagctggagctctgcgaaatagacccttagtttaggacactgagtccttgttcgtttgtatcagattggagggtcgaaactatttctagccggattgtttctctaatttatataaactttgattagctggaacgattttaggtgtaatctgatgtaaacgaacaaggtctaagacaaatcagtgttggagatgcttatagcaagctacatggtgaacttatcatcgttcactccatcagacaagccagcagtgatacctatatagctttcttatgtggacgccgactcccatttgcttacacaaacgccgccgccaccccctccccccgccaaaaaaagagaaa

SEQ ID NO: 93208 - DNA, 114 bp, Zea Mays
tatgcgccgggcttttcgggtcagcacgaacacggttgtaacactcaaaattgtttacaaggaataaatagcgaattccctattgtatgtgccttatctgcatcataaaaaaaa

SEQ ID NO: 93209 - DNA, 2738 bp, Zea Mays
taactcctttcccctatccaaggcaacgaatcagctgcacgaccgccgaatcgccttgccatgacaaccgcagcggcagtggagccggcgccgctcgtgcgggcccgcgcgtgcgcggcctccgcttccttcccgcccccgcgccgtcgaagagctgctggagctatcagggcatctcccgtaccaggccggacggaagccgccgccgagctccccgccccgctccagccaaacgcgcggcggcggggacgcgacccgctctggcacggcggcgggttcagcctcggcgtcgacctcggtgacgcccgcaccggcctcgccatcgggagggggatcaccttccctcgacccctcactgttctgaggctccgcgggcagaagctagagcttgcgctgctcgacgtggctcggcagcaggaggcggacgagctcatcatcgggcttcccgtgtccgctgatgggtcggagacaccgcagtccaacaaagtgcggagcgtcgtcgggaggctcgccgtccaagctgcccaaaggggcttgagggtttatctgcaggatgaatatggaacgtccacggacgccctagattacatgatctccaggggtgtcaagaagtctgctcgtgacaccaaatctgatgcatatgctgctgtgatgattttgaagagatatttcacgtcttcaggtcgaggggctaagattgttctccccaggcaaccagagttacaggacaagctaatggttcagtctagacaagatgctgaagtttagagaggcatgtcttctattttctccatagtagagaacatgtccagttgagggcacctcattttctataccatgtcatccgctgtgatgtagatgattgtttgagatattgtaattgtactgcatcaaaaacacaagctgtttttaaacctggtcctgtttgcaaattgagtatcatcccaaaacaaaactcagtaacatattcattgttgcatttcatgattttttcccctgggtatcctacctagattacttctttctgaactctagtgtaacttagctctgttaagcaaatctgtgacatattttaccttatatagcactttatcagatcatgtatttacatagtttacatcatggagagtgcaaaaaagaatttgctcaaaaatagtctggacagtccaagtgggcatgaaataaggtacgtagtacttcacaacaatcccctatcccgtctcatgcagcaaatatgctttttttcaattcagtacaactgacctgtctttcctggatctgcatctatcatggttgctgcaggcaatgtttatacattactatgagtacacaatggaatgcctgagcaaaaaccaccagcatcaatcgagaattaactgatccggatcatctgttcatatggtgatgaagcatcccaaatctgtgcgtaaaagaatcagtacagcttgctgaattcagtctcctgtgctggttcaccaatccgggggaagaatgaatccctctcaagcatcgtctgcagtgagtccatcatcctcaccatggatgcccacaagattggcgcagagcaaaatgcatatccaaagaccgccagagccctcacaacaccatcatggtaccatgggaatgccataacgatgagcatgcccacaattgcaagccacgttgtaagcacatcaagtggcgggagcagaaaaacattgataacgagcactgacaaggcaagcgcgccaaataggtagacggaccagcccatgatcgggtggactgtgcgtgggaccacaaagaatggaatggaatatgcagccaccatagccgcaattgcagccagcttgatcagccactgcaccagggcactttgcttctcaggccgtcggttatagcacagtttggtgatccctggccttgccaatctggtgactgctatgataactatgtacatcaaaagctccatcagaatcactggcatttcagcagcatacctgtgaaatgtaagcaggtaattgtttagtggatagaacataaaatgaattttctgtcggctcaggtacacatatttgcttctgtgctgttttattgactcacccaagatcgtcccagcgctgcttgtgccaggaaagacctaatggcaagaccggccaggaccaccagtaccaaggtttaaaccaaggtgcgctggggaatgtgatgacactgtttggcccacaggggacatgccaatgtagcttgagatctgcagtgttaaatcaaaagggtggttgaaattttcagaagcaatagctgcaggcaggtgcattggtattgaagctgtgtagctgcagcactcacagtagtatgacgcatccatttgatagccaagaggaaggcgataggtcccattgagctttgtgccattctcaggagggtgaaacattggtttgtcgagcaagtctgggtagcacccaaccaaaaagccttggtcagcaccatcagagttttcacggccagtctccaggtcatgaagcatgcttctgaatacatcaatagaaggctgcagattgaagaagagtccaatattagtctggttggccattacatgtctgagcacaacatatctcagtgtgtgagtttaacaagaatcaagttatggatggtgggaattttcttttcaatggatcattcatactggaagaagacgtatacttcagctttgggggtcacaagtggaacaacgaaagttcagtacatacctggagcacgaa

SEQ ID NO: 93210 - DNA, 934 bp, Zea Mays
taactcctttcccctatccaaggcaacgaatcagctgcacgaccgccgaatcgccttgccatgacaaccgcagcggcagtggagccggcgccgctcgtgcgggcccgcgcgtgcgcggcctccgcttccttcccgcccccgcgccgtcgaagagctgctggagctatcagggcatctcccgtaccaggccggacggaagccgccgccgagctccccgccccgctccagccaaacgcgcggcggcggggacgcgacccgctctggcacggcggcgggttcagcctcggcgtcgacctcggtgacgcccgcaccggcctcgccatcgggagggggatcaccttccctcgacccctcactgttctgaggctccgcgggcagaagctagagcttgcgctgctcgacgtggctcggcagcaggaggcggacgagctcatcatcgggcttcccgtgtccgctgatgggtcggagacaccgcagtccaacaaagtgcggagcgtcgtcgggaggctcgccgtccaagctgcccaaagcaggggcttgagggtttatctgcaggatgaatatggaacgtccacggacgccctagattacatgatctccaggggtgtcaagaagtctgctcgtgacaccaaatctgatgcatatgctgctgtgatgattttgaagagatatttcacgtcttcaggtcgaggggctaagattgttctccccaggcaaccagagttacaggacaagctaatggttcagtctagacaagatgctgaagtttagagaggcatgtcttctattttctccatagtagagaacatgtccagttgagggcacctcattttctataccatgtcatccgctgtgatgtagatgattgtttgagatattgtaattgtactgcatcaaaaacacaagctgtttttaaacctggtcctgtttgcaa

SEQ ID NO: 93211 - DNA, 1681 bp, Zea Mays
gtgctggtctgcctttttcttgcaggtcgggggtgtaagcagaggtggtgagccttcgcatggtgggggcagaggtctaagccctatgtatcatcctcttacatggaatgcaggaattacatcaccatgtggtagaggacgagggcatggaaacaagagcagtgataggcagttagcccttggagcatccagtggatcatctgcatcagaggctcagcccggaacagtgtgtgcaccagcacatgtggtgcaagctacaaccatcaatttcacacggggtactgtagttccagctgcttggtgtgatctatgccgagtggggtgtaatagcaaggaaatcctcgagcagcacaaaaatggaaagaagcataaacggactgtgcagagaatgcaaaattttgctcgcctgcaaggtatgactccagctatagctgacatgggtgcccgttcatcaacatcttctcagttggctgaagtagaaggcccctgcccctctaatgcagtacatatggtcccatcgattggttcaaccagctttggtggagagcacaaagacttggctactgaaaatgttgtagcttcagtttctggagtgcaaattactgaggtgacatgcagttcttccaagcaaaacacagcacatcatacaacagcagttggtcacagtgtccaagcacacgtagaactgcatgttgcggttcaagcttatcagccttcgaacgagatgaaagatggcggtgaagctgcaccaaatgcaacagttccatcaaatgcgcaactggtggaagcaaggatggatgtcaatggcaacaagactggcccaaagaggaaacggacaagagtcggccgtgggggaaagaagctgagagtgtctgaagcccgacgtcaaaggcctgagcgagtaagggagcaaccgctagtctgcaacatttgcaacgtgacttgtgatacaagagctgtatttgacatccatctaggtggcaaaaagcatcaatcacgactcaagcgctctcaaggcccagatatgttgttcggtcctttggttgcgcgtgttcctccaaaccagtcagcagcacacatgacaggagctcttgaaccactgtaccatggcttgggagctcctttggttgagcaggagccacatctggctggcacgatgcagcacgctttccccgttcttccacaggctgctccaaccattcacggctgctgattatcctgcacaaccggtgactgcagcaatcagtgctgctagcaatggaagacctgtaaactgcatcactgcgtacagccactgggcaaagctgaagtgaaataggcgtatccacatgtgccccccgcctgctgtctgtactgcctcacaaatttcagtacttgtcggtggagactggagatggagagcagcctgtagtagtagtactgaacaaactgaatgtcagatgtaaccatagaacctacgtctcctagtttctgcaaaatgcacaaagtttccgtttctacagacatgcgttcaacatccaccgagttgctggtagtacaatcatagaacagtttggttgacatagacttggtgttggtgttatgcaatggtgtatgcatggctgcaaaacagtttttaaggtcagcctccacggctccacgggaagttttatgacataattatcaaaactgtcatattaga

SEQ ID NO: 93212 - DNA, 1669 bp, Zea Mays
cgagtatttagtctccttgaacaatgcactgatagccaattagccgaagcttatatttattaatttattatcctaataatatattattcgatccccatatttatctctctcgtacgtgcccatggagtcctacggcggcggcggcggcacgcggacgtcggcgtcctcgcggcgcccctgcacggcggcggcggtgccctcccgcgccggctcgggcgccttcgcgtacgacggcatgcgcgccacgcctctgtccacgtccacggccaacttcacgcgctccctccgcaaggcggcctccttcgcgcacaagaaggcgccccccagcgccgacgcgccgccgccgcggcgcgcgctgagcagcaaggagaacagcagcagcgccaccatcggtgcggcgtcgaaggaggcgctactggagtcgccgcaccggccgtcggtgccggagcctgcatccgccgtgaacggtcggccctgggagccgacaaggcggaggcggagcaccgggacggtggtgaatgaggcgggcgcgctgcgggagaccgtggcgccgcgcaggaagcaggagccggagccggagaaggaggaggccgcgcaccgggcgcgcatgctgacggcgcggctgctgcagtggcgcttcgccaacgcccgcctggagaaggccgtgggccgcgccacctccgccgccgagaacaagctgttctacacgtggctgcgcgtggcggagctgcgcaacatccaggcggcgaagcggatcgtggcccagcggcggcggcagaagctggagctggcccggctgctccgcccgcagctgcccctgctggccgcgtgggaggccctcgccaaggcgcacacggacgccaccgcggacttcggccgcgtcctctccgccgcctgcaccaacctcccgctagccgccggcgcgcgcgccgacgtggacgcgctgcacgaaaccatgcgctcctgcgtgggcaccgtggacgagatcgaagccagcatcaccgacgtgttctacgccacggccggcgcggcgagcggcgcgctgggcgagctcgcgcggacgatccagcaggagatggagtgcctggaggaagcgacgcggctgtcgagcatcgtcaccggcttgcagatgcaggaggtgagcctccgggcaaatctgatgcaggcaaagcagaggaggattggcctggggctggggctgggaccggccgcaccggcgctcgcgacttctggctggtgtttttgatcggccggaccagacatgaacagaagcagagtacaactactcacccactataaattaataaggaaattgattaaggtgcgagacttgtgtgtttcatggcgaagggcaagccgctttgattcgacgtgtgtgcttagcgtatactacatgcatgcgtgtgtctgcaataataataagttaatagtggtagtagatgatgatgccgagaggggatcgagcatatatttctagctagtgaggtgtatttattcatttcctcttggtgggggctttcagattatattcatttcgtgtttatgtatggatgctgtttgagttaaattcgctggaacctgtgctcctgtgcagactatgtaattcaagttattcaaatacttacgtatttatgaactcaatacatcagtcataaacgttgagctgtgt

SEQ ID NO: 93213 - DNA, 714 bp, Zea Mays
atggagcgcaaaaacagccagcgcagcaggtgctcactgaggtcgataataaggccggggctgcgcagatccggggctgctgctcggaggaaaaagtgcacacgcggcggtgagcagcaggtccacagcgaggtcggagaggcagccaacgttgaggaagatcgagccactggcatggatctcggcgtctggtgtggggatgtttcctgccgctgccgtggggaaccatggaaaggaggaacagggggcatgatctcccgttctggcttttcgtcgagcacatggggagcatcgctctgggcttttcttcttcttccatgtaacctccctgggcgcgacgcaaggatcggacagcacgcgaggctgacggggtctccacaacgacggaagagaggttgtggccgtggtgatgacgaggtcgacggagagtatggcgaggacctaggacgtccatggagggaggtgctgctgtttcctacgccatgggagaggtcggctagggcaaccataggaagtagcaagggaaggggtgtgtccagggagatggctcggtcaccagcagagaggggctgggcgagctcctgcagaggggagtacgccgagcagggggagccgccatgggcgaggtcaccatgggaggaggtgagggcgcagctggctgccatctatggagagctagagacgttctgtgcatctaacagcagggagggatga

SEQ ID NO: 93214 - DNA, 185 bp, Zea Mays
tttttttctgcagttcctagattatgtgttgtgtctctgtcgtcatgcatacttactcatctgcactggctggctgcagaaaccttaattattagcttttttttctccggatgcatggatcgacgacactgcagggctaacacacaaatcatgcatgtgcatagtacaccgatggatatgcatgg

SEQ ID NO: 93215 - DNA, 105 bp, Zea Mays
ataaactatttatggtcaacaataactcaagagaagttaaatggcttggcgattctatatatcgaaaaaagttgttggatgagattgatctcgatgatataaacg

SEQ ID NO: 93216 - DNA, 547 bp, Zea Mays
tttttgtttagtgtattatataattcatttcttttacaggtgcaatgaatcatggcaactggccaacttttctctaaaactacccaagcattattctacaattacaagcaacttcccatccaacagatgcttgatttagacttcctttgtgggagagaaacacctcctgtgcttgaataaccaatcctggttcttatgatttttagaaacttttctttggacaagtggaaattgctattccagttcatcccactattaaagttgtctacagtgcacacccaacagctgatgtatttatcaactttgcatccttccgaagtgttgctatgtcttcaatgtcagctttgatgtgtccaacaataagggttgtggccattatcgttagtgtgtttctgaatcagatgccgagtaactaatttgttatgtgtctgctaataacaaggttatcatcggacctgcaacaattggaggaattcaagcgggtgctttcaagattggtgataccacttgaaccattgtttacataatttagtgtaagctttgcaaa

SEQ ID NO: 93217 - DNA, 102 bp, Zea Mays
aattacttggagctgtgaatcaacaagaaatttttattggtcgacatttgctttgtgtaggctaccagtgtgaactgggaatacattctactgatatttgtg

SEQ ID NO: 93218 - DNA, 227 bp, Zea Mays
cagaccgtcctccttaacatggcagtggaccaattcctagcatttagcttgccctcatcactcttagcatcccaaccaaatttcaacgcaaatggctctaggaaatcaattaggaaattccttagaaaactaactcttttagagcagcaacagccatcatcccatcaatgtgtagacttgtcgtggttacgtgtgcaagcacaacatactcagtctcacccttgtac

SEQ ID NO: 93219 - DNA, 118 bp, Zea Mays
tttttctttttttgccaatcattttctactatgttcaaacaggacctacggtaagacccggtttcagaatgtaaaccgaatgcgaaccatgtatgtgccaggatcagaactcacatac

SEQ ID NO: 93220 - DNA, 2233 bp, Zea Mays
gttcgagccccgatcgagccgacgaggccccatccccaacccctcatccatcgcttgctctctgccctctgggagctcgagcctcctcggttgaattgtgagtcgagctgctgagaaagacaagtgcgcgcgagatggcctccgtcctgccggatactgcgtcggatggcaaggccttgacggacgcctgggactacaagggccgccccgctagccgcgccaccaccggcggctgggcgtgcgccgccatgatactaggcgcggagctgttcgagcggatgacgacgctgggcatcgcggtgaacctggtgccgtacatgaccggcaccatgcacctcggcaatgcctccgccgccaacaccgtcaccaacttcatcggggcttccttcatgctctgcctcctcggcgggttcgtcgccgacacctacctcggccgctacctcaccatcgccatcttcaccgccgtccaggccacgggggtgatgatcctgacgatctcaacggccgctcccgggctgcgtccgccggcgtgtgcggacgccaagggggcgagccccgactgcgtgccggcgaacgggacgcagctcggggtgctatacctgggtctgtacctgacggcgctgggcacgggcgggctcaagtccagcgtgtcgggcttcggctccgaccagttcgacgaggcgcacggcggcgagcgcaagaggatgctgcgcttcttcaactggttctacttcttcgtcagcatcggcgcgctgctggccgtcacggtgctggtgtacgtgcaggacaacgtgggccgccgctggggctacggcatctgcgccgtcggcatcctgtgcgggctgggcgtcttcctgctgggcacccggaggtaccggttcaggaagctggtggggagcccgctcacccaggtggccgccgtgacggccgccgcctggagcaagcgcgcgctgccgctgccgtccgacccggacatgctctacgacgtggacgacgcggccgccgccggcgccgacgtcaaggggaaggagaaactgccccacagcaaggaatgcaggttcctggaccacgcggccatcgtcgtcgtcgacggcggcggcgagtcgtcaccggcggcgagcaagtgggcgctgtgcacgcggacggacgtggaggaggtgaagcaggtggtgcggatgctgcccatctgggccaccaccatcatgttctggaccatccacgcgcagatgaccaccttctcggtggcgcaggccgaggtcatggaccgggccctcggcggcggctcgggcttcctcatccccgcgggctccctcaccgtcttcctcatcggctccatcctgctcaccgtgcccgtctacgaccgcctcctggcgcccctcgcccgccgcctcacgggcaacccgcacggcctcaccccgctgcagcgcgtcttcgtcggcctcctcctctccgtcgccggcatggccgtggccgcgctcgtcgagcgccaccgccaggtggcctccggccacggggccacgctcacggtgttcctgctcatgccgcagttcgtgctcgtcggcgcgggcgaggcattcacgtacatgggccagctcgccttcttcctgcgcgagtgccccaagggcatgaagaccatgagcacgggcctgttcctcagcacctgcgcgctcgggttcttcttcagcaccctgctcgtcaccatcgtgcacaaggtcacggcccacgccggccgtgacggttggctcgccgacaacctcgacgacgggaggctcgactacttctactggctgctcgccgtcatcagcgccatcaacctcgtcctcttcacgttcgccgccaggggctacgtctataaggagaagcgcctggccgacgccggcatcgagctcgcagacgaggagtctattgccgtcggccactgatgctgctgccagtgccacaaccctgcatgcatgcgtctttccttctctttttttttttatatatgttttgaacttttgatgacttgttttggcctgaaatcggtggggccgccaaggggggccatgcgtgatgtattttggcacacggtgtgaccccgtcgtacagacgcaggtcgagctaattaacgtgtacctaaggggtgaaacaaatgtagatacaaatatacggcctaataagtacgtacctaatagtggtatacgtacgttgtattctgcttcttgaaatgaatgacagctagcgttgctgcgct

SEQ ID NO: 93221 - DNA, 2065 bp, Zea Mays
agctcgcctataaaaaagcagctcagacatccgccagcaagcaggcaaggcaacatattgtaagcgcgaccacccacgcccaactctcctgctagtataaggtgctcgagctcgagcctccccgtggcagcaactaccagtaccagcagcagctgcccggcgagagaaggaacattcagtcatggccgatgttcagccggaatctgggccagatggcaaggctctgatggacgcatgggactacaagggtcgtcctgcttcccgtgccaccaccggcggatgggcgtgcgccgccatgaccctaggtgtggagctgttcgagcggatgacgacgctgggcatcgcggtgaacctggtaccctacatgaccggcaccatgcacctcggcaatgccgctgccgccaacaccgtcaccaacttcatcggcgcctccttcatgctctgcctcctcggcgggttcgtcgccgacacctacctcggccgctacctcaccatcgccatcttcaccgccgtccaggccacgggcgtggtgatcctgacgatctcaacggcggctcccgggctgcggccgccggcgtgcggggccgcgagccccaactgcgtgcgggcgaacaagacgcagctcggggtgctctacctggggctgtacctgacagcgctcggcacgggcgggctcaagtccagcgtgtcgggcttcggctccgaccagttcgacgaggcgcacgacgtcgagcgcaacaagatgctgcgcttcttcaactggttctacttcttcgtcagcatcggcgcgctgctggccgtcacggtgctggtgtacgtgcaggacaacgccggccgccgctggggctacggcgtctgcgccgccggcatcctctgcgggctggccgtcttcctgctgggcacccggaagtaccggttcaggaagctggttgggagcccgctcacccaggtggccgccgtgacggtcgccgcctggagtaagcgcgcgctgccgctgccgtctgatccggacatgctctacgacgtggacgatgtggctgccgccggctccgacgccaaggggaagcagaagctgccccacagcaaggaatgccgattgcttgaccacgctgccatagtcggcggcggcgagtcaccggcgacggcgagtaagtgggcgctgtgcacccggacggacgtggaggaggtgaagcaggtggtgcggatgctgcccatctgggccaccaccatcatgttctggaccattcacgcgcagatgaccaccttctcggtggcgcaggccgaggtcatgaaccgggccatcggcggctcgggctacctcatccccgcgggatccctcaccgtcttcctcatcggttccatcctcctcaccgtgcccgcctacgaccgcctcgtcgcgcccgtcgcccaccgcctcacggggaacccgcacggcctcaccccgctgcagcgggtcttcgtcggcctcctcctctccgtcgccggcatggccgtggccgcgctcattgagcgccaccgccagaccacctccgagctcggagtcaccattacagtgttcctgctcatgccgcagttcgtgctcgtcggcgcgggcgaggccttcacgtacatgggccagctcgctttcttcctgcgggagtgccccaagggcatgaagaccatgagcacaggcctgttcctcagcacctgcgcgttcgggttcttcttcagcacgctcctcgtcaccatcgtgcacaaggtaacgggccacggcggacgcggcggttggctcgccgataacatcgacgatgggaggctcgactacttctactggctgctagccgtgatcagcgccatcaacctcgttctcttcacgtttgccgccaggggctacgtctacaaggagaagcgcctggccgacgccggcatcgagctcgctgacgaggagtgtgtcgccgccggccactgatgctggcatgctgccactacaaacctacatggctacatgcatgttgcattggaatgttggataaactgcccttttatttttcctttttttattagaatgttaatataatatgcatac

SEQ ID NO: 93222 - DNA, 198 bp, Zea Mays
atgaagaggaagggtgcacaatcgtcgtggcaaggtgccatcatcaccggcgggttcgcggcaccagtagtttcgcgtccgcgctatgactcgcgtcatcgacctccaggaggtcttctcgggcctgcagtccgcgcgctacgactcacgctcaccaacgcgctcaccaacgccgttgtcctcgaggtgcacctctag

SEQ ID NO: 93223 - DNA, 2666 bp, Zea Mays
gccgcgtagcgccgtagcctagcgagggacagcgccaggactgctctgctctgcccctctgccgttgctgccggctgtgtcttcctcctcggccatcccggagaacacgcgttctctctctcctctgctacaactgccttgtccttaccctctccaccactgcacctcgtgtcacttccccaacctcttttgtccgttacatcacacacccaaagaagctgtccacgccgcaatgcagcggtcgcgcacacagcacgccgaacatcacccaggaggaacggcaacgcacacgccctttcgcacacaggagctggaggcgcccctggatccgggatccgacccggagtaccgggacttccagtttcggttcatcccggaggtgttcgagctccagatgggcggcggggtgaggaatggagacggcaaggtgacggcggagaaggttcttgggttcgagttcgacaaggtcaggatcagcattgcgtccagcgacgacgaggtggacggagaagcgccgccgaggagctccttctccggggcgagccacccgccggagccggtggacgagatagacaccgtctttgtcgctgtcgacggccgggagaagccggtccagaagccaatcatctcgtgggacgcgtccccgccgccgagcggcgcggcaagcccgcacagcagcatcgacagctccggcgccgccgccaccaccgtgacaatcacaagcctcgcgccgagctgcaccgtcaccagccggagcgccaagaccagcgtcagcagcagcgcggccagcgacggcagcggctggagcaacggcaccggcaccggcgccggcggcagcgccgggaagccgcacaagggcggcgaccccaggtggaaggccatcctcgcggcgcgcgcgcgcgacgggcccctcgcgatgggcagcttccggctgctgcggaggctcgggtgcggcgacatcgggacggtgtacctgtccgagctgagcggcggaggcgccggcaacggcggcgcggcgaggccctgctggttcgcgatgaaggtcatggacaaggcgtcgctggagagccggcggaagctgagtcgcgcgcagacggagcgggagatcctgcagctgctggaccacccgttcctgcccactctgtacgcgcacttcgagaccgaccgcttcgcctgccttgtcatggagttctgccccggcggcgacctccacgcgctccggcagcgacagcccggcaagcacttcccagagcacgccgcaaggttttacgccgcagaagtgctccttgcgctggagtacctgcatatgcttggagtggtctacagagatctgaagccggagaacgtgctcgtgagagaagatggccacatcatgatctccgacttcgacctctcccttcgttgcgcggtgtcgccgacgctggtgagatcttccctgaactccgactccaggaacgcgcaggctgcctgcatccagcccacatgcttcatgcccaagctcttcggccagaggagcaagaagagcagcagcgccaagaaatccaaatccaagggcggcgagcccaggcagcagcaggctcccacgggcctgccggagctcgtcgtggagccgacgggggcgcggtccatgtcgttcgtggggacgcacgagtacctggctccggagatcatcaagggcgagggccacggcagcgcggtggactggtggacgttcggcatcttcctgcacgagctcatgtacggcaagacgccgttcaaggggcagacgaaccgcgccacgctgttcaacgtcgtcggccagcagctcaggttcccggactgccccggcacgagcaacgcgagcagggacctgatcagaggcctgctggccaaggagccccagagccggctgggcgtgaagaggggcgccgcggagataaagcagcaccccttctttgagggcgtcaactgggcgcttatccgctgcagcactccccccggcgtgccccgggccgtcgagcccgtggcgttggcgccgcccgcgccagctaagccagcgccggtggaaagagcggagatcaacagcagcagcaatagcaagaggatggagatcaacagcagcagcaacagcaagaggatggagatcaacagcagcagcaagaggatggcaggaaccggttctgagtccggggggaagttcctagacttcgaattcttttagctagttttgagttaacgatacttgttgcagttcaagacgaattgtaggtgtagttccatactggagtgctagcgtttggcatgtctgaccggtcccaagtctgtgttggttgttgagacttgagagttgcggctcgtcccatgtcactagacactagtagttacttagtcaaagagtaagccatgaagtttgagtagtcgaaggaacgatttgtcatcatgtctgtttccattacaagttatatagccttatcagatttttctttttactacatgatcagcaacgaaatacaccatgtagtttgcctaagcattctgtactgtaccaaaatgtgaatgtcccataatatgaagtggaacagaggaagatacagagttaccgaccacctcaataaacatacgctatacgttagtatacggtgcactacacgaccaggttttctgctgcgccgatgaggcccatgccg

SEQ ID NO: 93224 - DNA, 1655 bp, Zea Mays
gccatcccggagaacacgcgttctctctctcctctgctacaactgccttgtccttaccctctccaccactgcacctcgtgtcacttccccaacctcttttgtccgttacatcacacacccaaagaagctgtccacgccgcaatgcagcggtcgcgcacacagcacgccgaacatcacccaggaggaacggcaacgcacacgccctttcgcacacaggagctggaggcgcccctggatccgggatccgacccggagtaccgggacttccagtttcggttcatcccggaggtgttcgagctccagatgggcggcggggtgaggaatggagacggcaaggtgacggcggagaaggttcttgggttcgagttcgacaaggtcaggatcagcattgcgtccagcgacgacgaggtggacggagaagcgccgccgaggagctccttctccggggcgagccacccgccggagccggtggacgagatagacaccgtctttgtcgctgtcgacggccgggagaagccggtccagaagccaatcatctcgtgggacgcgtccccgccgccgagcggcgcggcaagcccgcacagcagcatcgacagctccggcgccgccgccaccaccgtgacaatcacaagcctcgcgccgagctgcaccgtcaccagccggagcgccaagaccagcgtcagcagcagcgcggccagcgacggcagcggctggagcaacggcaccggcaccggcgccggcggcagcgccgggaagccgcacaagggcggcgaccccaggtggaaggccatcctcgcggcgcgcgcgcgcgacgggcccctcgcgatgggcagcttccggctgctgcggaggctcgggtgcggcgacatcgggacggtgtacctgtccgagctgagcggcggaggcgccggcaacggcggcgcggcgaggccctgctggttcgcgatgaaggtcatggacaaggcgtcgctggagagccggcggaagctgagtcgcgcgcagacggagcgggagatcctgcagctgctggaccacccgttcctgcccactctgtacgcgcacttcgagaccgaccgcttcgcctgccttgtcatggagttctgccccggcggcgacctccacgcgctccggcagcgacagcccggcaagcacttcccagagcacgccgcaaggtactcgtccgagtcctgtttgattctttgcttcatcagaccggtaatgtggttttggaactgcaaacagttgtattgtatgacgtgagtcaatcgtcattcccgtattgcactattgcggtgtaattttcgctttcagttgcaagcttgcggctgtgggttagcgttttttgcttattagttctctgaattttgaaacaaattgatcttcccatttgtttaagcatcgctcccaatcgcatacccatatactctaacaagactacaggagtacagaacagtatagagctccagatctgtcttgcagttcatgtcttgctagttattttttttaaaaaaaaaatgtcgtgctactcgtagactgctagttagagttgtttttttgttattattacttttaaaaggagtgctataagtgatgctatcgtctttgctttcctcactgtctctactagtcatgcttaacaaactgatgcctaaatt

SEQ ID NO: 93225 - DNA, 102 bp, Zea Mays
tttcccttttctatttttctctccctttctcacacactcttaaagaagggaggtacccggacaagcccatttagatagtgaaaggaaaggactcgaaggacc

SEQ ID NO: 93226 - DNA, 525 bp, Zea Mays
atgccccattcaacgcgttggaaggtgctaaacgcagagggcattaaggccaagcggctaggatatcgttacctgcgatatgaacaacaacaattgttggccacgacgggtagcgacttgttggaggtggcgattctctgtcgagggattccaccctgcctggttgacaatactcccagacgcagccatgattccctccctaggaactcagtgatgctcctaggcctccgcgtatgccccaaacagccacatcggcgagaagccatggtggcggcccctggcggacggtggtatgcagcgacaactcgggtcccttctctccctttgcgcgacgttgagatgacggtcgagaaaacaccccaggcaccagattttatacccgagttggttaggatctcaaccgaaatcccaaatttctgggaattctttgttttctcgggttgtctttgcatctacggcagggcaaacgagctggaagaagaaccccctccttcggcgtcgggcccaccggtcaatggcatatag

SEQ ID NO: 93227 - DNA, 1822 bp, Zea Mays
cacagagacaggaagaggcagctagtgcgctctctccagatctttctcttagtttcctcacacaacgacgacgagccaatgtccgccgcggtgacggcgccgccctgccacagccggccgtctcctctcaaccccagctcgagggccacgccgtcgccgagcagcaacggcggcaagcccaacgcggtctccacgacacggaggcacctcgccaacctcgaccgcctcctcgtcaagccgccaccgctcccgctcccggctcagcccaggaaacagccaaccggggtacccgtaccaggcgacggggaggccagccccgacaaccgcagcggccacggtgggctcctcaacgcgctgaacctatccacgtttctgcccttcacgcggaaggcagccgtggacgagctgtccccgcgcagcctggcgtacatgcagcgcctcctcacgctctccccgcggctgtcgcccaagggctccatcgcgggcgagtggcggaggtaccacggcgagggcggctgggagggcctcctcgacccgctcgaccagaacctgcgccgcgagctccttcgctacggcgacttcgtgcaggccgcctacacggcgttccactccatgccggcggcggcggaggcatcctccagcagcggtcagcaacgcaccctcgtgctgccggaccgcacctaccacccgacgcgcagcctgttcgcctcgtcgtcgctgtccatcccgccgtgggcgcagcggcggtcggcgcccaactggctcacgcagcgcaccagcttcgtcggctacgtcgccgtctgcgacaacgagcaggaggtccgtcgcatgggccgacgcgacgtagcgatcgtgctacgtggcaccgccacgtgccccgagtgggccgagaatctccgcgccagcctcgtgccgctcacggcggacgacgacgcgtccgcgcccaaggtggcgaaggggttcctgagcctatacaagacgccgggagaccatgcgcccagtctctcggccgccatagtggaggaggtgaagcgtctcatggaggtgtacaagggggaggagctcagcatcaccatcgtcggccacagccttggcgcgtcgctggccctcctcgctgctgacgagctcagcacttgcctggctgccgacacagacggcaccacagatcaccgcccgccgccgatcgcggtggtctccttcggtggccccaagaccggaaaccgcgcgttcgcggagcggctgcagcgcgagcgaggcgtgaacgtcctgcgggtggtgaacgcgggcgacgtcgtgacgcgcgtaccggcgccgatcgcgcgggaagggtatgtgcacgcgggtggcgctgagctgagactgcacagcagcgactcgccgtgcctgcgtcccgacgcggggccagcgtgctgccacgacttggaggcgtacctacaccttctggacgggttcgccggctccgggcggccgttccgcccagacgcgagccgcagcgtggcgaggctgctgacataccagcggcccaacgtgaagcttgcgtacgtggagcgcgcgcggatgctcgggttcgagcaggcttcgcccaggaccgccaccgccaacggcgccgccgccgacggccagtacggctacctggccagcccgacatgactattgtttgtagctagctagaaagcaagcatgcatgcatgcaaactccgttcttaacagaggatatgcacttgtttcggaaaaaaattctatacagaccggatatgtaaacatgtagatctaccgtcggtcctagattaacgacacgtaacacttgcacagatcttaaagc

SEQ ID NO: 93228 - DNA, 132 bp, Zea Mays
atggacctcctctcgtggatcgttgccggctccatcgtcgccctcctcatcctctgtatcttgctcatggcccttgagaggtgtggtctggagtctggactcgatgcatgcgtgtgcgtacatgatagctag

SEQ ID NO: 93229 - DNA, 86 bp, Zea Mays
ctctcaagaacacaaggattccgcttagagagaactacaaattggaagaaaagctgatgatcggaacgccgaaggacttcgccgac

SEQ ID NO: 93230 - DNA, 945 bp, Zea Mays
ccaagcaaggccctatcagccggaacagcccacaggtggatgctgcgaatcgagtgggtcggtccgataagcctggtctagtcgagcccaccaagtttctcgaggctagggtttgcacgagcagcgaagcggtttgcgtgttggcgttgggcggcccggccgagccggggccctatatatgagggagaggaccccccactagggtttcctccgacggcgccgacaaaaccagaccatcaaacaagtgccagcgccctctcgcagtcgccgcaatggagagcaccttcatcatgatcaagcctgacggcgtccagaggggcctcattggtgagatcatcagccgttttgagaagaagggcttctacctcaaggccttgaagcttgtgaacgtggagaggtcgtttgctgagaagcactacgccgatctcgcctccaagcccttcttccagggcctcgtggactacatcatctctggccctgtggtggccatggtctgggagggcaagagcgtcgtcacaactggccgcaagatcattggcgccaccaaccccctggcttctgagcccggcaccatccgtggcgactttgctgtcgacattggcaggaatgtcattcatggaagtgacagcattgagagtgctaataaggagattgccctgtggttccccgagggccctgctgattggcagagcagccagcacccctggatctacgagaagtaaacatggaaagtttcacatcaaaccttgagagccagaggaagcatgtcaccatttgtgctttagcaatgttttcgaaaagattatgatctgtatcttggaaccttatttcaatggaccaaatttctttctttgccatgttattgcttgtcattttgcggtatttgattccactcgcctatagaactagcatatagtttgtgataactctatgatggaagaggag

SEQ ID NO: 93231 - DNA, 877 bp, Zea Mays
gctgccggcgcgatccggcgggcggcggcgtcggtggtcgacagggcgtgcgcggggacgcggggcttccgccgcgcgctggcgcggttcgcgccgcggccgtcggcgttcgaagacaactctagtcaacaattacgtgaaaatgtgaaaccttctgcattagaacctacatatatggaggagtcacaagccaagcgtgatgacgtggagagcaccttcatcatgatcaagcctgacggcgtccagaggggcctcattggtgagatcatcagccgttttgagaagaagggcttctacctcaaggccttgaagcttgtgaacgtggagaggtcgtttgctgagaagcactacgccgatctcgcctccaagcccttcttccagggcctcgtggactacatcatctctggccctgtggtggccatggtctgggagggcaagagcgtcgtcacaactggccgcaagatcattggcgccaccaaccccctggcttctgagcccggcaccatccgtggcgactttgctgtcgacattggcaggaatgtcattcatggaagtgacagcattgagagtgctaataaggagattgccctgtggttccccgagggccctgctgattggcagagcagccagcacccctggatctacgagaagtaaacatggaaagtttcacatcaaaccttgagagccagaggaagcatgtcaccatttgtgctttagcaatgttttcgaaaagattatgatctgtatcttggaaccttatttcaatggaccaaatttctttctttgccatgttattgcttgtcattttgcggtatttgattccactcgcctatagaactagcatatagtttgtgataactctatgatggaagaggag

SEQ ID NO: 93232 - DNA, 829 bp, Zea Mays
gatcatagtggcatatttgcttgatcatggtggcatagatcatagcatggatgaattctgtattcacaggctctaataccaggcatgaatgaatgctgtattcatccatgtaaatatttgcttgatttccctcaaaacctctaatatcaggcatggatgaattctgtattctcaggctcgcagcggtgttgatttcccagatcctgaaggtccgtggtggagaagagaggaggatgaggaagaactgcaccttcccccctcctgcgcgcgcgcccaactaaaaaacaagccaaccgacttggaaatgctcttcgcaccgacagctgccccaccacaagtccacaagcaaccacaaaagacaggtgtagccttccaactggcaagtgaacctgcagttcgcaaagaagacaactctagtcaacaattacgtgaaaatgtgaaaccttctgcattagaacctacatatatggaggagtcacaagccaagcgtgatgacgatgagccatcagacatcacgtattcacgtgctgtagatgagcaagcagatcgtatgcacaacctgaaagtgtcttttccttttgctcttcacggggcatgtatattgttgtttaatgtagaggctgttaaaatatttaaataagctatttgcaaaaaaatagtgaaggtatttgtaaaaaaatcgtggcactgaagagacgtctctggctcgtaacccaagaaacaacagacgactcacttcccaatgtacgaattcgtcgtctattctatctattcgatactgtacaaatacatttatgtgtgtatttattaataaactacaattatatac

SEQ ID NO: 93233 - DNA, 1415 bp, Zea Mays
ctcgagcggtggagccttgcgtgtgtctaaaaatagcgcccgaatcgcggcggcagccacatcgagtaatttatcgagtcaggtgagagggcggagcagatctcgccggccggggccatgggtgctgccggcgcgatccggcgggcggcggcgtcggtggtcgacagggcgtgcgcggggacgcggggcttccgccgcgcgctggcgcggttcgcgccgcggccgtcggcgttcggccccgccgcagacgcggaggccgcggcggtgcgcgccgtgcggaacctccggaccttccggttccactacgccgtcctgcagtgggtgctgctgctggcgtccctggcgccgcggcaccgggcctccgtcgtcttcctcatggcggcgtccaagggcctcctcgtctacggcggcctcctcaaggcgttccccaactcggcgctgctccggaggctcctcgaccgccgcctcgtggccgccgtgttcgtcgcgctcgtgctcgccgacatcgtcgccgcgggcgccgtcgccaacctcctggccgcgctcgccgcgggcgtccccgtcatcgtcctccacgcgtccttccgcgtccgcgacgatctcgaggcgccctcgccggacgcggcggcggcggccgagaacggcaaggaggacgaggcgtcggcggtcgtcgagaagaaggaggacggcgacgtcgaggcggggcccacgcggcggtccatggcggcggcaccaagatcacccaaatgaggaatttactagctcgcagcggtgttgatttcccagatcctgaaggtccgtggtggagaagagaggaggatgaggaagaactgcaccttcccccctcctgcgcgcgcgcccaactaaaaaacaagccaaccgacttggaaatgctcttcgcaccgacagctgccccaccacaagtccacaagcaaccacaaaagacaggtgtagccttccaactggcaagtgaacctgcagttcgcaaagaagacaactctagtcaacaattacgtgaaaatgtgaaaccttctgcattagaacctacatatatggaggagtcacaagccaagcgtgatgacgatgagccatcagacatcacgtattcacgtgctgtagatgagcaagcagatcgtatgcacaacctgaaagtgtcttttccttttgctcttcacggggcatgtatattgttgtttaatgtagaggctgttaaaatatttaaataagctatttgcaaaaaaatagtgaaggtatttgtaaaaaaatcgtggcactgaagagacgtctctggctcgtaacccaagaaacaacagacgactcacttcccaatgtacgaattcgtcgtctattctatctattcgatactgtacaaatacatttatgtgtgtatttattaataaactacaattatatac

SEQ ID NO: 93234 - DNA, 1154 bp, Zea Mays
agaccgtgcgacccgttaaaaataataacgcgtccgctcccctctcgagtcccttgccccacccaagtacccaactcgagcggtggagccttgcgtgtgtctaaaaatagcgcccgaatcgcggcggcagccacatcgagtaatttatcgagtcaggtgagagggcggagcagatctcgccggccggggccatgggtgctgccggcgcgatccggcgggcggcggcgtcggtggtcgacagggcgtgcgcggggacgcggggcttccgccgcgcgctggcgcggttcgcgccgcggccgtcggcgttcggccccgccgcagacgcggaggccgcggcggtgcgcgccgtgcggaacctccggaccttccggttccactacgccgtcctgcagtgggtgctgctgctggcgtccctggcgccgcggcaccgggcctccgtcgtcttcctcatggcggcgtccaagggcctcctcgtctacggcggcctcctcaaggcgttccccaactcggcgctgctccggaggctcctcgaccgccgcctcgtggccgccgtgttcgtcgcgctcgtgctcgccgacatcgtcgccgcgggcgccgtcgccaacctcctggccgcgctcgccgcgggcgtccccgtcatcgtcctccacgcgtccttccgcgtccgcgacgatctcgaggcgccctcgccggacgcggcggcggcggccgagaacggcaaggaggacgaggcgtcggcggtcgtcgagaagaaggaggacggcgacgtcgaggcggggcccacgcggcggtccatggcggcggcaccaagatcacccaaatgaggaatttactagtaatacgagctagtgaaaaccatacgtttttcgtaggtttttaatttaactactggccccgttgtcatggaacataggaacaattcgtggtcaaacctgtcttcctgcctgcttgttgattcatactttgagcctaggattttttttttggagaagttcaatcagtagaatgtagtggtagctgtgacagacattgaacgtggaattgaggattaatacttataggggactcagttgtgaagtcctctattcatacaccttgagtgtataatctaatctaacacacataaagcatgctccactgatcgattcggttaa

SEQ ID NO: 93235 - DNA, 1660 bp, Zea Mays
cgcgtcgcttggcctccaagtccaggtccatgtccaacagacaaaaaaaaaaccccgcccccggttcgtcacttcgtcgctttctcgtcgagccgcgactgccgactgcgaccgagagaattctctatccggtccccgtccggtttggttagagttcgcactcgtgattgggttggtcgcttggttcttccctgccggaagatacctttcgttcggtgtcgccaactcgccattcttgggaggtcttggtcgggaccggtgctgatggaggagaggtacgaggcgctgaaggagctgggggccggcaacttcggcgtggcgaggctggtcagggacaagcggaccaaggagctggtagccgtcaagtacatcgagaggggcaagaagattgatgagaacgtgcagagggagatcatcaatcaccagtcgctccggcaccctaacatcgtacggttcaaggaggtttgtctaacacccacacatcttgctattgtcatggaatatgctgctggtggagagctatttgagaaaatctgctcagcagggcgattcagtgaagatgagtccaggtatttcttccaacagctgatatcaggggtcagctactgccattctatggaaatttgtcaccgtgatcttaaacttgagaacaccctccttgatgggagtccaacacctcgtgtgaaaatttgcgactttggttactcaaaggtgttgtatacggatactgcgccggctctgttatgcgtcctaactttaccagcaactgacttctcttgtgtcgttgaatcagttacaaactttgctagtgtgcttttcagtctgctttgctgcattccaaaccaaaatcaacagttggaactccagcatacatagcccccgaggttctttccagaaaagagtatgatggaaaggtagcagacgtttggtcctgtggtgtcacgctgtacgtgatgctcgtgggatcatatccatttgaagatcctgaggatccaaggaacttccggaaaacgatcagcagaattcttggcgtgcaatactccatcccggattatgtgagagtgtcttcagactgcagacgccttctgtctcagatattcgttgccgatccttcaaagaggatcacgatcccggagataaagcatcacccgtggttcttgaagaacctcccgagggagatctcggagagggagaaggccaactacaaggacgcggatgccgccgagccggcgcaggccgtggacgagatcatgcggattgttgaggaggccaagacccccggtgacatgtccaaggtggttgacccggcgctgctggccgagatggcagagctggagagcgacgaggaagaggcagacgccgatgacacctactgatcgctcctgcatgcagctcagcagctgctcagtcatggtgtccagtcctttgtgctgcagacatggcgccgccgagcgcccgagcttaacccgtgcgtgtgatgacggatgttgtattgcactctttacgctgtttgtataataaaagtctgtacaacgctgtacaattgcagattgccttgtacagatgaactagcgtgcagtgatatactcagtcccaaattctatgttccaaaacggtttaaataattttattttttagagagatcaaaatagttttaagt

SEQ ID NO: 93236 - DNA, 1528 bp, Zea Mays
cgcgtcgcttggcctccaagtccaggtccatgtccaacagacaaaaaaaaaaccccgcccccggttcgtcacttcgtcgctttctcgtcgagccgcgactgccgactgcgaccgagagaattctctatccggtccccgtccggtttggttagagttcgcactcgtgattgggttggtcgcttggttcttccctgccggaagatacctttcgttcggtgtcgccaactcgccattcttgggaggtcttggtcgggaccggtgctgatggaggagaggtacgaggcgctgaaggagctgggggccggcaacttcggcgtggcgaggctggtcagggacaagcggaccaaggagctggtagccgtcaagtacatcgagaggggcaagaagattgatgagaacgtgcagagggagatcatcaatcaccagtcgctccggcaccctaacatcgtacggttcaaggaggtttgtctaacacccacacatcttgctattgtcatggaatatgctgctggtggagagctatttgagaaaatctgctcagcagggcgattcagtgaagatgagtccaggtatttcttccaacagctgatatcaggggtcagctactgccattctatggaaatttgtcaccgtgatcttaaacttgagaacaccctccttgatgggagtccaacacctcgtgtgaaaatttgcgactttggttactcaaagtctgctttgctgcattccaaaccaaaatcaacagttggaactccagcatacatagcccccgaggttctttccagaaaagagtatgatggaaaggtagcagacgtttggtcctgtggtgtcacgctgtacgtgatgctcgtgggatcatatccatttgaagatcctgaggatccaaggaacttccggaaaacgatcagcagaattcttggcgtgcaatactccatcccggattatgtgagagtgtcttcagactgcagacgccttctgtctcagatattcgttgccgatccttcaaagaggatcacgatcccggagataaagcatcacccgtggttcttgaagaacctcccgagggagatctcggagagggagaaggccaactacaaggacgcggatgccgccgagccggcgcaggccgtggacgagatcatgcggattgttgaggaggccaagacccccggtgacatgtccaaggtggttgacccggcgctgctggccgagatggcagagctggagagcgacgaggaagaggcagacgccgatgacacctactgatcgctcctgcatgcagctcagcagctgctcagtcatggtgtccagtcctttgtgctgcagacatggcgccgccgagcgcccgagcttaacccgtgcgtgtgatgacggatgttgtattgcactctttacgctgtttgtataataaaagtctgtacaacgctgtacaattgcagattgccttgtacagatgaactagcgtgcagtgatatactcagtcccaaattctatgttccaaaacggtttaaataattttattttttag

SEQ ID NO: 93237 - DNA, 1480 bp, Zea Mays
aaaccccgcccccggttcgtcacttcgtcgctttctcgtcgagccgcgactgccgactgcgaccgagagaattctctatccggtccccgtccggtttggttagagttcgcactcgtgattgggttggtcgcttggttcttccctgccggaagatacctttcgttcggtgtcgccaactcgccattcttgggaggtcttggtcgggaccggtgctgatggaggagaggtacgaggcgctgaaggagctgggggccggcaacttcggcgtggcgaggctggtcagggacaagcggaccaaggagctggtagccgtcaagtacatcgagaggggcaagaagattgatgagaacgtgcagagggagatcatcaatcaccagtcgctccggcaccctaacatcgtacggttcaaggaggtttgtctaacacccacacatcttgctattgtcatggaatatgctgctggtggagagctatttgagaaaatctgctcagcagggcgattcagtgaagatgagtccaggtatttcttccaacagctgatatcaggggtcagctactgccattctatggaaatttgtcaccgtgatcttaaacttgagaacaccctccttgatgggagtccaacacctcgtgtgaaaatttgcgactttggttactcaaagttacaaactttgctagtgtgcttttcagtctgctttgctgcattccaaaccaaaatcaacagttggaactccagcatacatagcccccgaggttctttccagaaaagagtatgatggaaaggtagcagacgtttggtcctgtggtgtcacgctgtacgtgatgctcgtgggatcatatccatttgaagatcctgaggatccaaggaacttccggaaaacgatcagcagaattcttggcgtgcaatactccatcccggattatgtgagagtgtcttcagactgcagacgccttctgtctcagatattcgttgccgatccttcaaaggatcacgatcccggagataaagcatcacccgtggttcttgaagaacctcccgagggagatctcggagagggagaaggccaactacaaggacgcggatgccgccgagccggcgcaggccgtggacgagatcatgcggattgttgaggaggccaagacccccggtgacatgtccaaggtggttgacccggcgctgctggccgagatggcagagctggagagcgacgaggaagaggcagacgccgatgacacctactgatcgctcctgcatgcagctcagcagctgctcagtcatggtgtccagtcctttgtgctgcagacatggcgccgccgagcgcccgagcttaacccgtgcgtgtgatgacggatgttgtattgcactctttacgctgtttgtataataaaagtctgtacaacgctgtacaattgcagattgccttgtacagatgaactagcgtgcagtgatatactcagtcccaaattctatgttccaaaa

SEQ ID NO: 93238 - DNA, 1514 bp, Zea Mays
atggaggagaggtacgaggcgctgaaggagctgggggccggcaacttcggcgtggcgaggctggtcagggacaagcggaccaaggagctggtagccgtcaagtacatcgagaggggcaagaagattgatgagaacgtgcagagggagatcatcaatcaccagtcgctccggcaccctaacatcgtacggttcaaggaggtttgtctaacacccacacatcttgctattgtcatggaatatgctgctggtggagagctatttgagaaaatctgctcagcagggcgattcagtgaagatgagtccaggtatttcttccaacagctgatatcaggggtcagctactgccattctatggaaatttgtcaccgtgatcttaaacttgagaacaccctccttgatgggagtccaacacctcgtgtgaaaatttgcgactttggttactcaaagtctgctttgctgcattccaaaccaaaatcaacagttggaactccagcatacatagcccccgaggttctttccagaaaagagtatgatggaaaggtagcagacgtttggtcctgtggtgtcacgctgtacgtgatgctcgtgggatcatatccatttgaagatcctgaggatccaaggaacttccggaaaacgatcagcgtaatcatctccctttcccttctgttggttatcacagcttgcttcagatgcttgtttggtgattctgaaagcaatttcaatgtctcgtgcttggcagagaattcttggcgtgcaatactccatcccggattatgtgagagtgtcttcagactgcagacgccttctgtctcagatattcgttgccgatccttcaaaggtacttcctctctcagttcagtaaatccaaatccaagctggcctaatcatcaaagttcagatgcaaatatttcatatgctgattatactgaggtgtggatcctgcaaccctggacaaacaattttcagcgtgatgactgacagtgaatttcttgttaaacgtcctctacctgaaactgaaagaggatcacgatcccggagataaagcatcacccgtggttcttgaagaacctcccgagggagatctcggagagggagaaggccaactacaaggacgcggatgccgccgagccggcgcaggccgtggacgagatcatgcggattgttgaggaggccaagacccccggtgacatgtccaaggtggttgacccggcgctgctggccgagatggcagagctggagagcgacgaggaagaggcagacgccgatgacacctactgatcgctcctgcatgcagctcagcagctgctcagtcatggtgtccagtcctttgtgctgcagacatggcgccgccgagcgcccgagcttaacccgtgcgtgtgatgacggatgttgtattgcactctttacgctgtttgtataataaaagtctgtacaacgctgtacaattgcagattgccttgtacagatgaactagcgtgcagtgatatactcagtcccaaattctatgttcc

SEQ ID NO: 93239 - DNA, 1511 bp, Zea Mays
cgcgtcgcttggcctccaagtccaggtccatgtccaacagacaaaaaaaaaaccccgcccccggttcgtcacttcgtcgctttctcgtcgagccgcgactgccgactgcgaccgagagaattctctatccggtccccgtccggtttggttagagttcgcactcgtgattgggttggtcgcttggttcttccctgccggaagatacctttcgttcggtgtcgccaactcgccattcttgggaggtcttggtcgggaccggtgctgatggaggagaggtacgaggcgctgaaggagctgggggccggcaacttcggcgtggcgaggctggtcagggacaagcggaccaaggagctggtagccgtcaagtacatcgagaggggcaagaagattgatgagaacgtgcagagggagatcatcaatcaccagtcgctccggcaccctaacatcgtacggttcaaggaggtttgtctaacacccacacatcttgctattgtcatggaatatgctgctggtggagagctatttgagaaaatctgctcagcagggcgattcagtgaagatgagtccaggtatttcttccaacagctgatatcaggggtcagctactgccattctatggaaatttgtcaccgtgatcttaaacttgagaacaccctccttgatgggagtccaacacctcgtgtgaaaatttgcgactttggttactcaaagtgtgcttttcagtctgctttgctgcattccaaaccaaaatcaacagttggaactccagcatacatagcccccgaggttctttccagaaaagagtatgatggaaaggtagcagacgtttggtcctgtggtgtcacgctgtacgtgatgctcgtgggatcatatccatttgaagatcctgaggatccaaggaacttccggaaaacgatcagcagaattcttggcgtgcaatactccatcccggattatgtgagagtgtcttcagactgcagacgccttctgtctcagatattcgttgccgatccttcaaagaggatcacgatcccggagataaagcatcacccgtggttcttgaagaacctcccgagggagatctcggagagggagaaggccaactacaaggacgcggatgccgccgagccggcgcaggccgtggacgagatcatgcggattgttgaggaggccaagacccccggtgacatgtccaaggtggttgacccggcgctgctggccgagatggcagagctggagagcgacgaggaagaggcagacgccgatgacacctactgatcgctcctgcatgcagctcagcagctgctcagtcatggtgtccagtcctttgtgctgcagacatggcgccgccgagcgcccgagcttaacccgtgcgtgtgatgacggatgttgtattgcactctttacgctgtttgtataataaaagtctgtacaacgctgtacaattgcagattgccttgtacagatgaactagcgtgcagtgatatactcagtcccaaattctatgttcc

SEQ ID NO: 93240 - DNA, 1789 bp, Zea Mays
cgcgtcgcttggcctccaagtccaggtccatgtccaacagacaaaaaaaaaaccccgcccccggttcgtcacttcgtcgctttctcgtcgagccgcgactgccgactgcgaccgagagaattctctatccggtccccgtccggtttggttagagttcgcactcgtgattgggttggtcgcttggttcttccctgccggaagatacctttcgttcggtgtcgccaactcgccattcttgggaggtcttggtcgggaccggtgctgatggaggagaggtacgaggcgctgaaggagctgggggccggcaacttcggcgtggcgaggctggtcagggacaagcggaccaaggagctggtagccgtcaagtacatcgagaggggcaagaagattgatgagaacgtgcagagggagatcatcaatcaccagtcgctccggcaccctaacatcgtacggttcaaggaggtttgtctaacacccacacatcttgctattgtcatggaatatgctgctggtggagagctatttgagaaaatctgctcagcagggcgattcagtgaagatgaggtttgttttggccttatattcgtcatattgtcagcctattttctcgccccgaaccacgtcaaactaatgttgtgtgctccctatgttgtaaacgcaaacagtccaggtatttcttccaacagctgatatcaggggtcagctactgccattctatggtacggttttgcttccaaaagtcaacaagtccatgaatagtggagtgtaagttttaatgagctaacaaatgaaacacaggaaatttgtcaccgtgatcttaaacttgagaacaccctccttgatgggagtccaacacctcgtgtgaaaatttgcgactttggttactcaaaggtgttgtatacggatactgcgccggctctgttatgcgtcctaactttaccagcaactgacttctcttgtgtcgttgaatcagttacaaactttgctagtgtgcttttcagtctgctttgctgcattccaaaccaaaatcaacagttggaactccagcatacatagcccccgaggttctttccagaaaagagtatgatggaaaggtagcagacgtttggtcctgtggtgtcacgctgtacgtgatgctcgtgggatcatatccatttgaagatcctgaggatccaaggaacttccggaaaacgatcagcagaattcttggcgtgcaatactccatcccggattatgtgagagtgtcttcagactgcagacgccttctgtctcagatattcgttgccgatccttcaaagaggatcacgatcccggagataaagcatcacccgtggttcttgaagaacctcccgagggagatctcggagagggagaaggccaactacaaggacgcggatgccgccgagccggcgcaggccgtggacgagatcatgcggattgttgaggaggccaagacccccggtgacatgtccaaggtggttgacccggcgctgctggccgagatggcagagctggagagcgacgaggaagaggcagacgccgatgacacctactgatcgctcctgcatgcagctcagcagctgctcagtcatggtgtccagtcctttgtgctgcagacatggcgccgccgagcgcccgagcttaacccgtgcgtgtgatgacggatgttgtattgcactctttacgctgtttgtataataaaagtctgtacaacgctgtacaattgcagattgccttgtacagatgaactagcgtgcagtgatatactcagtcccaaattctatgttcc

SEQ ID NO: 93241 - DNA, 131 bp, Zea Mays
gtatttacagtgttttgtgtctgctctgttttgcaactggatgatccttctcccttcattgaagctgctcctgaacgtcgcacgggagacgacgtcactcatgggattttggaactcggaccacacattta

SEQ ID NO: 93242 - DNA, 2092 bp, Zea Mays
cagccttttgcaaacgagttgaaatcaccttgttcaaatcgtcccctcctctctctcgctcgcttgccaagcacaatcttctgcgcgttcgtcttgcggatttgttaattggttggtcagctcctctctgacccagaggcaaagccatggctctcacgctgcgttcctcgacatcgttcctgtcgcctgtggaccccacgtccaagctcctccacaagcccgccgacgaggcgcagccctgctgcgtcgccgtacccccagcgcccggccgcaggccgcgcgcgctcagggcggccgcggccgctgcgacctcaccggcgacgggccgcgcgccggcggaggcgggcgagctgctgcacggcggcggcgcggaccagcaccacgggctgccgcgcggcggggtgccggtatacgtgatgctgccgctggacacggtggggccaggcggccagctgtcgcggcagcgcgcgttggcggccagtctgatggcgctgcggggcgccggggtggagggcgtcatggtggacgtgtggtggggcgtggtggagcgggagggccccggccgctacgactgggaggcctacgccgagctcgtgcgcatggtggagcgagccggcctccgactccaggccgtcatgtccttccaccagtgcggtggcaacgtcggcgacacctgcaacatcccgttgccgccatgggtgctggaggagatgagcagcaacccggacatcgtgtacacggacaggtccggccgccggaaccccgagtacatctccctcggctgcgacacgctgccggtgcttaagggccggacccccatccaggtctacaccgactacatgcgcagcttccgcgagagattccgtgactacctcggcaatgtcatcgcggagatccaagtgggcatgggtccttgtggagagctgaggtatccttcataccctgaggccaacggaacctggcgtttcccgggcatcggcgagttccaatgctatgataagtacatgcgggcttcgctggaagcggcggcggtggcggcgggtcaccaggagtgggggaggggcggaccccatgacgccggggagtacaagcagatgcccgacgacacgggcttcttccggcgcgagggcacttggagcacagagtacgggcatttcttcctggcgtggtattcaggcatgctgctggagcacggcgaccgcgtccttgccgcggccgaggccgtgttcggcggcacgggcgcaacgctctccgccaaggtcgccggcatccactggcactaccggactcggtcccatgcggcggagctcacggccgggtactacaacacgcgggaccgcgacgggtacgcgccgatcgcgcgcatgctggccaagcgcggcgccgtgctcaacttcacatgcatggagatgaaggacgagcagcagccgaaacacgccagctgctccccggagctgcttgtgcagcaggtcaagaccgcggccagcgccgccggggtggagctcgccggcgagaacgcgctggagcggtacgacgaggcggcgttctcgcaggtggcgtcgacagcgcgcggcgccggcctggccgcgttcacgtacctgcgcatgaacaagacgctctttgacggcgacaactggcggcagttcgtgtccttcgtcagggccatggccgacggcggcgcgagaccagcactgccacggtgcgacacggggcactcggacctgtacgtcgggttcctcgacgccgccaagaagagcaaggcgccggaggctgagggcgccgccaccgccgcggcattgtaggtggatgctcatgcctgtgcgtgcacacagacacatgcgccgtgctgttgtataacgtgcaccggagaaggggaactgtatgtatagattcagggccttgcaggttgcagagttttataggctgtaatcgagcaggtcggtaaggaggcaggcatgtcagaacttaggctgtcttcagttcatttgtcccatttggaactgtattgttataagtctaatctctgtagagagaattctatatggtgttattttccatactaacataatatacatataataaaatataatat

SEQ ID NO: 93243 - DNA, 1583 bp, Zea Mays
cccgcttttcatttgctggtttcttgcacgcaaggacttggtatgtctgggtcggcaagcaatcagagcactatacccgaaagagaacagacagagagacgcccctatcacaggaattgaagggagaattgtgcctgatcatcattttgcaaacgtctaatcaagatcacaaattcatcccgttgccgccatgggtgctggaggagatgagcagcaacccggacatcgtgtacacggacaggtccggccgccggaaccccgagtacatctccctcggctgcgacacgctgccggtgcttaagggccggacccccatccaggtctacaccgactacatgcgcagcttccgcgagagattccgtgactacctcggcaatgtcatcgcggagatccaagtgggcatgggtccttgtggagagctgaggtatccttcataccctgaggccaacggaacctggcgtttcccgggcatcggcgagttccaatgctatgataagtacatgcgggcttcgctggaagcggcggcggtggcggcgggtcaccaggagtgggggaggggcggaccccatgacgccggggagtacaagcagatgcccgacgacacgggcttcttccggcgcgagggcacttggagcacagagtacgggcatttcttcctggcgtggtattcaggcatgctgctggagcacggcgaccgcgtccttgccgcggccgaggccgtgttcggcggcacgggcgcaacgctctccgccaaggtcgccggcatccactggcactaccggactcggtcccatgcggcggagctcacggccgggtactacaacacgcgggaccgcgacgggtacgcgccgatcgcgcgcatgctggccaagcgcggcgccgtgctcaacttcacatgcatggagatgaaggacgagcagcagccgaaacacgccagctgctccccggagctgcttgtgcagcaggtcaagaccgcggccagcgccgccggggtggagctcgccggcgagaacgcgctggagcggtacgacgaggcggcgttctcgcaggtggcgtcgacagcgcgcggcgccggcctggccgcgttcacgtacctgcgcatgaacaagacgctctttgacggcgacaactggcggcagttcgtgtccttcgtcagggccatggccgacggcggcgcgagaccagcactgccacggtgcgacacggggcactcggacctgtacgtcgggttcctcgacgccgccaagaagagcaaggcgccggaggctgagggcgccgccaccgccgcggcattgtaggtggatgctcatgcctgtgcgtgcacacagacacatgcgccgtgctgttgtataacgtgcaccggagaaggggaactgtatgtatagattcagggccttgcaggttgcagagttttataggctgtaatcgagcaggtcggtaaggaggcaggcatgtcagaacttaggctgtcttcagttcatttgtcccatttggaactgtattgttataagtctaatctctgtagagagaattctatatggtgttattttccatactaacataatatacatataataaaatat

SEQ ID NO: 93244 - DNA, 418 bp, Zea Mays
gcaaacgagttgaaatcaccttgttcaaatcgtcccctcctctctctcgctcgcttgccaagcacaatcttctgcgcgttcgtcttgcggatttgttaattggttggtcagctcctctctgacccagaggcaaagccatggctctcacgctgcgttcctcgacatcgttcctgtcgcctgtggatgctcatgcctgtgcgtgcacacagacacatgcgccgtgctgttgtataacgtgcaccggagaaggggaactgtatgtatagattcagggccttgcaggttgcagagttttataggctgtaatcgagcaggtcggtaaggaggcaggcatgtcagaacttaggctgtcttcagttcatttgtcccatttggaactgtattgttataagtctaatctctgtagagagaattctat

SEQ ID NO: 93245 - DNA, 1977 bp, Zea Mays
cagccttttgcaaacgagttgaaatcaccttgttcaaatcgtcccctcctctctctcgctcgcttgccaagcacaatcttctgcgcgttcgtcttgcggatttgttaattggttggtcagctcctctctgacccagaggcaaagccatggctctcacgctgcgttcctcgacatcgttcctgtcgcctgtggaccccacgtccaagctcctccacaagcccgccgacgaggcgcagccctgctgcgtcgccgtacccccagcgcccggccgcaggccgcgcgcgctcagggcggccgcggccgctgcgacctcaccggcgacgggccgcgcgccggcggaggcgggcgagctgctgcacggcggcggcgcggaccagcaccacgggctgccgcgcggcggggtgccggtatacgtgatgctgccgctggacacggtggggccaggcggccagctgtcgcggcagcgcgcgttggcggccagtctgatggcgctgcggggcgccggggtggagggcgtcatggtggacgtgtggtggggcgtggtggagcgggagggccccggccgctacgactgggaggcctacgccgagctcgtgcgcatggtggagcgagccggcctccgactccaggccgtcatgtccttccaccagtgcggtggcaacgtcggcgacacctgcaacatcccgttgccgccatgggtgctggaggagatgagcagcaacccggacatcgtgtacacgctgccggtgcttaagggccggacccccatccaggtctacaccgactacatgcgcagcttccgcgagagattccgtgactacctcggcaatgtcatcgcggagatccaagtgggcatgggtccttgtggagagctgaggtatccttcataccctgaggccaacggaacctggcgtttcccgggcatcggcgagttccaatgctatgataagtacatgcgggcttcgctggaagcggcggcggtggcggcgggtcaccaggagtgggggaggggcggaccccatgacgccggggagtacaagcagatgcccgacgacacgggcttcttccggcgcgagggcacttggagcacagagtacgggcatttcttcctggcgtggtattcaggcatgctgctggagcacggcgaccgcgtccttgccgcggccgaggccgtgttcggcggcacgggcgcaacgctctccgccaaggtcgccggcatccactggcactaccggactcggtcccatgcggcggagctcacggccgggtactacaacacgcgggaccgcgacgggtacgcgccgatcgcgcgcatgctggccaagcgcggcgccgtgctcaacttcacatgcatggagatgaaggacgagcagcagccgaaacacgccagctgctccccggagctgcttgtgcagcaggtcaagaccgcggccagcgccgccggggtggagctcgccggcgagaacgcgctggagcggtacgacgaggcggcgttctcgcaggtggcgtcgacagcgcgcggcgccggcctggccgcgttcacgtacctgcgcatgaacaagacgctctttgacggcgacaactggcggcagttcgtgtccttcgtcagggccatggccgacggcggcgcgagaccagcactgccacggtgcgacacggggcactcggacctgtacgtcgggttcctcgacgccgccaagaagagcaaggcgccggaggctgagggcgccgccaccgccgcggcattgtaggtggatgctcatgcctgtgcgtgcacacagacacatgcgccgtgctgttgtataacgtgcaccggagaaggggaactgtatgtatagattcagggccttgcaggttgcagagttttataggctgtaatcgagcaggtcggtaaggaggcaggcatgtcagaacttaggctgtcttcagttcatttgtcccatttggaactgtattgttataagtctaatctctgta

SEQ ID NO: 93246 - DNA, 422 bp, Zea Mays
tttttatttatttttgcaacatgcttgaccctgtccatcaactaataggtggacgtgcaaattatgatcctgattcagccacaacaattgttgtctacaaggtatgatcatttagacaagccaaattttgtttgtgtaagtgtattgtggtacaacactgcagtcttttttgaacaaagtggcaggagctctgcctttcaattaagagagagaggaaaaaagttagagtacataggggcggcaaccctcaggccataggattgggcacctaagaagtaacacgacagacaaccctagtacaagccaaggcggttggacgcccttttatagagcaagacacactctcttactctctctgcgatctggagcggtggcagcgagcaatgctcaaagattcttcggttgcgctccttccaaaggtt

SEQ ID NO: 93247 - DNA, 841 bp, Zea Mays
atgtgcatttgatccattcttctctacgcattttgcttgccagccgttgttcccaaatatgcgacgtgccctccagtcctggtagccagcatcgcccagccgccactcccagtccctctcctcccttgatttcgcccagcctccatctctctttccagccatggatgccgcccctccctggcaccctcatctccacgggagctcgccctagctccagcttcaaccatggacggcgacctctcctgcctatagcagggcgccgggatgctgcttcctatacatcgtgcgacttcctggtgcttgctctcgtcctaggccatggagcagcagcagtcacgacactccttcgtgtcgcgcccttgacgtgatcgatgaaataccgcagcgagctccaactcgatctgcacagcccctgcgcgacgtcacaaactccgctcgttgtcgatgtcgtgcttcgtgcatcgtgtgttcgacgaaaatcccaagtccatggatagcacatgcacaactcaaatccgatcggccaggttgtttgatgtgtattttactcatttgatttagttgatgatgtgtttgtatgtgtggggtgatgagaaaaataaaggagatgcgtcgttcggtagtaaggattaagttaaaatgtagtttatggtgtgaagagtgcgtcgataaatatgtatgccattgagtggttaaatgttgtgttgatcggctagaggtcctatacaagtgtcgtcgctgtccaaaaatttatttggaagcaagtagtgtcgatgcttcgatttcggttgaagtcagagaataattcgaggaggtatatatgcgagtactttaagttctt

SEQ ID NO: 93248 - DNA, 1619 bp, Zea Mays
caccaaccctctctcctcatgaaatcgagccagcaccagccacgccaacagcctgccacccgtgtcatccctgcatgcgcgaagcaggtgagactggacaggagcagccagccccatgacgccctcttaagacgaggacgaggaggaggcggtggaccagttcgttcgcgttgcccgcgactctctccgtcctcctactgcccacccgactcacacgcttggcacgcgcgtgcttccacccgtccgtcgcctctctctcggctgcctgattgatttggttgccccggttccagcaatggcggtccaggcgcattatcaccaccactaccaccgcgagtcccctttcctcgtcagcggcgcgccggagggcagccggttggcggcggcgatggagctgcatcatcaggcgcagaaggaggctatggcgccgcagcaggctcaggctccgcccctcttcttggacttctcgcatggagattacggcggcgggaggaagcggcagcgcgaggcggagcccatgtcgtcgcagttcttctctctgcagcagcaaccgcaggcgcaggggcccaaggtgatcaacctggcgcaacttcagaagcggacggcgatgggcctccggctcgacttcgacgagggctcggagcacgtgtcgtgcacgtccccggcctcggcctcggcctcatgtctcctctctaaagagctcgccgcgcagcgcgatcagcacaggaacgagatggaccggctgatccaggaacatgcggacaggctccggcgcgcgctggccgacactcggcggcggcactaccgttcgctggtcggcgcggcggaggcggcggctgctcaacgggtaagggagaaggaggcggaggcgtcggaggccgcgcggcgccgcgcggacctggaggaccgggtggcgcggctgagggcggaggcggcggcgtggcaggccaaggacgcagcggatcagtccacagccgcggcgctccacgcgcagctgcagaaggcggcggcggcgcaggcgaggggcaaggccgaggaggaggacaacgtgggcgccgcggcggacgacgccgggtcctgcttcgtcgacccggacagggtcgtggaggtcgccccgccgcgcccgctggccaggccgtgccggacgtgcgggcagcgttcggcctccgtcgtgctgctcccgtgccgccacctctgcgtctgcgccgagtgcgagcccgccgtccccgctgccggcgccgtcgcggctgcctgccccatgtgccgtggcgcggtgaccggcaccgtgcaagtgttcttctcctagcaagctttaggaaaggggaaaatgctaaaagaaaaagcaagacaaaatcgttgctcctgccaaaaggaatgatccgtgaaaatggggaattgttcatgatagtccgttctctgcttcttttttttttctctccctctctcagttgtttattataatccttctattagtatataagtcgatctcttctagtactgctaggaataggattaggttcctgctttattttcccttggtttcttctggaaggcatatgatcgaccatggaccccagtacgtacattttggaaggcaatgaatgattgtgcaaaatttt

SEQ ID NO: 93249 - DNA, 1723 bp, Zea Mays
caccaaccctctctcctcatgaaatcgagccagcaccagccacgccaacagcctgccacccgtgtcatccctgcatgcgcgaagcaggtgagactggacaggagcagccagccccatgacgccctcttaagacgaggacgaggaggaggcggtggaccagttcgttcgcgttgcccgcgactctctccgtcctcctactgcccacccgactcacacgcttggcacgcgcgtgcttccacccgtccgtcgcctctctctcggctgcctgattgatttggttgccccggttccagcaatggcggtccaggcgcattatcaccaccactaccaccgcgagtcccctttcctcgtcaggtacctgccgtggccgctgtgcatcttctaatcgtttcttccgcgtcgatcgtcggtctgctggatcgtattcggatgggtgatttgagcgtctgggttgtcagcggcgcgccggagggcagccggttggcggcggcgatggagctgcatcatcaggcgcagaaggaggctatggcgccgcagcaggctcaggctccgcccctcttcttggacttctcgcatggagattacggcggcgggaggaagcggcagcgcgaggcggagcccatgtcgtcgcagttcttctctctgcagcagcaaccgcaggcgcaggggcccaaggtgatcaacctggcgcaacttcagaagcggacggcgatgggcctccggctcgacttcgacgagggctcggagcacgtgtcgtgcacgtccccggcctcggcctcggcctcatgtctcctctctaaagagctcgccgcgcagcgcgatcagcacaggaacgagatggaccggctgatccaggaacatgcggacaggctccggcgcgcgctggccgacactcggcggcggcactaccgttcgctggtcggcgcggcggaggcggcggctgctcaacgggtaagggagaaggaggcggaggcgtcggaggccgcgcggcgccgcgcggacctggaggaccgggtggcgcggctgagggcggaggcggcggcgtggcaggccaaggacgcagcggatcagtccacagccgcggcgctccacgcgcagctgcagaaggcggcggcggcgcaggcgaggggcaaggccgaggaggaggacaacgtgggcgccgcggcggacgacgccgggtcctgcttcgtcgacccggacagggtcgtggaggtcgccccgccgcgcccgctggccaggccgtgccggacgtgcgggcagcgttcggcctccgtcgtgctgctcccgtgccgccacctctgcgtctgcgccgagtgcgagcccgccgtccccgctgccggcgccgtcgcggctgcctgccccatgtgccgtggcgcggtgaccggcaccgtgcaagtgttcttctcctagcaagctttaggaaaggggaaaatgctaaaagaaaaagcaagacaaaatcgttgctcctgccaaaaggaatgatccgtgaaaatggggaattgttcatgatagtccgttctctgcttcttttttttttctctccctctctcagttgtttattataatccttctattagtatataagtcgatctcttctagtactgctaggaataggattaggttcctgctttattttcccttggtttcttctggaaggcatatgatcgaccatggaccccagtacgtacattttggaaggcaatgaatgattgtgcaaaatttt

SEQ ID NO: 93250 - DNA, 1032 bp, Zea Mays
atggtggttgatggcattttggcggcagaggcatttaacccggtgctcaaggcgatgctgcgtacaggtgatgtgaatggggcggccaagctgtttcggtttatgcagctgaagggttgcacactgacggaatcaacatacaatgtgctgctgcatggtttattattgtgtgggcgggcgagggacgcagcgggcatgatgagaagaatggagagtgaggggatgccgccagggttgatgacttacggggcagtagtggatggactgctgaagtgtgggagaatggaggatgcatggaaggtgtctgaggaaatgggaaggaaggggcttacacctagtgattttgtgttttcctctgtgatcaccggtttttgcaagtcaggtgaggttgacagggcattgaaggtgtgggagacaatggtggctgccaaggtaaacccaaacactgttttgtattcagcaatgattgatggcctggcccgttgtgggaggatgactgaagctaaaatgttatttggagatatggttgatgcaaaatgtttaccaaatgtcatgacatatagctcaattatttatggatattttttcattggtgactcatcgtgtgctctctctacatgggaggagatggaaaaggttggttgtgtgccaaatgccattagttacagcatattgatcaatgcgttatgcaatgtagggagattaaaagatgctatgatggtttggaaaaacatgcttggtcgtggctgtgtgcctgatacaattgcttatacttcaatggtcaaggggttatgcatgtctggaatggtagatggtggtgtccgtttatttaatgacatgttggcaaagggtgatgccaggccagatgccatcagttataatattctattggatgggctgatacgcacaaacaaccttcctcgggcaatggacttgcttaaccagatgcttgatcaactgtgtgatccagacacagtaacatgcaacattttcttgcgggagattggggtcgtagaggggaaagggagataa

SEQ ID NO: 93251 - DNA, 384 bp, Zea Mays
atggtcctcatcagcaaactcggggagcagcacgacctcgaaccgcccttcggccaacttggcggcgacctccatgatactgatgagctctgtgtggatgcgtacaagagagatagagtgtccaggtcttgcggtgcgccagcgaaccatatcaaggagcatgacagaattaactcacttacaagaggctcgacttcaatcgctagtatagagtccacatcaggtgggcagtcgtgcacctgcagcacacaaaaaatgaggagggtgtgggtggctgaggcggccaggaagcactgtggctctggcatcggtgagcgctctaccacagattttggagaaggctctgaagccgtcgcgccgatggagaaagatgtgggtggttga

SEQ ID NO: 93252 - DNA, 98 bp, Zea Mays
gcagaggtcttcctagccgttgcgggtctgcctgcaccgcgtcgagtcgccactgcaccaacccgccacagccccgctagcctgactccaccgtcacc

SEQ ID NO: 93253 - DNA, 279 bp, Zea Mays
atgcgtattggagtggagacacgattgatagcggagagacctcagggatctgctcaagacggacgagaacccggtcgttctgcggcgccacctgccccccccaaaaaaaaaccaagaaccacaccgttagacttagatcataaattccacccagcaaaccttgaagactcgaaaccagagcgcatggattcacacagcagcgaacccacccaccttggcagggtcgtacttaagcgcggccacgcgcagtccagcccgtcgggtgtgggcagcgcctag

SEQ ID NO: 93254 - DNA, 1782 bp, Zea Mays
gtccgtttatttgaattagcaacgatccaacaaccaccatccgcagccctgtccgagctctgcacggccgcaccccaatgcccgtccccggcgagccgtctcctccggcctcgcctcgacaatactcgggcctcctcgccgctctccacagctgtatatctggcgggaacgcccccgcggctgtctcccttctgcccaccctcgctcgcgccggcctgcgcgcgccgttcccgctcctctcctccctcgccggtctcctcctgctccgcccagccgcgccgtccttcccctccctagctggccgcctcctcctctacgtccgcctcgccggcctcaagcacctcgtcccctgctccactcagctagccgaccaactcctctcgcttaacttcctcctcggccgaccgcgtgacgcccgccggctgttcaccaaaatgccccgccccagcgtccactcctataacgccatgctcgctgggtacgcccgtctgtcactcgccgcacccgcttctgaggtattctcttccatgccacaccgggaactcgtttcttacaatgctgttatgctcgcgctcgggcgtggcggcgaagcgcagggagctgtggagctgtactccgagctccggaacatgtacccctcccttgggtacaactatcacaccttcttggcgctccttgtggccggcgcccagctcatggatagggagcttgccaggcaattccattgccatttggtggttcttgggttcttgtctgatgtgaaaattgccagctctcttcttgatgtttatagaaaatgccattgtgttgatgatgctaggaagctgtttggcgagatgcatatcaaggatgtgcgtatgtggacgacagtagtttgtgcctgtgctgaggatggccaattggctaccgctcgtcagctctttgatcagatgccagagaggaatgcgtttacatggactgcactcatcgagggatatgcttgccatgggcagccaatggatgcactgaatatgtttcaacacatgatgaaggaaggtttgcagccagatcaaatcaccttgggttgttgcctgagtgcttgtgcggctatgcgttcactgaaccttgggcagcagatccatggaatgttgctaagatgtggctttgatcgaagtgtgatgatcgttaccgcaatcattgacatgtattcaaaatgcagttttctgtctggtgccataaaggtgttcagcctaacaggtaaggaaaggaagaatgcagtgctgtggaatggcatgttgtctgctctgtatgatcatggtcatgaacaggatgtgattggattgtttgttcagatgattcatggaagacacaagcctgatgctaatacattctttctggttttggtggcttgctgccactgcggcctagttgaggaggggatgaatttttttgatttgatgaatgagagatacaggattgttccaggacaagaacactatttttgtatggctgatttggttagccatgcatcatccaataataaagtaattgaatggatcaaaagctcaccattcagttttaatctacgcgtttgggaagttcttgttaggaattgcaccatacatggcaacattgaattgttgaataaggtagaggaggaactggctagattggaccatccagaatgaatggacggttgttctttgtttggcttatgaggttgaggttgaaggatggtcatgcttgttcgatgaacaggagccattcgtttcgataagcagagataagatggcaacaaccgca

SEQ ID NO: 93255 - DNA, 118 bp, Zea Mays
aagaaattcaaataaacgaactaaatctaatagttatagaaaacacttttataattgtcccaaaatggtacatgtaggtctacatagtgtaggaacataccacaaaaagtttggttgg

SEQ ID NO: 93256 - DNA, 1293 bp, Zea Mays
caaaggccacgccaaaatccaaacccaaccaaccaaccaaccggtctgctgctgtctgtctcctgcagtctcgcgatctgcctctgctccttccttcctctcgacactctgctgctgcgggcctgcggctggccgacctgatgagcgcagggagatgaggtgcaagctccacccttacgccaacgccgtgggcgtctgcgcggcctgcctccgcgaccgcctcctcgcgctggccgccgagcgcgcccaggccgccgccgaggccagcagcgacgggggctacgggagcagcagcagctcgcccccgcccctacacctgcccgcgcggcgccaccgccagcacggccacgacgaggcaagaaccgggacgttcccacgctccgtgtcgccgtacgtgcagcgccggcgctccgacgcctgcgcctactacgcgacctcctcctcgtcgtcgtcgtcgtccgcgtaccagcaccagccgagcctcctcttcttccgcacgccgcaggtcgggcccgcgttccgcggcgacgagcccggggacggggaggacaccggcggcggcagcaggaggaagcaggccgcgccgcggcggtcctttctgtcagcgatcttcggcggcaggctgcggcggcggcacgggcgggaacgggaagaggccggcaggaacaggaaggagcctccccggcggtccacctcgtggctctcggcgatcacccgccgcaagcggaggccgggcgaggagcctgagtccttcccggcgccgcaggacgaggagcctgagtcccccggcggcggcagctggtggttcccctcgccgtcgcccgccagacagcagcaccggcggcggcacggcgcgggctcgggcgccagcggggacggagtctcggggctggccgtgtgcctgagcccgctcgtccggcccagctccgccggcggccggcgccggtgccagccgccggacccctccgcgctgggagacagccaccggcggctcgcgtcgttcgggcgcaacgcctcccggaagctcgctgatatgggtcggctccgatgacgcggcctcgccgaccggtcctcgtcgtcgccggcgtgccggggccaaagatctctttattttgtgtaatttcgaagatgctatgacggtgttcgttactagtacagtagtagtagtagcgcttagcgcctagctagccgccacgagagcggaaacaaatttgcaagtaaaattcgatggtgaaggcagccaagtttggcagctgcagcagcagcagcagcacattagacgaagacattgga

SEQ ID NO: 93257 - DNA, 1573 bp, Zea Mays
aacgatttccatctctacaaacggagctagctgctgcatgctataaggcccttgagagattccgcgaagatggcaggaaaactactctacggctggttgatatggagtctgcatatttgactgtggagttcttccgcaagctcccacaggaagttgataagactggaactggaaatcccagaaatgccaatcctcctgctccttcggatgatcgttacgctgatgcacatttcaggaggattgcttctaacgtgtcctcatacattggcatggtatctgaaacgctgaagaatactatccccaagtctgttgttcactgtcaggtccgcgaagctaagcggtccctgcttaaccatttctatactcaagtgggcgggaaagatgctaagcaacttgcagtactccttgacgaggatcctgccctcatggaacgcaggctgcaatgctttaagaggcttgagctgtacaagtctgctcgggacgagattgatgccgtgtcgtggacaagatgaaggtaacgcatgccatgcttgttaatatattcgctttctccattagacacattgtaattctactagtgcagaattagcagctagccattgtgcacactgattgtcaagtatagcagaccgagcacctgtctcgtatcttagcctgttaatatcagtagttgtgtgcttgactgcttgtgttgtatctatgtctcaactcccaactgttatcaggtgcaaatttctgtccttagtaacccatgtgcaaacttgtatgcacgaacgatacctggattctgtaggatgcacatgccgatcttcttcccatgctgtagttaggtgtagactgcagaactgggacttctaatgtgaaaataatgttttatgcaacttgtcattagtcaatcacattatcacactgtagaataattttttgttggctgcgagcattaccatgcgatttgggggtggtccacactaacatgtacgcattgcatgagaccctttcaataaacaatactggcactgcgtctgaacattcttggcctgctggacctgcaagacacgtctgccatctatcttagttcaatttgttagcgttattgcttgacattttccacatccgggatgaatgacgcgtgctgcgtgcggtgcagaatccgaaacaggtcagtcaactcccgcatgatccttggtcaatttcacgatacttatttgccctgctcgcgttcttttctggtcagttgcgcgctctgttgatgtgacccttttggtccgtccgggaaatcgtcgcctgctggccatggattcacgctttctagaggacgtgtgttgcccgccgtgcgcccttccatgagttccccgcatagaacaggtcgtcttctggaacagaaaggcgaagcgcgtggcgagctgtcctgattttgacgagtccatgcatcttcagcagattggactggtcgccataagaacacgaaactgtgattaggaggcatacacgtcatctgctagtgtttccggtgaagtcagttgccaccatgacctgctaggcagaaataaatatgcccctattaatcgggcct

SEQ ID NO: 93258 - DNA, 2345 bp, Zea Mays
gtctatcttctcggctcgcacacctcagacacagccaggcagcggagcgctcccccctcgattccttcgcttccttctagaaccttccgctccctccgttgcaacagtagcacagagcttcctcctcccccacccccgaagatgacgaccatggagaacgtgatcgtgctcgtgaaccgcatccagcgtgcctgcaccgtcctcggcgaccacggcggcggggacgccgccgcctccctccctaccctctgggaagcgctcccgacggtcgccgtcgtcggcggtcagagttcggggaaatcatcggtgctcgagagcatcgtggggcgagacttcctgcctcgaggatcagggatcgtgacgcgtaggccactcgtcctgcagctgcacaagacagaggccggggtgcaggagtatgccgagttccttcacatgcctaagcgccgcttcactgatttctctattgtgcggaaggaaatccaggatgaaactgacaggttgactggaaagacaaagcagatatctccagttccaattcatctcagcatatactctccacatgtggtcaacttaacattgattgatctgccgggcctaaccaaagttgcagttgaggggcagcctgaaagcattgttcaagatatcgaaagcatggtgcgttcatatgttgataagccgaattgtattatattggctatatctcctgccaatcaagatatagcgacatcagatgcaatcaagcttgcccgggaagtggatccaactggtgagaggacatttggtgtgttgacaaagcttgatttaatggacaagggaacaaatgcacttgacgttcttgaaggaagagcttacagactgcagcatccctgggttggaattgtgaaccgttcacaagcagatatcaacaagaatgttgacatgattattgctaggcgaaaagagcaggagttcttcgattctagtcctgaatattctcatcttgccagcaggatgggttcagaatatcttgctaaacttctttcacagcatctagaggccgcgatcagatcacgcattccgagcataacctctctgataaacaaaactattgatgagcttgaatctgagatggatcacctcggtagacctattgcttctgatgctggggctcagttgtacctcatcttggagctttgccgtgcatttgacaaaatatttaaagaacatcttgatggcggccgacctggcggtgatagaatttatggggtctttgataaccaactcccttctgctctgcggaagctcccatttgatcgtcatctctccgtgcaaaatgtgaagcgggttgtttcacaggcagatggttatcagcctcatttaattgctcctgagcaagggtaccgtcggctgattgaatcttctctcaattattttagaggaccagcggaagcctctgtagatgctgtgcattctgttttgaaagagctggtgaggatatccattggggagacacaggttggccctcggtttcttagagacaaagtatcagttacacccttttctctgtacattagtttcaaaagttactgcatctttaggagttaaaacgatttccatctctacaaacggagctagctgctgcatgctataaggcccttgagagattccgcgaagatggcaggaaaactactctacggctggttgatatggagtctgcatatttgactgtggagttcttccgcaagctcccacaggaagttgataagactggaactggaaatcccagaaatgccaatcctcctgctccttcggatgatcgttacgctgatgcacatttcaggaggattgcttctaacgtgtcctcatacattggcatggtatctgaaacgctgaagaatactatccccaagtctgttgttcactgtcaggtccgcgaagctaagcggtccctgcttaaccatttctatactcaagtgggcgggaaagatgtaagtaaccttctttgtgttctagcttgttcattcctcctcataccaaattttgcagtacataaattctgtttttttgcaggctaagcaacttgcagtactccttgacgaggatcctgccctcatggaacgcaggctgcaatgctttaagaggcttgagctgtacaagtctgctcgggacgagattgatgccgtgtcgtggacaagatgaaggtaacgcatgccatgcttgttaatatattcgctttctccattagacacattgtaattctactagtgcagaattagcagctagccattgtgcacactgattgtcaagtatagcagaccgagcacctgtctcgtatcttagcctgttaatatcagtagttgtgtgct

SEQ ID NO: 93259 - DNA, 1302 bp, Zea Mays
atggccacatctaggctccccagggaccgctggaccctctggtgttgccgctcaaggcttctatggcccagcagtagccgcaaccggagagggagacaactgagcccctcaacctctccgtggctcctcaagtcaaatcagaagttacaaggtttaagggaagaaatgaatgcgattgtcccatacttggaggagatgagaaagaagaaagttgaaagatgggaccaatttgttgatgtcatagagcaaattaagaaggttgcatctgaaatcaggcctgcagattttgtaccctttagaattcctatggatcagtctgatctatctttaagaaagctggaggagctaacgaaagagctgcaatcccttcagaaggagaagagtgatcggctgaagcaagtcatggaacatcttaacactttgcattcgttatgcgaggtgcttggtgtagacttcaaacaaatagtaaatgagcttcaagatttggcctctagcatgcttgaactttggaatctcatggatacaccacttgaagaacaacagatgttccagaatgtaacgtgcaatattgctgcttctgaacatgaaataactgagcctaacaccctctctattgacttcctcagctacgtggaatctgaagttttaagactcgagcaacataaagcgagcaagatgaaagaccttgttctaaaaaagaagacagaactggaagagcataggagacgtgctcatttgattggcgaggaaggctatgcagctaaatttagcgatgaggctattgaggcagattttcattatacaaacaaaatgatgaatcatgcattcagtcgctttcttcctaatgatgtgggatggagagatctgtttgaaatggctgttgaactcatgcttgtcgatgcactcattgaggctaatgactacttggggatatcattgcatgcacacgacccagaagatttttggaagttggatgacacaatcatcaaaaccattgagactgctcccaacaatgaactgaaaaaagcaaaagaaatcattcaacgtattcgccgaagagaacttaacaagttttgcaacccagtattctgttcaccaaaggacaaactggagcatttcaaaaatattactgcacaggacatagtttgttcgcagaaatcttctgaggtgctgctgaaggaagaggatgttgcagtaagcaatgttaagatagatcttactcgtggaaaagataacccccttgaaaggtttttgatatttgaatggtacttagttctcttattgatttgtctgaaacattga

SEQ ID NO: 93260 - DNA, 1443 bp, Zea Mays
aggcggagcagcacaggacaggacagccagaggccgggagcagaggaggcggtcgtggcgagcggcgagccacaggcacgggcacctatcgttgaattgaacgaaaggagagcgggagaaagcgactcgtcactcgtcagtctctcgtcctcatgccgtcgccgctgggtggacgaatccaattcgggcctggcaaggctggcatgccgtcggcctccctagctcgccgcctcctctctactatatcatctccagcgatcccttcacgcagtaccagcaccagcgccagcaacagcaacagctgtggtttcagcacaagaagggccaggaagaagcgcagctgcgtttcttggacggtgagcgcggctactccggcggacatggcgaccaacagcggcagtgccctggcgaagctggcgccgctggaagccatcctgttcgacatcgacggcacgctctgcgactccgaccccatccacttctgcgccttccgagagctcctgcagcaggccggcttcaacggcggtgtccccatcacggaggagttctacagcgccaacatcagcgggggccacaacgacgacctcgccaggtcgctgttcccgggcatggatcaccagaaggcgatgcggttcatggatgacaaagaagctatgttcagaaagttggcgcctgggcagctgaagcccgtggatgggctgcaggagctgtgcggatggatggaaggccgcgacctgaagcgcgcggcggtgacgaacgccccgagggcgaacgccgagctgatgctgtcgctgttgggcctcaccgacttcttcccggtgctcgtcatcgggagcgagtgcgaccgggccaagccgttccctgacccgtacctcaaggcgctccagctcatcggcgcatcgcctcaacacaccttcatatttgaagtacggatgaagctctctctctctcatcgtaattctgtgaagaagctttgttgtttgtttcatcgtcgctagtcgaaacagtcagtgaccaacggtaatgctgtctgtgcgtgttcgtgcatctcgttctgccgcaggactctgcatcgggggtccgggccggtgtggctgccggagtgcccgtggttggcctgacgacgaggaaccccgggaaggtgctgaaagacgcaggggccagcttgctggtcaaggattttcaggacccggagctgatgtccgtgcttcaacaggtggaggtcgaacccgcagcggcgaatgcgcaaggctgatgcgtcggtcactgcggacaactaagaaatgaaatgtcgtgctggactagccttcagcgattctttcagagtggaatagctgtgtaactgcatcgtgtaataaactaactccggtcggttcctcggctggaacctggagactagcttcttggtggattcaaacagggcccaaatagaccctaagttaa

SEQ ID NO: 93261 - DNA, 1244 bp, Zea Mays
aggcggagcagcacaggacaggacagccagaggccgggagcagaggaggcggtcgtggcgagcggcgagccacaggcacgggcacctatcgttgaattgaacgaaaggagagcgggagaaagcgactcgtcactcgtcagtctctcgtcctcatgccgtcgccgctgggtggacgaatccaattcgggcctggcaaggctggcatgccgtcggcctccctagctcgccgcctcctctctactatatcatctccagcgatcccttcacgcagtaccagcaccagcgccagcaacagcaacagctgtggtttcagcacaagaagggccaggaagaagcgcagctgcgtttcttggacggtgagcgcggctactccggcggacatggcgaccaacagtgccctggcgaagctggcgccgctggaagccatcctgttcgacatcgacggcacgctctgcgactccgaccccatccacttctgcgccttccgagagctcctgcagcaggccggcttcaacggcggtgtccccatcacggaggagttctacagcgccaacatcagcgggggccacaacgacgacctcgccaggtcgctgttcccgggcatggatcaccagaaggcgatgcggttcatggatgacaaagaagctatgttcagaaagttggcgcctgggcagctgaagcccgtggatgggctgcaggagctgtgcggatggatggaaggccgcgacctgaagcgcgcggcggtgacgaacgccccgagggcgaacgccgagctgatgctgtcgctgttgggcctcaccgacttcttcccggtgctcgtcatcgggagcgagtgcgaccgggccaagccgttccctgacccgtacctcaaggcgctccagctcatcggcgcatcgcctcaacacaccttcatatttgaagactctgcatcgggggtccgggccggtgtggctgccggagtgcccgtggttggcctgacgacgaggaaccccgggaaggtgctgaaagacgcaggggccagcttgctggtcaaggattttcaggacccggagctgatgtccgtgcttcaacaggtggaggtcgaacccgcagcggcgaatgcgcaaggctgatgcgtcggtcactgcggacaactaagaaatgaaatgtcgtgctggactagccttcagcgattctttcagagtggaatagctgtgtaactgcatcgtgtaataaactaactccggtcggttcctcggctggaa

SEQ ID NO: 93262 - DNA, 1214 bp, Zea Mays
aggcggagcagcacaggacaggacagccagaggccgggagcagaggaggcggtcgtggcgagcggcgagccacaggcacgggcacctatcgttgaattgaacgaaaggagagcgggagaaagcgactcgtcactcgtcagtctctcgtcctcatgccgtcgccgctgggtggacgaatccaattcgggcctggcaaggctggcatgccgtcggcctccctagctcgccgcctcctctctactatatcatctccagcgatcccttcacgcagtaccagcaccagcgccagcaacagcaacagctgtggtttcagcacaagaagggccaggaagaagcgcagctgcgtttcttggacggtgagcgcggctactccggcggacatggcgaccaacagcggcagtgccctggcgaagctggcgccgctggaagccatcctgttcgacatcgacggcacgctctgcgactccgaccccatccacttctgcgccttccgagagctcctgcagcaggccggcttcaacggcggtgtccccatcacggaggagttctacagcgccaacatcagcgggggccacaacgacgacctcgccaggtcgctgttcccgggcatggatcaccagaaggcgatgcggttcatggatgacaaagaagctatgttcagaaagttggcgcctgggcagctgaagcccgtggatgggctgcaggagctgtgcggatggatggaaggccgcgacctgaagcgcgcggcggtgacgaacgccccgagggcgaacgccgagctgatgctgtcgctgttgggcctcaccgacttcttcccggtgctcgtcatcgggagcgagtgcgaccgggccaagccgttccctgacccgtacctcaaggcgctccagctcatcggcgcatcgcctcaacacaccttcatatttgaagactctgcatcgggggtccgggccggtgtggctgccggagtgcccgtggttggcctgacgacgaggaaccccgggaaggtgctgaaagacgcaggggccagcttgctggtcaaggattttcaggacccggagctgatgtccgtgcttcaacaggtggaggtcgaacccgcagcggcgaatgcgcaaggctgatgcgtcggtcactgcggacaactaagaaatgaaatgtcgtgctggactagccttcagcgattctttcagagtggaatagctgtgtaactgcatcgt

SEQ ID NO: 93263 - DNA, 1311 bp, Zea Mays
aggcggagcagcacaggacaggacagccagaggccgggagcagaggaggcggtcgtggcgagcggcgagccacaggcacgggcacctatcgttgaattgaacgaaaggagagcgggagaaagcgactcgtcactcgtcagtctctcgtcctcatgccgtcgccgctgggtggacgaatccaattcgggcctggcaaggctggcatgccgtcggcctccctagctcgccgcctcctctctactatatcatctccagcgatcccttcacgcagtaccagcaccagcgccagcaacagcaacagctgtggtttcagcacaagaagggccaggaagaagcgcagctgcgtttcttggacggtgagcgcggctactccggcggacatggcgaccaacaggtgcaccaccgagacccgcccgcgtcctctcttgttcgccaccggaaacacgggacaccgctcatctgctccgctcttgccttctgaactctgaaagcggcagtgccctggcgaagctggcgccgctggaagccatcctgttcgacatcgacggcacgctctgcgactccgaccccatccacttctgcgccttccgagagctcctgcagcaggccggcttcaacggcggtgtccccatcacggaggagttctacagcgccaacatcagcgggggccacaacgacgacctcgccaggtcgctgttcccgggcatggatcaccagaaggcgatgcggttcatggatgacaaagaagctatgttcagaaagttggcgcctgggcagctgaagcccgtggatgggctgcaggagctgtgcggatggatggaaggccgcgacctgaagcgcgcggcggtgacgaacgccccgagggcgaacgccgagctgatgctgtcgctgttgggcctcaccgacttcttcccggtgctcgtcatcgggagcgagtgcgaccgggccaagccgttccctgacccgtacctcaaggcgctccagctcatcggcgcatcgcctcaacacaccttcatatttgaagactctgcatcgggggtccgggccggtgtggctgccggagtgcccgtggttggcctgacgacgaggaaccccgggaaggtgctgaaagacgcaggggccagcttgctggtcaaggattttcaggacccggagctgatgtccgtgcttcaacaggtggaggtcgaacccgcagcggcgaatgcgcaaggctgatgcgtcggtcactgcggacaactaagaaatgaaatgtcgtgctggactagccttcagcgattctttcagagtggaatagctgtgtaactgcatcgt

SEQ ID NO: 93264 - DNA, 642 bp, Zea Mays
ggatgcagttcaatgatatatacaattgtcttctgtggtaagtatcttttacatggactgaacggtggtacagtttatatggcgcccgagaccgccctcactactgacggccgagaaggaagaagagatctcaaggaacctgaagaagtatagcaagaagtacgaacaagaagaccaggatgcattcaatcagttgagcgagcaggaccgcaagaggcggacacagcttcaggaagaatgggactcatgggttgccaagtggaagcagatgcatgaggaggagcgtgcttacaggagggagctcagggatggggaggccagcgacgacgaggaagagtatgaggccaaggaagttgaggtggaggaagtcgttgatgtccgtcaagaagttcttgcattcgacctagatcaggagtgaaaacacttattatagaatctgttgatttctttcctgttggtgttaaagttcattggggtcgcattgcataataggccctagtgatcaagtgcgcaatttactgatcgttgtactgcttatttgtacacttgctgcttgaattgttggatcatgtgtttagatatcaaattttgctgctggattactaatctgtctggttctgcaaaattagttgtactgcattc

SEQ ID NO: 93265 - DNA, 2533 bp, Zea Mays
gactcgcgactcaaaaccaaaaccctccatccattctacacgcgccgccgcactcctgtacacgccccgccgccaccgcctccaccaccacagcgcgcaggaatccctcgttctctgagggtttcaggcgtcgtatgtaagagaagatggcgctctcagtatccatggagggcatcgaggcgcgggcgcgggatctcggggtggacctctccgctgtcgatctggactccatcaccctcccggccggcgaggacttcggcatcgtcagtgatgacgaggaggtacttcgtggtgaggatcttccagaacttgaaatgggtttgtccaacattattgtcgtggacaatctgccagttgttcctccagaaaagtttgagaagcttgagaatgtcatacgcaagatctacagccaaattggagcgataaaagaaaatggtctatggatgcctgtaaacccagagacaaagaagacatacggttactgtttcattgagtatagtacccctcaggaagctgagctggctagggaaaaaaccaatgggtacaaactcgacaagtctcacatctttgcagtcaatttgctcgatgatttcgagaagtacatgaaagttcctgacacatggacccctgctgaaattaagccatacactgctggagaaaatcttctgaagtggctaactgatgaaaaggcccgagatcaatttgtcattcgtgctggcacactaactgaagtttattggaatgatgcaagaaagctagcacctgagcttgtttttcaaaagcagtactggacagatagtttcattcagtggtcccctctgggaacctacatggcaacggttcataggcagggatcacaggtgtggggcggtgaaaatggcttcgagcgtttgatgcgttttgctcattccatggtgaaactgattgacttctctcctggtgagaggtatttggtcacatacagcagccatgagcccagcaaccctagagacacacatagagttgtcctgaatatatttgatgtaaggactgggaaagtgatgcgagactttaagggaagcgctgatgattttactactggcgggaatattggggtttctggtgtttcatggcctattttcaggtggggtggtggaaaggatgacaaatattttgcgaggcttgggaagaatataatatctgtatacgaaacagatacattctcccttcttgataagaagtctctgaaggtagaaaatgtagtggacttcagctggtctcccactgatcctatcatatctctgttcgtgcctgaaatgggtggtggaaatcagcctgcgagggtgagtctagtgcaaatccctggcaaagaggagctgcgacagaaaaaccttttcagtgtcagtgattgtaagatgtattggcaaaacagtggagaatatcttgctgttcaagttgatagatacacaaaaacaaaaaagagcacctacactgggtttgagctgtttagaattaaggagagggatatcccaattgaggtccttgaactcgagaacaagaacgacaagatcattgcatttgcatgggaacctaaaggacatcgctttgctatcatccatggtgatggccctaagcctgatgttagcttctacaccatgcgaacttccaataacactagccgtgtatccaagctcacaaccctcaaggccaagcaagctaatactctgtactggtctcctgctgggcgcttcatagttcttgctggactgaagggtttcaacgggcagctggaattctacaatgttgatgaactagagacaatggcaacaggagagcattttatggcaacagatatcatgtgggatccaactgggagatatctcgcgactgcagttacctcagttcatgaaatggagaatggctttcaaatatggtccttcagtggcaagcatctttacaaggtgtcaaaggatcatttctatcagtttatatggcgcccgagaccgccctcactactgacggccgagaaggaagaagagatctcaaggaacctgaagaagtatagcaagaagtacgaacaagaagaccaggatgcattcaatcagttgagcgagcaggaccgcaagaggcggacacagcttcaggaagaatgggactcatgggttgccaagtggaagcagatgcatgaggaggagcgtgcttacaggagggagctcagggatggggaggccagcgacgacgaggaagagtatgaggccaaggaagttgaggtggaggaagtcgttgatgtccgtcaagaagttcttgcattcgacctagatcaggagtgaaaacacttattatagaatctgttgatttctttcctgttggtgttaaagttcattggggtcgcattgcataataggccctagtgatcaagtgcgcaatttactgatcgttgtactgcttatttgtacacttgctgcttgaattgttggatcatgtgtttagatatcaaattttgctgctggattactaatctgtctggttctgcaaaattagttgtactgcattc

SEQ ID NO: 93266 - DNA, 106 bp, Zea Mays
gctttttgcttattcattcacttgaacacaacaaaagtttataacttaaataaattatatgctagatctatctcatattatataaaacggtattagcatgactcgg

SEQ ID NO: 93267 - DNA, 1382 bp, Zea Mays
aggaaagatatacttgacatatactttaaataaaaagaaaaatcatatgcccaattgaaaaatgtaacatgtcgttcagtgcaacaatggatatttggacatcatgctagaacaaatcatacatgtgtgtgaccttgcactggatagatgattcttggcatattcagaagataattatggggttttttcatgtagaagaaatgcatagtggtattaagttggcacggtgctttactgaagtgatggtaaaatggtttgttgagaagaaattgttttcattgacattggacaatgcatcaaataatttagtggtagtcaaagacattattcaagatcttagagtgaatgcttcttcttattttatttgcgatggcatattctttcatattagatgtgcatgtcacatactaaacttggttgctagagatgggcttgctgttgtttcaaaagcactggaaaagatcaaaactttggtactaactgtgaagggatctcccttgcaatgggaggaacttatgaaacatgctaccgagtgtggagtggatacatcaaagggcattcaactagatgtttccacaaggtggaattcaacgtacatgatgctaagggatgcattgcactataaggatgctttcagtaggctcaagacatcaaatcgccgtaagtatgaaaatatttctccttctgaaagtgaatggaacatggctgtagcagtttctgaatgccttagcaaattttatgatctaactgaattgctttctggtacatcataccccactacaaatatattctataaaggcttttgtgaggttagggacttacttgataactggtgtcttagtacagatttgactattaagctcatggctattgatacgagagaaacatttgagaaatactggagttcttctagtatgagtcttgttgtagcttgcttctttgatcctaggtataagagaagggtcatagagttctacatgaaaaagttttacggtgactattatcaagtgacccttgaagaatttatgagtgttttaaggaagttgtataccttttatgcttctaaaagaccacgtctgacaacagcaactgaacatgtcatcccaacaaatccatcacaacagaggaatgtaaattgggaacttgagagttacttgtatgatgacttgcgtggtagagatgaagctaatgaattggataaatatatggctgagccacttatcaaacaaaatccgttcgacgttttagcacattggaagaaccaaatagagaagtatccaattctttcccaaatagctcgtgacttaatgtttgttcaagtgtcaacagtagcatctgagtcggtatttagtgctggtggtcgagttattgatccataccgt

SEQ ID NO: 93268 - DNA, 850 bp, Zea Mays
gttatttacacattttcaatttcgtactgggcgactgggcgtagggcgagctgagctcccaagtcgacgtggcggggatggctgcgacggccggcgtcggcggtggtggaggggctaacgcggcggtggcagagcagatagcacaggcagtgcggtccacctccaatctcctccagctcatggagcagtcctcccccgctcaggttcacttggcaaaactacccaagaacctgttggaaaaagcatcctttgcaaagaacacggagcatgtactgcaccagctacctcaagtaatttcatccttggatgcttatatggacaggagtttgcaaagtgcatctcaaattaagactgtcacacagctcttgtcaaacatggagaagacacagctgaagtccatgttgccttcctctcgaaggaaggaagatcagaagagtactgaacccttaagaactcagggttgattgacgtcaccgagacatagtggaaggataagcttttgccgtcttatgctagagagatctgagtatgatggtttggctgattggctctatgcatctatccggcataaggatccatcgctgcctaccgtttgcgccacattttaaaatttggttggggaatgctgttatggtgtaatggagctgttttttatgagttggaggtgctacaaggaaagcatgtctgtttatttgtcgtccgctaaatcattttaactaaattgcggcaaataaaaaagaacggatggattaattgccacgcctttgggtctacaaacatgctgttttcttgtaatagtattgattgtttctagcagaaaattaaggtagaaattaataagtgatcaaat

SEQ ID NO: 93269 - DNA, 1509 bp, Zea Mays
ggtgttggcttatgctggaaggagaaggggtgttgccttttaagcagactccacttcacatgggggatgaacatggatgagttttgggaggggcacaatgataaatatgtgcctctcctgctgctagtttcaggctcatgctactaccttatgagtcgttttacagttcagttttgtattttcagcgctacctacctctctatccctagatccccttgtgattcttcctattttttcatcatataaatcaataaagattcagacagttcaatgaactgccatacatacattccttcaattaataagtttatgaaactgcgcccacaacagacatgtttggacgttatgctgttgttgttacaagtacaagctatcagtttgttaaccaagatgatcagcagaggtgtacttgtggtctcaggttcacttggcaaaactacccaagaacctgttggaaaaagcatcctttgcaaagaacacggagcatgtactgcaccagctacctcaagtaatttcatccttggatgcttatatggacaggagtttgcaaaggttaccttcttcccctatatgcatttttattcattagtatcttctcactagaaattctagcttttctctcagacttattcatggaacttttttagctgcaatttttctgttcagattccaaccaactatgctgaagtgtattttgtccctacttgccttccagaaaaggatcacttatgtcaattgtgtggcatatgctttttatgtctcaactatttaccagttttttctttaaaaaaagatgatgcaagacagaatcatcaatttatttctcaacatgaagatcaattggcgagcttctggcttacataggaaatgatcatttcccaccagaacacattgatctataggacacatccatcagtaaactgaaatcccagcttgtagttctgtagggcgcataatggttcttctaaacttcacgcatgtccagatttccgaccaactaggttgaagtttgttttctttaatatcaccactgataatctttgcttttgtgtactaaaaaactgtgcagtgcatctcaaattaagactgtcacacagctcttgtcaaacatggagaagacacagctgaagtccatgttgccttcctctcgaaggaaggaagatcagaagagtactgaacccttaagaactcagggttgattgacgtcaccgagacatagtggaaggataagcttttgccgtcttatgctagagagatctgagtatgatggtttggctgattggctctatgcatctatccggcataaggatccatcgctgcctaccgtttgcgccacattttaaaatttggttggggaatgctgttatggtgtaatggagctgttttttatgagttggaggtgctacaaggaaagcatgtctgtttatttgtcgtccgctaaatcattttaactaaattgcggcaaataaaaaagaacggatggattaattgccacgcctttgggtctac

SEQ ID NO: 93270 - DNA, 1353 bp, Zea Mays
ctctcccgtccaggcagccattgccaaccacccactggccaacttcccatgagccctacccctgcatcatcaccgcggcagcccggtgccggcgcccgcgctggcgtggcacggcatgccgcgttcaaggtccacagggactcccacagtatacacaaggccacctcgccgctctcctactccttgtcctcgatcaactcgtccatgtcgtcttcgtccaacgccgtaatccccagcagcggccaccaccggccggccccggcactgcagccgccagcgcggaggcagatgcagcagccaccgcagcagcagaagcaccaaccggtaatcatctacacgcactcgcctaaggtgatccgcaccaacccgcgcgacttcatgtccatcgtgcagaagctgaccggcctcgacggccccggtcaccacgcccgtggtgctgctggtgctgcgcctgcgcccccggcgggtcgcatcaactcggggtcggtcgtcgtcccctccccgcaggacgagtcgtcttcgtcttcgtcctcgtccgagagctgcgccaacacccacgccgcagggccgcctccctacgcggacacgcggttgatgccgccggccccgccggccccttcgctggatgcgcacttcatggcgcccgacatcccgctgctgtttgcacccgacgccgcagcatcagacccgcagcacctctgcgcgccaaggggtctctacggccagttcccgcaggtggacgccgcggcgatcggtccagtgatgtcgacgaacatgaacagcgctgccaccaacggtggtgccgtgttctccccgtcgatggtggagaccgtaagaatgtttccgggctataattaggcaggatttttttttctttaaaaaatctactccgtgcatgaatcaggcctcaggcgatgatgcagcgatgcaggagccgttgttatgcgatgcgtgtgcaataaccggaggttcatttttgcttgatcttttttttcttgttatggttgataccgtgaatgtgtagcagtagagaaatcaaagagaggaagatgatagatgagtcatgctgctccttgcgacatctcaatacatgttgcgatggaggtgaacctctagccgagttatatacatgtcctactactagttcatttttccctgtgcaggaaatgtacgtagttagttaccgcttggttctattccatgagatccctgtaggctgtaggtattttttttcttcttattttggttccatctcacatgtcaattcataagcttttctttcgctctacataaatagaaactttggagggttttttaacatagcaccttcgaaaaataaaagctagctagatc

SEQ ID NO: 93271 - DNA, 2817 bp, Zea Mays
cgggtttgcgccataatcccacggaatccgcattctgaaccatttccttcgctttccccttcgccctctctctctcccagtctccacccaccatttctcctcctctttccgtcgggtctactgcaccttgccctcccccatgaacctgtggacggacgacaacgcctccatgatggaggccttcatggcttctgccgacctccccaccttcccctggggagcgccggccgggggcggcaactcgtcggccgccgcggcgtcgccgccgccgccgcagatgccagcggcgacggctcccgggttcaaccaggacacgctgcagcagaggctacaagccatgatagaggggtcgagggagacctggacctacgccatcttctggcagtcctcccttgactccgccaccggcgcctcgctgctcggctggggggacggctactacaagggctgcgacgaagacaagcgcaagcagaagccgctcacgccctccgcccaggccgagcaggagcaccgcaagcgcgtgctccgcgagctcaactccctcatctccggcgcggcggcggctcccgacgaggccgtcgaggaggaggtcaccgataccgagtggttcttcctcgtctccatgacgcagtcgtttctcaacggttcgggcctccccgggcaggcgctcttcgccgggcagcccacatggatcgcctctggcctctcctccgcgccgtgcgagcgcgcgcgtcaggcctacaacttcggcctccgcaccatggtctgcttccccgtcggcaccggggtgctcgagctcggctccaccgacgtcgtgttcaagaccgccgagagcatggctaagatccgctcgctctttgggggcggagcagggggtggctcgtggccgcccgtgcagcctcaggcgccgtcgtcgcagcagcccgccgccggagccgaccacgcggagacggacccgtccatgctatggctcgccgacgcgccggtcatggacatcaaggattccttgtcgcacccgtcggccgagatctccgtctccaagcctccgccgcatccgccgcagatccattttgagaacgggagcacgagcacgctcacggagaaccccagcccctccgtgcacgcgccgccacccccgccggcgccggctgctccacagcagcggcagcaccagcaccagaatcaggcgcaccagggcccgttccgccgggagctcaatttctcggacttcgcgtccactccttccttggcggcgaccccgccgttcttcaagcccgagtccggcgagatcctcagcttcggcgccgacagcaacgcccggaggaacccgtcgccggtacctcccgccgccaccgccagcctcaccaccgctcccgggagcctcttctcgcagcacacggcgaccatgacggccgccgcggcgaacgacgcgaagaacaacaacaagcgctcaatggaggccacctcccgggcgagcaacaccaaccaccacccggcggcgacggcgaacgagggcatgctgtccttctcgtcggcgccgactacgcggccgtcgacgggcacgggcgcgccggccaagtcggagtccgaccactcggacctggacgcgtctgtgcgcgaggtggagagcagccgcgtggtggcgccgccaccggaggcggagaagcggccgcgaaagcgcgggcggaagcccgcgaacgggcgcgaggagccgctgaaccacgtggaggcggagcggcagcggcgggagaagctgaaccagcgcttctacgcgctgcgcgccgtggtgcccaacgtgtcgaagatggacaaggcgtcgctgctcggcgacgccatctcctacatcaacgagctccggggcaagctgacgtcgctggagaccgacaaggagacgctgcagacccaggtggaggcgctcaagaaggagcgcgacgcgcggccgccctcgcactccgctgggctcggcgggcacgacggcgggccgcgctgccacgcggtggagatcgacgccaagatcctggggctggaggccatgatccgcgtgcagtgccacaagcgcaaccacccgtcggcgcggctgatgacagcgctccgcgagctcgacctggacgtgtaccacgccagcgtgtccgtcgtcaaggacctcatgatccagcaggtcgccgtcaagatggccagccgcgtgtacacgcaggaccagctcagcgccgcgctctacagccgcctcgcggagcccgggtctgccatgggcaggtaatcaaggaggagagctgctcagctcgcctgtggctgccggattaggggacgacactgatactactgctactcaccaccggactgtcctgtcgtcgtggtcaccacggttacaacacgataggcagaaagattcaggagggagggagacgacgacgatgccggtgctgtataaactttagaaggatggatggatggatgatgataccgagcttctgctgctgttcatcatcatcttcttgtgtttttgctagtagcgtgttaattagcaggattaagcaaccaacaagtgtccaaccgttgttgttaattaagtacatgttgtgagcgaccaaccgatgttagcgttgggttggatccaaacctgtgtatagtatatggatcagccgtcgtcctatccggtggacgatgccctgatcctgatgtatgtatttttacagcaggatttcgctttgcaatggagtcaggctttttgatccaagaacagcacatggattgaggggtcggtgtcgttgtatctaaagactggtcgatggctcttcaattggatgtcgttcctgtttt

SEQ ID NO: 93272 - DNA, 1950 bp, Zea Mays
agccagaattactgatagtatttacttagaaaaacatcattgttctatacaagtgtagcatatttattctcaaataagaaaatgcatagaactcaagttaatctaactctgaaaaacatcattgttctatgtgtaccatatctgttctcaaataagcgctccagcaaccggatgcgggcgccgcgagacaccgccgcgtgcgccgtgcagctgcccatgatgccggcgcccaccacgatgacgtcgaagttggaggctgggcgaccagcctggggaactgcgggtgcaccggcgctggccatggcagcagctcgcgagcgctttgcaagctggaacggacgtacggcaggaggagaaaaagatagacttcgccactgatttcctttaccatatggacctgcaaggtttacagcatatactagatgcaggaaatgtcataaaactcctgtgggagaatacaacgccgtgtagtcgaaattaagactagtcatgcagaaccatggtcttaatacagtaacaacaatatctggtgccaaattttgagaaggtgtcatgtttgatatagtttaagccaaagatcacaattttgtgagtacaacctaagaagctctgaaatgatgatcaaattaacataacttaaatgaggtcagctaaacgaaacatattcagaaattatgtagcactaaccacttatggaggtgccagacaagattacaaatccaagtaaagttagcaacttagtatacactgacctttccacactgttcttcatctctattgcatactctctcttatcagtctgagcacgcagtgcacgtacaacagggccttttgagctgttcagtacacgcttttgcaagtagcacctatcagaagaagatgcaatcagtatgctaagatatctttgttgattaactagcaatcaaaatatggactctcagccatttgcactcagagaaactcattctccaggcaacaagacgtttgaactcgtacctatcggtattttttccaatttcaccaccaaaggcatctacctcatggacaagttgagactttgcagggccaccaacagcagggttacaaggctgggtagggtagatgagttgaagcagaactacacttctaatactaaaatttaaatggaattcattaacaaagaatgtttccttatagttataggctatagcatactaagatatgcaacatactaatcaaaaatcatctcttcagtttctatcgtacattcataccttggaacagaatttgtgccctacaaaaatgttatcacaggtaagagttcacattgctaaatttctacactgcagggtttgatggatcaattcttcatataagggacatgatttttattatctagcatcaggagtcaatgttcaagtaatttcagtaatgaacctgactagaatatctaccatcggggcaaagctagctcagcgcagacctgccacgcaatccggtcaatgttgagcgtaaaagcagggtgcgcgcgccgaggcgagacgaagcaagggcggcctcgcatccggcatggccgcctccgaccacaatgccaaacctcgttacccggtagtaccaggagcaagtgcatctagcgtcggagagtgagatctgtgcgcgagagacagagaagaagagaaccgtgaccgcaagggggtgcggcggacgatcgaccggcccagtgttcggagcggggagaggagacgggagagggagagcttgagggtgagaggagaaggcagagtctgacctcaacagcggcggctgcgagaggaaccctagcgcgagctccaggcgaggatagaggcggctgtgaggaccctggctccaaccctagcgcgagatccaggcgaggcggctgcgcgagctccaggcgaggcgaggcggctgcgcgagctccacgccaggacacagggaaggggcctgcgcgtg

SEQ ID NO: 93273 - DNA, 946 bp, Zea Mays
cccgtccactcaagtttgaacaatggcgtcagcagccaccttccttctgatcatcgctgcagccgcatggacatcgctaaccgacgccgcaccctcaccgcctccattcgtcccaccgccgccgtgcgcaccgccgcaatcggcggtggcgtttctccgcgcgcgctgtgcaaccacgctgtacgccgtggcctgctacgagtccctcctcccgtacgcgtgcatattccagaccagccacgtcaagctcgcccgcgccgccggcgacgtcaacgcggcctggctccgctcgatctccaagcgcgtcaaggagctcgtcgcccgcggcgctgctggtggtggcggcacggccggcggggccaagtcggctgcgctccgcgactgtgccagcacggtctcgtcggccgccggcctggccaagcagtcggcggccgagctggccaagctcgacgtcgcaggaaccaccgccgggagaagccaggtccggtgggcgatttccaacgcccagacgtggctcagcgcgtccatgacgaatgaggcgacgtgcgctgacgggctcgcggatactggcgccgcagcgtcgtcgccggttgcgagggaggtgatggtcgcagtcgttggaaccaaggagctcaccagcaacactctcgcacttgttcgtgggataccggttcctccatgattcaccggtgtaacgacaaacggctcatgatttctttagacgctcgaagatagattttttttattacctgcacttaaataggaacacttcgtaacgacgagatgaaggcaggatttaggtttcatttggcatagcttattcagcagcctcttgagctagttcaagttattttgtgcatctcaaatggttttacgtgtgaagttttttaaaatatatatgctcttacaaggggtagacgtgagatgagtgatgacgctgaaaata

SEQ ID NO: 93274 - DNA, 1000 bp, Zea Mays
tgcgcccatggacacggtcgtggtcacggccgcgcgtcgcctcctcggcaatgccacccacgaccatcgcgcccaccacggcggagccgcgtcgtccccaaggccaggcgcggcgagcgccccggtgcggccgccgccgcgggagccgttccctatgctgctgcccgtgttcatcctcttcgtgctcctcctctgcttcctctccatcttcctcctgcgcgacctcctccacttcctctccctctggctgcgccgccggcgccgcctccgcgccgatgcggacgccgcgtccgacgccacgccggacacgcacgcgtcgcacaagccggccggtctggaccccgcggtcctcgccacgttccccacggtgcggtggttcgaggagacgcatcggcccgcgtcggggcaggccgagtgcgcggtctgcctgtcggagttcgccgcgggcgacgcggtccgcctgctcaccgtctgccgccacgcgttccacacggcgtgcatcgactcgtggctcggcgcacacaccacgtgccccgtgtgccgctccgaactggacgcgccggctgccacgccccgctacggcggcggtggacgcatcgcgatcctggtagacgatcagggagacggcagcgcggcggtggcggacaccgaccatgcggcatcatccccggcgaacggtggcgtgcaatcgcgccctgaccgatgacatacatattgtccaataatcgccgagtgccagacggccggcttcttgtaacccttttcttttcttttcgctttttattcttgtgttaggttcagaagatagctagctcacggccggggtcttttagaattgtgattttttttaggtttgtggattttttgtatacgctgaatgaatgaacaaagcagacgttcatacccaattcagatatgtacaagcatgctaattcacgcattgatggaaagtaaataatgaaaatatagatatttttcgttagtattatagccagaaaaa

SEQ ID NO: 93275 - DNA, 525 bp, Zea Mays
atgcatatccccgcacatgttcttactcgcatattggacttacgaaaggaggcgaagaagagacataatggagataatgatggctcaaatccaaccattccttgggcgtggttcgagcgagaattcaatgatcagtatttagatgttatgtctcgggaagcgcttcgacaacaattcgttaggctaaaacaagggagtggtactgttcaggactacaatatgaaatgtgacaacttgatgatgtatgctcccgacattgtggcagatgactattgcttgcgacggcaatatctggaagggcttcatcccagatttacacaaataatcgaccttcctggtacagtgagactagtggatctgatggcacatgcgctacgagtggagtcatatgagcgggaattgaggtgttcataccttaagatacagattgcaggacgagagctaagagtagacccaatagttgcaaaagcaggacgatatgatgctgggcttggaatggttgactatgcatcatgccacgattga

SEQ ID NO: 93276 - DNA, 921 bp, Zea Mays
gattatcgcgctttgaatcaagtgacaatcaagaataaatatccgcttccccgaattgaggtcctctttgagcagttgaggggtgcccaggtgttctccaaaattgatttgaactctggttatcatcaattgaggattcgtgaggaggatattgagaagactgccttctgcaccaggtatgggcattatgagttcatagtcatgtcctttggcttaactaatgcccctgctgcgtttatggaagcaatgaataggatgctgcatgaattcttggacgattttgtggtcgtattcctagatgatattttgatttattcaaagaccgaggccgagcatgatcagcatctccgtctccagggtattgcggttgaccccaagaatgttgcggctgtagtggagtggaagagaccttctagtgtctctgaaatccgaagtttcttggggcttgctgggtattatcggcgtttcgtaccaaatttttccagcattgctaagcctttgactaggctcttggggaagggtgttcccttcgtctggtccagcgattgtgagatcagttatcagtcattgaagagcaagttgtatcacccggggaaggctaatgtggtggcggatgcccttagcaggtccggggttccaaaggtggccttgccgttgatcgctgatctggaccgtttggggatcgctttgtgttatgtcggcaccgctagcgaggagactcagatgcttattcaatcctcacttatggagagagtgcgtgcggctcagcagcaggatcgtcttttgcaggaagcccgaaggagggttggtgatggtaaaccgcgggagttcaccattgatgagaatgatttggttcgtttcaggggccgtctttgtgtgcctcagaaatcagaggtgaagctggatatcctgcgagaagct

SEQ ID NO: 93277 - DNA, 639 bp, Zea Mays
atggaccagcagggtgcgggcggggacgcggaggtgccggcggggctgggtctgacggcggcggagtacgagcagctgcggtcgacggtggacgcgcaccaccgctacgccgtgggggagggtcaatgctcctcgctgctggcgcagcgcatccacgcgccgccggaggccgtctgggccgtcgtccgccgcttcgactgcccgcaggtgtacaagcacttcatccggagctgcgcgctccgcccagaccccgaagccggcgacgccctctgccccggccgcctccgcgaggtcagcgtcatctcgggcctgcccgctagcaccagcaccgagcgcctcgacctactcgacgacgccgctagggtcttcggcttctccatcaccggaggcgagcaccgccttcggaactaccgctccgtcaccaccgtctccgagctcgcagaccccgcgatctgcaccgtcgtgctcgagtcctacgtcgttgacgtccccgacggcaacaccgaggacgacacccgcctcttcgccgacaccgtcatcaggctcaacctccagaagctcaagtccgtcgccgaggccaacgccgccgaggccgccgcaaccaccaattccgtccttctgccgcggccggcggagtag

SEQ ID NO: 93278 - DNA, 1977 bp, Zea Mays
ggtctatttcttcttttttatttgtttaatttatataatttcggctattatttattatatacatatgttctcccctcttttctagtgacagggagcgaggcagcgaggcagcagctgcagccggccgcgcccccatctcatctcgggggtcgggacctgattaccccaatccgtttcctcaccaaatacgccacggcggcgcggcgcgctggctacccacaatggcgctcaccaccgcctccacggtctcctctccctcccgaatcatccgccgcttctcttcttctcaagactctcgccccccttcctcgctcctacatctcgccccgcgccgaggacccgggaattccccgcgcgcctgtagctggcaccggctcgttgtgcgccggatgggctgggcggcgcgagcgctcctcggcggattatcggacgccggcgccagtgagagcgacgaggaggaggagcacgtcctacgagtggggcagcgggagggcgagatcgacgacgccgtggagctctccgcggcggccgttgggccagagagatgggacgtgctgggcctcggccaggcgatggttgacttctcagggatggtggatgacgagttccttgacagattgggcatagagaagggcacgagaaaggtcataaaccatgaggagaggggacgggtcttgcgtgccatggatggatgcagctacaaggctgcagctggaggctccctgtccaactcgctcgttgcgctggcaaggcttggtagtagccagtctgctggctaccctgagcttaatattgtgatgggcggcagtgtgggcagtgacccactaggtagtttctacagggcaaagttgcgccgtgctaatgtgcacttcctgtctaagccggtcaaagatggaacaactggaactgtcattgttctaacaacgccggatgcacagcgtactatgcttgcgtatcagggtacttcgtcaactctgagttacgattcagacttggccagtttagtgtctaaatcaaatgtactaattgtggaaggttatctatttgagctgcctcacacaattgaagctatcaagcaagcgtgtgaagatgctcacaagaatggtgcaatcattgctgttactgcatcagatgtatcttgcatcaagcgttgctacaatgactttcgggacattgtaagaaactatgcagatatactgttcgccaacgccaatgaagcaagggcgttgtgcgagctaccctcaacagacagtcccatgtcagccacaagatacttaagccactctgttcccctagtatctgtgactgacggcatgcatggctcctacattggggtgaaaggtgaagcaatatacatccctccaccacaatgcgtggctgtggacacttgtggcgctggcgacgcatacgcttctgggattctgtacggcgtcctccggggtgcttctgacctgaaaggcataggactcctggcgtcgcgggtagctgctgtcgtcgtcgggcagcaaggcacgcgactgcgggtccaggacgcggacagactggctggatcgtttgagcaccatctggatagcttggagttctgctcggatgtttgaatagatcactctgcaaacgtctggtctgattgtatctgtttttttcccaagccttagaaatctatatgtacatgtacatacatcactaaccttggttagtaggtctagtacatttcctcagggcatttagccgagctgggtaaatcttgtgcgcccatttgatattactttccatctttgagtattgccatgattggaattacgtagatttcattgggcatggaaaatacaacggtatagttcatttccattgaaaatggatggatgctatgttggtctggcctttctttatgtgtagtatgtaaaaggaactttgcggtccactgaaaccgcagtgagactgaaattacggtaatgcaatccggctttgttagattgt

SEQ ID NO: 93279 - DNA, 528 bp, Zea Mays
atggcgacccttcctttcccgcctgacccttcccctcccctggacctctcctctaccctcgacgcctcttcacctacctacaccagccccacgtcggtgatcattctggtcccggcggccaatcatctctcttcttccccggcgtcggcggggccctctgggtgcggtggtcattccaaggcgggcatggcgggtgttggtgctgttccggtgggcgcgggcgtgggtgctgacccgtgggcgtgggtgcgattccgcatccgagtcggctctcctataaggaagcgctggtgtcctcacaaccctttgtttctcatttcgtgggagggagtgctggtggcggctgggagactgtccagagtcgttgtggccgccgcttggctcgccgccctcctcggccagtgcccagacccgttccggttgatctgcggggcagatgtttcaactgcttctctgctgagcaccgggcgacgaggtgttcgaaccatgttcggtgcttcttctgcaggcggccggggcaccgtgtga

SEQ ID NO: 93280 - DNA, 1909 bp, Zea Mays
atggcgacggcccgggggatgaccccggctgcggcggacgctgtggaggagctcacgcggctgtaccgggagctgcctccgcgcccggccgtggaggaggtggaggcggcggcggcggtgctggcctcggcggacgcggaggaggaggcgcgcctcgccgagatcgccagggaggaggaggcggcgcggcggaaggaggccgcgcacgtcgtcgagctcgagaggcggttcaagctcttcgacgacctcatccagagggcgtcgcgggtggtttctccaggtgatggtgctaggggcggcggcgacgccgtcgtcgacctcgaggtcgaggcgaaccggaatcccgcgttggctgctgcggtggccgccgcggcaacagagatagaccgtggaagcaagggtggcttgggattggaaccgaagtccgtctcgtcgttgcatcgtgctacatcggctggtactgacacagaaaagctgggccttatccaagtcgcaagccttatagagtcatcggcaaagaaggggactacagagctcaatctccggggtaagctggtggaccaagttgagtggctccctgtctcgcttgggaagttacaggatgtcacagagcttgatctatctgagaataggatcatggcactcccatctacaattggtagccttagatacttgacaaagcttgacctccactcaaaccagctgatcaatctgcctgatacctttggggaactttccagcctgattgatcttgacttgcgtgcaaaccagctaaagtctcttcctacatcatttggaaatctcatgagccttgccaatcttgacctgagctcaaatctgttgaaggtccttcctgattgtttaggaaagttaaaaaacttgagaaggttaattgctgagacgaatgaggttgaggagctaccctatactattggatcatgcacctcccttgtggagcttagattagattttaatcagctcaaagcccttccagaagccattgggaagttggaaaacctggaaatcctgacgttacactacaacagaattaaaggtctgcctacaacaattggtcatcttaccaggttgagggagctggatgtcagtttcaatgaagttgagactatacctgagaacatttgctttgcagccagccttgtgaaattgaatgtcagcaggaactttgccgacttaagagcccttccaaaatcaataggggaacttgagatgctagaggagctcgacatcagtagtaaccagatacgagtacttccagactcttttggtcatctctcaaagctacgtgtgtttcatgctgatgaaactccactggaagtaccgcctaaggcctagtttggataatctagtaatgagtggtattggagtggattaaaatgtattgggagagtatttgatctattggggatttataccctctccaatccctccaaaacactctaatcccaaagtatccaaactaggcctaaagaagttgtaaaattaggggctcaggagctggttaattatatgaagaatatggctgctgcaagggaagtgagccagaaggaaacagatgagaggagcttttggacctggctccgctcactgtttggttgcgaacagaatcaaggatcgggaccagttccagtttagctgaaccatttcatctgcatgtattgtcatgaaattgttcagtcttggtccatctctcaagtcagcgatgaaacgaggtatggttatcattattattttccacttttttgtttgtgtatacaatgtatatatgtagcgctttcttgtaaaggttggtttatttctgtgtaattcatctgtatgaaacactgtcatgttactcaacgaaacacgagcggcccaacatttctattaaatacaggatgcattctagcac

SEQ ID NO: 93281 - DNA, 3885 bp, Zea Mays
cgccgaggcacagaacaaccgacagggtatttactccccccgcccttgtctcgcccccatttctcgccctttcacttccatcgctcccctcctcctctccgattctctccgcttcctccaaacttttccctttcctacacctctcgctaaatcctcttcctctcatcctgtactcgccctgccatgcttcgccgtggattttaaccgcttgcttctattcggaggaacacagtcatcaggcgagccagccagggacgggagtaagagagaaggggttcttccatttatttttttcctctcggttgatctgccgcgccggccggtcgaggaagggaggaagaagtatgtttggggactgccaggtcctatcctcgatggccgcggtggccggggcctcctcgtcggcggacacgctcttcatccccaacccaggcgccctcgccgggttcatgtcctcctcctccgccgccgccgccatgccattccaccatttctccaccaccgccgcctccctcgtaccaaaggaggagggcggcatcatgggtgcgctccaggtggccaaggacgaggacatggatcagctggagatggagatggagctcagcggcggctccgggagcggccacctggacggcctgctcagcttcgccgacgtggacgacgaccggccggagcagaagccgcagcacagcggcctcgagctccagacgacggcggatgccgccggacagcagcagcagctggccaccgccaacggcaagaagaaacggtaccaccgccacacggcacaccagatccagcagatggaagcgtaagacacacacatatatacgcttgccttttcatatataataataatcttcttctccgatatattataatctcttacggatgcatgcatggcaatggcaatggccggcattgcacggacgacatacgcacaggctgttcaaggagtgcccgcacccggacgacaagcagcggctgaagctgagccaggagctggggctcaaaccccgccaggtcaagttctggttccagaaccggcgcacccagatgaaggcgcagcaggaccgcgccgacaacgtcctcctccgcgccgagaacgagagcctcaagagcgacaactaccgtctgcaggccgccatccgcaacgtagtctgccccaactgcggccacgccgccgtcctcggcgagatgtcgtacgaggagcagcagctccgcatcgaaaacgctaggctcaaggacgagctcgaccgcttggcgtgcatcgcgacccggtacggcggcggccgacagccgagcatgtcgtcgtccgcgctggtctgcttatcggcgccgccgccggtgctcatgccgccgctcgacctcgacatgaatgtctactctcgccatttcaccgaccagtccccagtcatgggttgcggcgacctcatccagtccgtcctcgggccgccgtcgcagcagatcaccgggggcgccgagcaccacgcctccacgccgtcgttcatgggcgccatggcgcctgtccaggagcaggacaggcagctggtgctcgacctcgccgccgcggccgcagacaccctcgccaagatgtgccgcgcgggcgagtcgctctggctgcggcgccgtggcgcgagctccgaggtcatggtagccgacgagcacgcccggatgttcagctggcctgtcaacggcggccagcaggatagcagtgcctcccctggcggcgccgcggccaggaccgagggatcaagggacggcaccgtggttatcatgaacagcatcacgctggtggatgccttcctggacgctaacaagtggatggagctgttcccttcgatcgtatccaaggcaagaaccattcagatcataaaccatggagctgcatctggtcatatgggcagtggatctctcctcttgatgcaagcggagttgcagttcccgtctcctttggtgcctgcgcgagaggtggtgttcttcaggtactgcgtgcacaacggcgacgaggggacctggtccctcgtcgacttcccggccgaggggttccagctggaggcactgcaaaccccatctgttgtaaggtgctgtaggcgcccctccggttgcatcatccaggacatgcccaatggctactctagcgtggtgtgggtggagcacacggagattgttggagaggagaagccactgcaccaggtgttcaaggactacgtcgccagcggctctgccttcggcgccacgcgctgggtatccctgctccagcgccaatgcgagcgccttgccagtgagctcgcccgcaacatcgccgacctgggagtgatccgcacaccagaggcgagaacaaatatgatgaagctgtcacagcggatgatcactagtttctctgccaacatcagtgcttctgggagccaatcttggacttcactctcagaaactacagaggacacgatcagggtcactactcgcaagaacacggatccggggcagcccagcggtgtcattctaaccgctgtctctacaagctggcttcctttcaaccatcagaaggtcttcgagcttcttgccgatgaacaacagcgttgtcagcttgagattatgtcaagcgggggctcacttcacgaagtggcacatattgcaaatggatcacacccaaagaattgcatttctcttcttagaatcaatgctgcaagcaactcatcccagaacgtggagctcatgctgcaggagagcagcacccaccccgacggcgggagcctcgtggtgtttgcgaccgtggacgtggacgccatccaagtgacaatgagcggcgaggacccttcctacatccctctcctcccgctgggcttcgccatcttcccggccgccaacccttcggctgcagcaaccagcgccgcaggctccggcgacggccaaagcagcccagcaggtaacgccgacgagcccgccagcggctgcctcctcaccgtgggcatgcaggtgctcgctagcgctgtgccctcggctaagctgaacctctcgagcgtgaccgcgatcaacagccacgtctgcaacgccgtccaccagatcacagccgcgctcaagggcgctggggcgagcggggccgctgaaccggcggctgctgcctccgagtagtagcaagagcgggagcagaggagagcagatccatacaccacaacaaaagccaaattgccttccaggtccggttgtttctgctgacagacatcccagtgcaagagagggtttgacaggagcccgaaaccaacacacggaaagttcaaaaaccccccttctctttcccgccatatgcctcttaaaatgacaaaaatacccctgaccgaacgaagagaatggtgggggcattttgatcattttgggaagctagtgcggtgtcatctacagctactggaaaagaaagggtcctgtcaagctctcacttgtgccggccgattctctatcacgcagaaaacaatccggggcagcttggtcatgcaggtgttgctgctggtagctctctctctctcggtctgttcccttgctcagaagtcagaactgtgaagaaggttagcttcgattggtatgcttatttcgatttttgtaataataataagacgggagatttacctagtagttcgcgcgtaatggtcgggcgtagagccgtgtaactctgtattagaagagactgaggacttgattgtttaggagagcaagagaaaaggtgcgagaggaggagtcaagagcgaaccaaaccagttgtgaccatctgatcccaggctatcagggaagaagggtcttggttcgggaattgacttgttccctctctgcaccgcctgtttgtgctgctactcaagctcgtttgattacgttggtaggttgtttttatcatgc

SEQ ID NO: 93282 - DNA, 3792 bp, Zea Mays
caacaagtaacagcgccggctggccgtgtccgtcgctgctgctgctgctgtgaggaagacgagagcacagggcaaacggaggagaaggagaaggagaaggcggccgacctcttctccgtcttcaaccttgcgccgcgtccagcgcgtaggtgaggagccgagtttagtagagtactctactaaacaaacaagcaaagcaaggccgacgaatcgagggagagggaggaagcaggccagcacggggtacgccgaggcacagaacaaccgacaggtcatcaggcgagccagccagggacgggagtaagagagaaggggttcttccatttatttttttcctctcggttgatctgccgcgccggccggtcgaggaagggaggaagaagtatgtttggggactgccaggtcctatcctcgatggccgcggtggccggggcctcctcgtcggcggacacgctcttcatccccaacccaggcgccctcgccgggttcatgtcctcctcctccgccgccgccgccatgccattccaccatttctccaccaccgccgcctccctcgtaccaaaggaggagggcggcatcatgggtgcgctccaggtggccaaggacgaggacatggatcagctggagatggagatggagctcagcggcggctccgggagcggccacctggacggcctgctcagcttcgccgacgtggacgacgaccggccggagcagaagccgcagcacagcggcctcgagctccagacgacggcggatgccgccggacagcagcagcagctggccaccgccaacggcaagaagaaacggtaccaccgccacacggcacaccagatccagcagatggaagcgctgttcaaggagtgcccgcacccggacgacaagcagcggctgaagctgagccaggagctggggctcaaaccccgccaggtcaagttctggttccagaaccggcgcacccagatgaaggcgcagcaggaccgcgccgacaacgtcctcctccgcgccgagaacgagagcctcaagagcgacaactaccgtctgcaggccgccatccgcaacgtagtctgccccaactgcggccacgccgccgtcctcggcgagatgtcgtacgaggagcagcagctccgcatcgaaaacgctaggctcaaggacgagctcgaccgcttggcgtgcatcgcgacccggtacggcggcggccgacagccgagcatgtcgtcgtccgcgctggtctgcttatcggcgccgccgccggtgctcatgccgccgctcgacctcgacatgaatgtctactctcgccatttcaccgaccagtccccagtcatgggttgcggcgacctcatccagtccgtcctcgggccgccgtcgcagcagatcaccgggggcgccgagcaccacgcctccacgccgtcgttcatgggcgccatggcgcctgtccaggagcaggacaggcagctggtgctcgacctcgccgccgcggccgcagacaccctcgccaagatgtgccgcgcgggcgagtcgctctggctgcggcgccgtggcgcgagctccgaggtcatggtagccgacgagcacgcccggatgttcagctggcctgtcaacggcggccagcaggatagcagtgcctcccctggcggcgccgcggccaggaccgagggatcaagggacggcaccgtggttatcatgaacagcatcacgctggtggatgccttcctggacgctaacaagtggatggagctgttcccttcgatcgtatccaaggcaagaaccattcagatcataaaccatggagctgcatctggtcatatgggcagtggatctctcctcttgatgcaagcggagttgcagttcccgtctcctttggtgcctgcgcgagaggtggtgttcttcaggtactgcgtgcacaacggcgacgaggggacctggtccctcgtcgacttcccggccgaggggttccagctggaggcactgcaaaccccatctgttgtaaggtgctgtaggcgcccctccggttgcatcatccaggacatgcccaatggctactctagcgtggtgtgggtggagcacacggagattgttggagaggagaagccactgcaccaggtgttcaaggactacgtcgccagcggctctgccttcggcgccacgcgctgggtatccctgctccagcgccaatgcgagcgccttgccagtgagctcgcccgcaacatcgccgacctgggagtgatccgcacaccagaggcgagaacaaatatgatgaagctgtcacagcggatgatcactagtttctctgccaacatcagtgcttctgggagccaatcttggacttcactctcagaaactacagaggacacgatcagggtcactactcgcaagaacacggatccggggcagcccagcggtgtcattctaaccgctgtctctacaagctggcttcctttcaaccatcagaaggtcttcgagcttcttgccgatgaacaacagcgttgtcagcttgagattatgtcaagcgggggctcacttcacgaagtggcacatattgcaaatggatcacacccaaagaattgcatttctcttcttagaatcaatgctgcaagcaactcatcccagaacgtggagctcatgctgcaggagagcagcacccaccccgacggcgggagcctcgtggtgtttgcgaccgtggacgtggacgccatccaagtgacaatgagcggcgaggacccttcctacatccctctcctcccgctgggcttcgccatcttcccggccgccaacccttcggctgcagcaaccagcgccgcaggctccggcgacggccaaagcagcccagcaggtaacgccgacgagcccgccagcggctgcctcctcaccgtgggcatgcaggtgctcgctagcgctgtgccctcggctaagctgaacctctcgagcgtgaccgcgatcaacagccacgtctgcaacgccgtccaccagatcacagccgcgctcaagggcgctggggcgagcggggccgctgaaccggcggctgctgcctccgagtagtagcaagagcgggagcagaggagagcagatccatacaccacaacaaaagccaaattgccttccaggtccggttgtttctgctgacagacatcccagtgcaagagagggtttgacaggagcccgaaaccaacacacggaaagttcaaaaaccccccttctctttcccgccatatgcctcttaaaatgacaaaaatacccctgaccgaacgaagagaatggtgggggcattttgatcattttgggaagctagtgcggtgtcatctacagctactggaaaagaaagggtcctgtcaagctctcacttgtgccggccgattctctatcacgcagaaaacaatccggggcagcttggtcatgcaggtgttgctgctggtagctctctctctctcggtctgttcccttgctcagaagtcagaactgtgaagaaggttagcttcgattggtatgcttatttcgatttttgtaataataataagacgggagatttacctagtagttcgcgcgtaatggtcgggcgtagagccgtgtaactctgtattagaagagactgaggacttgattgtttaggagagcaagagaaaaggtgcgagaggaggagtcaagagcgaaccaaaccagttgtgaccatctgatcccaggctatcagggaagaagggtcttggttcgggaattgacttgttccctctctgcaccgcctgtttgtgctgctactcaagctcgtttgattacgttggtaggttgtttttatcatgc

SEQ ID NO: 93283 - DNA, 3561 bp, Zea Mays
caacaagtaacagcgccggctggccgtgtccgtcgctgctgctgctgctgtgaggaagacgagagcacagggcaaacggaggagaaggagaaggagaaggcggccgacctcttctccgtcttcaaccttgcgccgcgtccagcgcgtaggtgaggagccgagtttagtagagtactctactaaacaaacaagcaaagcaaggccgacgaatcgagggagagggaggaagcaggccagcacggggtacgccgaggcacagaacaaccgacagggtatttactccccccgcccttgtctcgcccccatttctcgccctttcacttccatcgctcccctcctcctctccgattctctccgcttcctccaaacttttccctttcctacacctctcgctaaatcctcttcctctcatcctgtactcgccctgccatgcttcgccgtggattttaaccgcttgcttctattcggaggaacacagtcatcaggcgagccagccagggacgggagtaagagagaaggggttcttccatttatttttttcctctcggttgatccaccgccaacggcaagaagaaacggtaccaccgccacacggcacaccagatccagcagatggaagcgctgttcaaggagtgcccgcacccggacgacaagcagcggctgaagctgagccaggagctggggctcaaaccccgccaggtcaagttctggttccagaaccggcgcacccagatgaaggcgcagcaggaccgcgccgacaacgtcctcctccgcgccgagaacgagagcctcaagagcgacaactaccgtctgcaggccgccatccgcaacgtagtctgccccaactgcggccacgccgccgtcctcggcgagatgtcgtacgaggagcagcagctccgcatcgaaaacgctaggctcaaggacgagctcgaccgcttggcgtgcatcgcgacccggtacggcggcggccgacagccgagcatgtcgtcgtccgcgctggtctgcttatcggcgccgccgccggtgctcatgccgccgctcgacctcgacatgaatgtctactctcgccatttcaccgaccagtccccagtcatgggttgcggcgacctcatccagtccgtcctcgggccgccgtcgcagcagatcaccgggggcgccgagcaccacgcctccacgccgtcgttcatgggcgccatggcgcctgtccaggagcaggacaggcagctggtgctcgacctcgccgccgcggccgcagacaccctcgccaagatgtgccgcgcgggcgagtcgctctggctgcggcgccgtggcgcgagctccgaggtcatggtagccgacgagcacgcccggatgttcagctggcctgtcaacggcggccagcaggatagcagtgcctcccctggcggcgccgcggccaggaccgagggatcaagggacggcaccgtggttatcatgaacagcatcacgctggtggatgccttcctggacgctaacaagtggatggagctgttcccttcgatcgtatccaaggcaagaaccattcagatcataaaccatggagctgcatctggtcatatgggcagtggatctctcctcttgatgcaagcggagttgcagttcccgtctcctttggtgcctgcgcgagaggtggtgttcttcaggtactgcgtgcacaacggcgacgaggggacctggtccctcgtcgacttcccggccgaggggttccagctggaggcactgcaaaccccatctgttgtaaggtgctgtaggcgcccctccggttgcatcatccaggacatgcccaatggctactctagcgtggtgtgggtggagcacacggagattgttggagaggagaagccactgcaccaggtgttcaaggactacgtcgccagcggctctgccttcggcgccacgcgctgggtatccctgctccagcgccaatgcgagcgccttgccagtgagctcgcccgcaacatcgccgacctgggagtgatccgcacaccagaggcgagaacaaatatgatgaagctgtcacagcggatgatcactagtttctctgccaacatcagtgcttctgggagccaatcttggacttcactctcagaaactacagaggacacgatcagggtcactactcgcaagaacacggatccggggcagcccagcggtgtcattctaaccgctgtctctacaagctggcttcctttcaaccatcagaaggtcttcgagcttcttgccgatgaacaacagcgttgtcagcttgagattatgtcaagcgggggctcacttcacgaagtggcacatattgcaaatggatcacacccaaagaattgcatttctcttcttagaatcaatgctgcaagcaactcatcccagaacgtggagctcatgctgcaggagagcagcacccaccccgacggcgggagcctcgtggtgtttgcgaccgtggacgtggacgccatccaagtgacaatgagcggcgaggacccttcctacatccctctcctcccgctgggcttcgccatcttcccggccgccaacccttcggctgcagcaaccagcgccgcaggctccggcgacggccaaagcagcccagcaggtaacgccgacgagcccgccagcggctgcctcctcaccgtgggcatgcaggtgctcgctagcgctgtgccctcggctaagctgaacctctcgagcgtgaccgcgatcaacagccacgtctgcaacgccgtccaccagatcacagccgcgctcaagggcgctggggcgagcggggccgctgaaccggcggctgctgcctccgagtagtagcaagagcgggagcagaggagagcagatccatacaccacaacaaaagccaaattgccttccaggtccggttgtttctgctgacagacatcccagtgcaagagagggtttgacaggagcccgaaaccaacacacggaaagttcaaaaaccccccttctctttcccgccatatgcctcttaaaatgacaaaaatacccctgaccgaacgaagagaatggtgggggcattttgatcattttgggaagctagtgcggtgtcatctacagctactggaaaagaaagggtcctgtcaagctctcacttgtgccggccgattctctatcacgcagaaaacaatccggggcagcttggtcatgcaggtgttgctgctggtagctctctctctctcggtctgttcccttgctcagaagtcagaactgtgaagaaggttagcttcgattggtatgcttatttcgatttttgtaataataataagacgggagatttacctagtagttcgcgcgtaatggtcgggcgtagagccgtgtaactctgtattagaagagactgaggacttgattgtttaggagagcaagagaaaaggtgcgagaggaggagtcaagagcgaaccaaaccagttgtgaccatctgatcccaggctatcagggaagaagggtcttggttcgggaattgacttgttccctctctgcaccgcctgtttgtgctgctactcaagctcgtttgattacgttggtaggttgtttttatcatgc

SEQ ID NO: 93284 - DNA, 4003 bp, Zea Mays
gtggacaacaagtaacagcgccggctggccgtgtccgtcgctgctgctgctgctgtgaggaagacgagagcacagggcaaacggaggagaaggagaaggagaaggcggccgacctcttctccgtcttcaaccttgcgccgcgtccagcgcgtaggtgaggagccgagtttagtagagtactctactaaacaaacaagcaaagcaaggccgacgaatcgagggagagggaggaagcaggccagcacggggtacgccgaggcacagaacaaccgacagggtatttactccccccgcccttgtctcgcccccatttctcgccctttcacttccatcgctcccctcctcctctccgattctctccgcttcctccaaacttttccctttcctacacctctcgctaaatcctcttcctctcatcctgtactcgccctgccatgcttcgccgtggattttaaccgcttgcttctattcggaggaacacagtcatcaggcgagccagccagggacgggagtaagagagaaggggttcttccatttatttttttcctctcggttgatctgccgcgccggccggtcgaggaagggaggaagaagtatgtttggggactgccaggtcctatcctcgatggccgcggtggccggggcctcctcgtcggcggacacgctcttcatccccaacccaggcgccctcgccgggttcatgtcctcctcctccgccgccgccgccatgccattccaccatttctccaccaccgccgcctccctcgtaccaaaggaggagggcggcatcatgggtgcgctccaggtggccaaggacgaggacatggatcagctggagatggagatggagctcagcggcggctccgggagcggccacctggacggcctgctcagcttcgccgacgtggacgacgaccggccggagcagaagccgcagcacagcggcctcgagctccagacgacggcggatgccgccggacagcagcagcagctggccaccgccaacggcaagaagaaacggtaccaccgccacacggcacaccagatccagcagatggaagcgctgttcaaggagtgcccgcacccggacgacaagcagcggctgaagctgagccaggagctggggctcaaaccccgccaggtcaagttctggttccagaaccggcgcacccagatgaaggcgcagcaggaccgcgccgacaacgtcctcctccgcgccgagaacgagagcctcaagagcgacaactaccgtctgcaggccgccatccgcaacgtagtctgccccaactgcggccacgccgccgtcctcggcgagatgtcgtacgaggagcagcagctccgcatcgaaaacgctaggctcaaggacgagctcgaccgcttggcgtgcatcgcgacccggtacggcggcggccgacagccgagcatgtcgtcgtccgcgctggtctgcttatcggcgccgccgccggtgctcatgccgccgctcgacctcgacatgaatgtctactctcgccatttcaccgaccagtccccagtcatgggttgcggcgacctcatccagtccgtcctcgggccgccgtcgcagcagatcaccgggggcgccgagcaccacgcctccacgccgtcgttcatgggcgccatggcgcctgtccaggagcaggacaggcagctggtgctcgacctcgccgccgcggccgcagacaccctcgccaagatgtgccgcgcgggcgagtcgctctggctgcggcgccgtggcgcgagctccgaggtcatggtagccgacgagcacgcccggatgttcagctggcctgtcaacggcggccagcaggatagcagtgcctcccctggcggcgccgcggccaggaccgagggatcaagggacggcaccgtggttatcatgaacagcatcacgctggtggatgccttcctggacgctaacaagtggatggagctgttcccttcgatcgtatccaaggcaagaaccattcagatcataaaccatggagctgcatctggtcatatgggcagtggatctctcctcttgatgcaagcggagttgcagttcccgtctcctttggtgcctgcgcgagaggtggtgttcttcaggtactgcgtgcacaacggcgacgaggggacctggtccctcgtcgacttcccggccgaggggttccagctggaggcactgcaaaccccatctgttgtaaggtgctgtaggcgcccctccggttgcatcatccaggacatgcccaatggctactctagcgtggtgtgggtggagcacacggagattgttggagaggagaagccactgcaccaggtgttcaaggactacgtcgccagcggctctgccttcggcgccacgcgctgggtatccctgctccagcgccaatgcgagcgccttgccagtgagctcgcccgcaacatcgccgacctgggagtgatccgcacaccagaggcgagaacaaatatgatgaagctgtcacagcggatgatcactagtttctctgccaacatcagtgcttctgggagccaatcttggacttcactctcagaaactacagaggacacgatcagggtcactactcgcaagaacacggatccggggcagcccagcggtgtcattctaaccgctgtctctacaagctggcttcctttcaaccatcagaaggtcttcgagcttcttgccgatgaacaacagcgttgtcagcttgagattatgtcaagcgggggctcacttcacgaagtggcacatattgcaaatggatcacacccaaagaattgcatttctcttcttagaatcaatgctgcaagcaactcatcccagaacgtggagctcatgctgcaggagagcagcacccaccccgacggcgggagcctcgtggtgtttgcgaccgtggacgtggacgccatccaagtgacaatgagcggcgaggacccttcctacatccctctcctcccgctgggcttcgccatcttcccggccgccaacccttcggctgcagcaaccagcgccgcaggctccggcgacggccaaagcagcccagcaggtaacgccgacgagcccgccagcggctgcctcctcaccgtgggcatgcaggtgctcgctagcgctgtgccctcggctaagctgaacctctcgagcgtgaccgcgatcaacagccacgtctgcaacgccgtccaccagatcacagccgcgctcaagggcgctggggcgagcggggccgctgaaccggcggctgctgcctccgagtagtagcaagagcgggagcagaggagagcagatccatacaccacaacaaaagccaaattgccttccaggtccggttgtttctgctgacagacatcccagtgcaagagagggtttgacaggagcccgaaaccaacacacggaaagttcaaaaaccccccttctctttcccgccatatgcctcttaaaatgacaaaaatacccctgaccgaacgaagagaatggtgggggcattttgatcattttgggaagctagtgcggtgtcatctacagctactggaaaagaaagggtcctgtcaagctctcacttgtgccggccgattctctatcacgcagaaaacaatccggggcagcttggtcatgcaggtgttgctgctggtagctctctctctctcggtctgttcccttgctcagaagtcagaactgtgaagaaggttagcttcgattggtatgcttatttcgatttttgtaataataataagacgggagatttacctagtagttcgcgcgtaatggtcgggcgtagagccgtgtaactctgtattagaagagactgaggacttgattgtttaggagagcaagagaaaaggtgcgagaggaggagtcaagagcgaaccaaaccagttgtgaccatctgatcccaggctatcagggaagaagggtcttggttcgggaattgacttgttccctctctgcaccgcctgtttgtgctgctactcaagctcgtttgattacgttggtaggttgtttttatcatgc

SEQ ID NO: 93285 - DNA, 740 bp, Zea Mays
agaaagtgacggattcctactatcacaatgactcggtagattatgtgttcacgttgattttggacagttttcaacaaagcggttctcatagaagttgactgaaaagttggacgttggcagtccgcggtagcttctagtggccgaaatcagcaaaaaagctaaaaacaaacgggaccttaaaaggtcataaggattgcacagtgtcttttcatcatgagcgattgtaagccaagatgtgattatttggggacacttcagtcatgatgttggtgtcgatctggacgctaaacataggaaaggaccgcctagtggggctctcttcggaggcgcggacggtccgtgtcattgggccggacggtccgcgacctggcgccggagcgactcctcatctgtttacgtccggacggtctgcacctagggctcagacggtttgtgatggcgtagagggtcttcttcttcgcagcagacctagatctcgccttcaagaagggatcctgtcgtggaggagagatcctaaggtgtgtcttggtgtcggcaggccacccaacatgcctctagtcgacgtagggccgaagagaggtgaagatttgaggttgagggaggctaaactagggctaaactaaaggtaatcctaatgcataaggtaaaaacgatagtaaatttgatttgaccgattgtggggggtttaatcagtcatagcccttcatctatataaagggggaggtctggacccattacaa

SEQ ID NO: 93286 - DNA, 160 bp, Zea Mays
cgaggaattgacccccgatgtgcccgactccgcgcccaacaccggtaaaaacttgttctgcgcgctgcagcgagctccgttgactgggcacgaggtcgcaatcacggcagagacagcgtcaccagcgctctgattctctcagttccccgcgcggtgctaa

SEQ ID NO: 93287 - DNA, 828 bp, Zea Mays
atttgtctatatatttaggaccaatactggccacctgctgattttcagcgcctgctatctacaaaactgaaggcattggttaattccggaaaattaatcaaggtaaaccaaaagtacaaaattgcaccaagtccaccccctcgggcagaataggcactaaggtatcctctgctgaagggatgaagtctgaaaataataatgctaaacggctaactaagcatcaagtgattgctgagctggagaagatgaaaggcacgcatgactaaggaagaggcagctgcctttgctgccaaggcagttgctgaggtagaagtagcaatagcagaagctaaggaagcagcaagagttgcagaggctgcagaaaatgatgctgaagctgcaaatgctttttcttgatgctgtccatttatcaatgagaaacaggaatgctgcttccatgatgcttcgagcttgctgatcctttacccatgcggtcatatggttttggccagcagcacaccggtgtctctgctgcaaagattttctagatatatgagtttcttgtatagccttatttatagatcacgacgcatcaactttgaggggttttcaacatcttgctgttggtcctttgccgttgcagcctttagacaatcaacagtatgataacaagaattatcgtgaaagtagtcttcatttaattttgttttctccccattgtgttgctttgtaattaaactctagccttttcgtttaattagttgtagtggtgttgtctagtagaacaactgtagtgaaaagaaaatgaagaaaatgtcagatagccacctacaccttagttatccaatt

SEQ ID NO: 93288 - DNA, 109 bp, Zea Mays
agttattccataagatatttgctactttacctagctgctcatgaaaaagctacctcaatgatagtgttaggtttcactaaactctatggcagttcaaacaaaaaggttg

SEQ ID NO: 93289 - DNA, 101 bp, Zea Mays
caaatcttatatgttctgcagtgaaatcatggcacttgactaatagatcagcctgtatgataatcctggtgtttcctattatttttcttttcttttgtcaa

SEQ ID NO: 93290 - DNA, 1382 bp, Zea Mays
taaatcaaaatataaggcccaattatagaactcatgattggagttgttctaatgcatttcggtttccaccactcagactgattaccacacaacatacatagaaaggaaagaatgtgcttagtttcagcaggcctcacccctccaatccaggaacagcagcacgagaagccgaggcagcagctactccgcctcgatgatcttcttgggctctgcgaaccagagaagaagcagccatatagacctatcgatcatgccgatcaaagggtaagacgaggcatgaagggattcggaccgtgtaactcgggcggtcgggcatctttgccccaacccacgccgcgtgtagcctctaggtactggtccacgaggtggcggcacttctggtggtggttgatcccctcgatgcggtagcaccagcggaggcgctcccggatgatcttggcggtctcgatctggatccacttctcccgcaccaggtgttcccggtactccagcatagccaccgggtccgcatatgggttcttcgggtcgaagttatccggtggctgctcatcgaactcaacctttgccttgcgcaccatcttctccgatcgcggccggcggccgcacggtcttccgattgggtgggggtgggggtgggggtgtgggattggtgtggtccgctcggtcggatgggagacggagctgatgggtcgatgagttaattatgcgaaccaggcctgtgggctgttagtcggcccaacagaatgaagcgtaggtgggccaagagacaagcttctgtcgccgactcactgtttcccgaagtctgcactctgcaggcggaaacgccagttcagccacgtggagagggcagatccgagaagagccggcgcgatgagctcgccggcgaggtcgaccatctcggccgccgaagacgtcgctgattccatcgacgcgctctaccgcaaggacgaggccctggctgaactcaagtctgaggtgatggaggcgctgcagagggaggtgaggtctctcgacgaagacaactggatgttcgccgcaccgcggtcccgcatcaacctcgtctccaggcctggtgcttacctgcccaagcaaaacgggaagctctcagagttggggcaagcatccaagaaaacaaggaacttctagggtgtacatgcttgtgcttgcaagaagcctggtccatgactccatgatggtagtgaaggctgtagcatcaaggatgatttgttcatgtttcaaatcaatctggttgcttcctgctaattcaatttcagacacatgtaaggatttttcaagtgattgtgacttcaatgtcatggtattgtttatgacttgtgcctttcctatcttctacaaactcaacctgcctagtttttcttaca

SEQ ID NO: 93291 - DNA, 116 bp, Zea Mays
tttttctttttcttttccttagcagtacctaattttgttttgttggtttgttcacgcaacagctcgtcgtgtttgtatatgatgcccgacagctcgttgtgttcatatctgattcc

SEQ ID NO: 93292 - DNA, 171 bp, Zea Mays
ggcgggggcgaccatgacggggaagaggatggcgtgaagagcggcggccacgtcgattacttggagatgagcgatgaggagctcatggagcagtgcgatatgggcacgttcaaggcgtccggccccggcgccagcgacaccgcggactcctcctcgccctcgccgacgcgc

SEQ ID NO: 93293 - DNA, 1256 bp, Zea Mays
ctcaattaaacaggtgcatgtgaaacttgcaatcaagtatccaggaagtgttaatagactagtggtaaatgaaagcctacaaaatttgtacagttatgcatgccatcggtaatgacatcatacaaatacgtttttgactgaaaatttactgctagacaaacccacggtgcacaatcaggaaatagtttgtcacttcaagttaatggtggctttttcatctgaatgctttggcctctagaatcactcttcgcgtatccataatcaccagtcactttcattaaaaggggtgattttctatctaattctgctatgcacctttttaagtaaaatgatattaggtgatcttttgttttggttatatcgatccaatttatcatcaatattaaatccacatgcctctaaaatagaggcaaacttttctatgtacaaagtgatcgatagtgttcttttcctataagtatatttatcctcttaagatgacatacagtctatatctgagctgaggctgctaggattttcttgtatgttttgtatggttttcattgttcaattgacttttcttctttttcaggtctgcatgtcgtggttattatgttcacaggttacttggtaggatttgctatgttcaaagctctgttcaacaataatgctgtactgaacgctgctggaggtatcttaggattagttggtggcatgctggttgagaccattctcttcatcatcagatcatcgagtaaagagttagcctctgttccaagatcaaagaaagctcagtagactcttgaaatgctatcatcagttagtggtgagagctataagtggccttagcttgtggaagtctatggagcattggtatgggtttgaaaatgcaattcatcgaatatatgcaattgacatccgatttgaatttgcatcatgaaggaatagggcagagggatttgatttcaatattattagctacccagaattttgtatctcgcccaatgattggctcgatgataattgaagaacatgtacctacggatatgtaaaaagtacatacaagaagatggtatgcttaacagcttaagtaccattggagagtatattggcttgaaattttgcagttaaaacttaaaagtaagttgttatgtttgcacgtgaggttttgtttgtgaataagcatattttatcctaagatttttctcagatttcttttttatcatagcattttgagtaaatcgaaatgaattttttgttggtatatgcacgattgt

SEQ ID NO: 93294 - DNA, 1773 bp, Zea Mays
ctaactaaaatacggttcccggtcaaaaaaacaccgaaatttggtcaggaaatacgaaattcgaatttttgaatttgaatacgtaaacccttcgggaatgcgaaattcagttatttcccgttttcagaaacggacggaattcagttcacaaacgggatgggtaacactgctgtagggtgattctcgaatctcgatctccctgctctacccgcatcaccccgccgttgccggccccttcctcccgcttcccacctcgccgtcgccacctcttcctcttcctcatcgccggcgcttgcgcgccccttctccaccccgttgaccgccgcacccacggcctcgccgttgcagcactcgtgcgatccggtcacgagtggagcgcacgagctcattcgctgcttccgcctccccctcttccttgccggagcccgcgcctcctctcctcgccggcgccttcgcctgctcctgcgcccccttctccacgtcgcacccacggcctcgtgttgctgccctcgtgagatccggtcgcgagcgcccgacctaggccgctgcctcagtctctcctcgctcggtcgcatcaccaccgccggagacggaccgaggtgctctgcgagactccgcgccatagagctcctcctacggcgggttcttttccgtccggtagctgggttccctgaagccagtcatggcgatgaccaccgccgtgacgggcctcgccgtcgcagcaaccgctcccattcgctccttcctctcgtccgccgccgcctctgtcagcctgcccgccgatcttcgtgacctcgcctccgacctagcctcggaccctgccgtctcctaccgctctctgcgtgccatctggtgcgccacctcgccggacacccgcccgccgctccgcgacctcctccagggcgccgacttcgtgctacccagcccgaaacctcgtgagaagagcgatgagctgaaggcgaggctggagaagctccgggagacacaggagaggaaggagtatgctgagctcgtcagggacgtcgctccgcccagcaaggatgacgctcctgagcccttttcatcctacaaggatcagataggatttggtctgcatgtcgtggttattatgttcacaggttacttggtaggatttgctatgttcaaagctctgttcaacaataatgctgtactgaacgctgctggaggtatcttaggattagttggtggcatgctggttgagaccattctcttcatcatcagatcatcgagtaaagagttagcctctgttccaagatcaaagaaagctcagtagactcttgaaatgctatcatcagttagtggtgagagctataagtggccttagcttgtggaagtctatggagcattggtatgggtttgaaaatgcaattcatcgaatatatgcaattgacatccgatttgaatttgcatcatgaaggaatagggcagagggatttgatttcaatattattagctacccagaattttgtatctcgcccaatgattggctcgatgataattgaagaacatgtacctacggatatgtaaaaagtacatacaagaagatggtatgcttaacagcttaagtaccattggagagtatattggcttgaaattttgcagttaaaacttaaaagtaagttgttatgtttgcacgtgaggttttgtttgtgaataagcatattttatcctaagatttttctcagatttcttttttatcatagcattttgagtaaatcgaaatgaattttttgttggtatatgcacgattgt

SEQ ID NO: 93295 - DNA, 325 bp, Zea Mays
gaactaaagctgggaatgcttttaaactgcacatgaacagaatatgaaggcagccttgttccaaaagcagtcttttggtgatgtacatggagcttttgcatagagtagtttatgtggcagttatctcaagaattttcatctggtggatgtacagggttcgtatagcaacatttccttgtagaaagttgaagctgtatatcgagggtggatttacatgtgtttatctttttgaccctaagcctctgggaagctgtgaaccatagcttcatgaaatatgcctgttgtgtgattcagtgtttgtgtttttcttgtttgtcattattgt

SEQ ID NO: 93296 - DNA, 553 bp, Zea Mays
aaaaaaaaaactagagagttcatcaggcagtcacgcggcggctctcctccccgcgcgtgcgcggcggcctcatccccgccggcgagcctccactcccctccgccggtacacctctatcgccggtggactccccctcggctgaaatgcggtccttgttgctggccattgctgcagctggtgcagaaaggtccggcgacggatgtggccggacgtcccgtatccacagcgacgaacgcgtcgaacccgtgatggctgacgttcgagaaggccatcgcctccgcaggtggggagctgtctaagcctgagatcctgtcttcgaccacggactcacgctttgcgaggcagctgggcatccctgccctcgggttttctccgatgaccagtgcgccgatactgctacatgaccataacgagtttctggaagacagagtgttcctgaggggcatccaagtgtacgaacatgtcatcagagcactaagctcgttccaaggctgattcgtaaacacaaaaaaagaaggaaaagtgctgttgcgtggagtgtaacatagcaggt

SEQ ID NO: 93297 - DNA, 1388 bp, Zea Mays
aagagcagatcgagagccgttcgcttcattcctcctcttgtctgctctgctgtcagtctgctctgaggaggaaggagtcatctcaggtcgagatcgaaaccgactccgcttccgccttccccgccgttggggttcatcagcagttcgcagggtaaagaaagggcggccgcgatgtgggtggaaatcctgtgcggcctggtggtctacaagatcatccaacgcgtcttcttcgccggcggcgacgacgcttcctacctcgccgacctcgactcctcccactccgatctctgcttcgccgtcgcctccaggctcgagaagctctacgccggtcgatgcttcgtcggtctccgcatccccgaccccgacgccggcgagcgccagcatatcgacgttgtcctcgttaccaagagggaggtgatggtggtagcgatcaaaaacttatctggttttgttgaggctgacaaggatggaaattggtcttgtcccactgacaagaagcataagcatgagatatttccaaacccggtattagaagtcaacagactagctgctaatcttcaatcatacttggagcaaaggggagcaaaactgcctgatgggcatatcatcgggagagttgttctgccaaatcccaactgcaggccttcctatactataagcacccaaccagaggtcatgctgtatgatcaatggaaggatctcaagacagactcaaagactggactctcagcatggattaaaggtgcatttactggaagcagaagtgacatgcaagattctgtactccagaatctacattttattctcagctcatcgcctatgtgggacaggttggaactcaaaggagacaaaaatgttcttggtgaattcattgaattcaaaggcaggcatgaggacgttcaacttctcaaaattctcaagaggtcaaaagtcagtcgcttcatcatccagaagtcaactctttttggtggttttggtaggtcacgagttcaaatattgtattctcctcgtgactatcgagctgaggggacttcatcttcagagttgaaagagatttctgtgaagcaatacacggagatcgttttccaaccactgcgttccaaaaaggctcggaagttcaagctgtccaatgttgtttctgtcacactgagtgcctagcaagcagaagcttgcctttcaaatttaggctagccaagtagccatatctcttgtattttatatttctcgtccgtgtgtgtaactcatcagttgtgtgcttctctgtttgcacttgtaattatgtgtctgttcttgatgatgagggaagtaacttacaacgacggctaactgaatatgcttcgtactgttgcttgacattatgtgcgctatggtacggggacctgattgaa

SEQ ID NO: 93298 - DNA, 479 bp, Zea Mays
cgtccttcccaactagatggccgcattgccgtttgtgaaggagctgctgaaggtgttgggcttggtcacccaatcgagtatatctgccttgatctggaggcacctaacgtgtgcaaatactgtggtctccgttatgttcaaattcaccatcactaaatagggaagatattgtcgtttactgctgcagaagtttggagttgaggagcttatgcatgcacacttgtttcacaacgttctggtactggactttgcactatgcttggcgtcaaaacattaactttgatgatcatcctatttttggatgactatttaataatcatgggttaactgtgtgttgattttttttactatagatgaattgtgctcccctatcagaatctatacaagctgtatgcattgaaatcatactctgaaagtctgaatatgaaaagtacgaaatttctgagggcaatttaatcttagaagttctaattttctgg

SEQ ID NO: 93299 - DNA, 144 bp, Zea Mays
tttttttacagacgtcttttttaggaggtccacatccattatgcggcataggtgttacatcgcgtatacaacttaaccgtacaccacttttagcaatggctcgtaatgcgacatctcttccgctaccagcaccttttaccttaa

SEQ ID NO: 93300 - DNA, 1777 bp, Zea Mays
gtattgctgcggagcaaatggaatcgtagtggacaaacggaattgctggccggcagctagtctgccactcgatccatcggcggacggcggcagtggccagtgggcagcggcaaagacgcgaatcaaccgagctggtctccctcgcccctgaagcaaagcaacctactccgcgctcgctcctccacttgctcccctcctcttccgtgctcgtcccgtccaccgccccctccccctccgcttacgccacacccagcccaatcaactcgccgcggaccgcgcccatgccctcatctccctgctcctcccaaaattgaccacccaatcaatcggctcctagtcctcacccccgacccgttcccatggatcgcaccacctccaacaacagcagcagtgccagtagcaccacctccgccggcagccagaacccgcacctcggcgtcaacaagctcggccgctccatccgcaaggccacgccgccgccgcccccgcagccacagcccgccgcaaaccgccctccccagccccagccgcaggtctacaacatcagcaagaaccagttccgcgacatcgtccagcagctcaccgccggtaccccgtccccaccgccgccgcagcaccaccaccagctcgcccaccgcccgccgcagccgcagcccaagacaccctccatgcgcctccagaggatccgcccgccccccatcgcaacccccgtcgcccggcccccgcccgtccatcccaaccaccacgccgtcccccacaaccctaaccacaactaccccgtcttccaccgtccgccgccgccgcagccccaagcacagcacatgcccgctcccggccctgcctgggctgattccccagtctcagcgtacatgcgcatcctcgagaactccctcttcagcgccaccccaccgggagccgctgccgcggcggcggcggctgcagctgcagctgcgggacagctgccacaccctcaccaccagccttcacatcctcatcccccgcctgtaccgtcgcctgggatactcccttccccaagcagcttcctcaacctgctctcgcccacgcccaggtcaccttatccgctactctcgccagggtttcagcacccgccgccgctcacgccgaacttccccgcgctgtctccgttggcggggaccggcatccttggcccaggacccatgccgccgccgccgtcgccgggtctctggttcccgcagtcgccgtctgggctcctttctccatcaggcttcttgccgagccttagcccaaggtggagagatatatagcaagtctgtgttttccacagcagctgcccctcttgagcaaggcggccgtgtaacatttgacggtagggacgtagccacggtgaggtcggttgggtcgtccgccggatttggctggagaaacacacaggtgggttgtaactttggactcccatatttattgctgctacttactgcttctgtgctgtggttgattagtcggtatgtaaaaggagatttgttatatatttgtaattgtataactgtgaaatatttcaattcattcacttctcttagatgcaaattctggacatgttctactttagattctcgagtgactaggcttggaaatctgtaattgtaaacctgtagttcatgaaagagtagctctttctgacaaatctcaaactgatgggtattgttggtctgcctgttaaggcatggcatgttcttcttattctttttttctcctttccgtattacttattggttgaggagcttcctggacattatct

SEQ ID NO: 93301 - DNA, 2263 bp, Zea Mays
atgattcagtaaaatcatataaattccacttcgaataaaaccttgtgcattaataacatgacaagtcttaaataattaagctaaaaaccgcaacgaaatagttagaatgaagcaaataaaacgatccagagcacggcgatccagagctcaaatggatcgcaggggatagcgtcgcagcgggtagtccttggcatagctgtaggcgcccgggatgccctgatacgccacgcggagctgctacccttcatgggcgccggggacaagatgaacaaacgatgggaagaggaacttcgaggctaagaactcacctgaaaatgtctgcggtgacggccgctaatggtgacgtctctggcttattaaatccgagttgaagatgacaagacgtgtgagcttgtctatttggatgactttaagcgtgtcttgtctccatttaggtgaagcactcgcctctctgtctatacgagcgaagcctgttttaccgctttccataatcgcaaaaatctcctacacgaccaaaagaaagtcgtcgttgcacctacacggcaaggtagagtgtgggtgctgcatgcccaatccaccagcatcaaccacgcaacggctagtacggagggagaggggggcaagcagcgagcagtgccgtctcctcgtccgttccctgaggctgagagcctgagacaacggtcatattaccgttgtcctgccacaattccaactttttaaacctgccgcagggccttcgccgtctcccccagctctctctcccgctccttcgccctcgcacgtcgtttctttcctcgcgagcgacgcgcgcttctcacccgcatcgccgatggagacgccgctgtccaccaggaggatcacccgctcgctggccgccgcatccgcccagaagagcgccgccgcagggatggactccgccgccctcttctccctgtccaagaacgccgtcgcgggggagacacacgcacagacgcgcgcggcccttcacgacatcaccaacgactcccccgtcgtcggcctcgccgcgggcagcctccacgccaccgacaccacccccgccaagacccgccgcagggccccgcgctgcacgccaggctccggggaggcgctcctgcgcggccaggtcaaggcgctcctgcacaaggtcgacgaggagcagggctgcgccgccgccggcgccctcgtcaggcccaagcgcatccaggcgctgctcggggtctccaggtccccggcccagcttcttgcgcccacgccggccaacacgccgcagatcggccccgtctccgcgcccagggaaggcgtcgggctgcatgacggcgccaccgtcgtgccctgcgtcctcgacgaagaggaactgctgattcctaagcttcaggtcattgcaggttccatccctccacctcagccagaggagaagttgggcgagtgccagctgaaccgtgcgctggtgttcgacgactccccggacaattccgacgagtccagcggatcagccgtcccatcatccgtctccctccaggagggcagcgccgggaagacatcgtcacctgaggagggtgacagctcctcagcctggtccactcaggtccatgccagctccgagaagggcgatcaagaagagctggacgtggaggagctggcggcagattacactgaagaagaggaggagttcgaggaggaggatgactgggaagaagacagcgatgacggctgctacgatgatctgtgcgatgagatgagccggatgaccgtgttggatgaaggggagaagaagaccgggctgccgcagttcgaggggaagcacaccaggttcatctacaacagtgacgacgagatcgagcgggaggaggtggccgatgcggctgaagctagggcggagctcggcgcactgatgctcagggggctgccggtgccggaggggaggcacctacgcttccacgacgacgaggatgacgaggaataagaatgttcagattgggtatcggcagtggttgtctttccctgacaccagccagccaaaattcatcatgggagctttgtttctacaatcgggtacagggagcaaatagctcttttgccaattcacaactcaactcttctgaaatgaaacatagtactatttcctggttacttaggtcttgtttggttatttcaatgtcacgtggattaatgtgtattaaaataaattgagatgtatttgctatggatttaaatcgactaaatatcactcaatctacatatagattaatagtgaaacgaacaa

SEQ ID NO: 93302 - DNA, 2253 bp, Zea Mays
atgattcagtaaaatcatataaattccacttcgaataaaaccttgtgcattaataacatgacaagtcttaaataattaagctaaaaaccgcaacgaaatagttagaatgaagcaaataaaacgatccagagcacggcgatccagagctcaaatggatcgcaggggatagcgtcgcagcgggtagtccttggcatagctgtaggcgcccgggatgccctgatacgccacgcggagctgctacccttcatgggcgccggggacaagatgaacaaacgatgggaagaggaacttcgaggctaagaactcacctgaaaatgtctgcggtgacggccgctaatggtgacgtctctggcttattaaatccgagttgaagatgacaagacgtgtgagcttgtctatttggatgactttaagcgtgtcttgtctccatttaggtgaagcactcgcctctctgtctatacgagcgaagcctgttttaccgctttccataatcgcaaaaatctcctacacgaccaaaagaaagtcgtcgttgcacctacacggcaaggtagagtgtgggtgctgcatgcccaatccaccagcatcaaccacgcaacggctagtacggagggagaggggggcaagcagcgagcagtgccgtctcctcgtccgttccctgaggctgagagcctgagacaacggtcatattaccgttgtcctgccacaattccaactttttaaacctgccgcagggccttcgccgtctcccccagctctctctcccgctccttcgccctcgcacgtcgtttctttcctcgcgagcgacgcgcgcttctcacccgcatcgccgatggagacgccgctgtccaccaggaggatcacccgctcgctggccgccgcatccgcccagaagagcgccgccgcagggatggactccgccgccctcttctccctgtccaagaacgccgtcgcgggggagacacacgcacagacgcgcgcggcccttcacgacatcaccaacgactcccccgtcgtcggcctcgccgcgggcagcctccacgccaccgacaccacccccgccaagacccgccgcagggccccgcgctgcacgccaggctccggggaggcgctcctgcgcggccaggtcaaggcgctcctgcacaaggtcgacgaggagcagggctgcgccgccgccggcgccctcgtcaggcccaagcgcatccaggcgctgctcggggtctccaggtccccggcccagcttcttgcgcccacgccggccaacacgccgcagatcggccccgtctccgcgcccagggaaggcgtcgggctgcatgacggcgccaccgtcgtgccctgcgtcctcgacgaagaggaactgctgattcctaagcttcaggttccatccctccacctcagccagaggagaagttgggcgagtgccagctgaaccgtgcgctggtgttcgacgactccccggacaattccgacgagtccagcggatcagccgtcccatcatccgtctccctccaggagggcagcgccgggaagacatcgtcacctgaggagggtgacagctcctcagcctggtccactcaggtccatgccagctccgagaagggcgatcaagaagagctggacgtggaggagctggcggcagattacactgaagaagaggaggagttcgaggaggaggatgactgggaagaagacagcgatgacggctgctacgatgatctgtgcgatgagatgagccggatgaccgtgttggatgaaggggagaagaagaccgggctgccgcagttcgaggggaagcacaccaggttcatctacaacagtgacgacgagatcgagcgggaggaggtggccgatgcggctgaagctagggcggagctcggcgcactgatgctcagggggctgccggtgccggaggggaggcacctacgcttccacgacgacgaggatgacgaggaataagaatgttcagattgggtatcggcagtggttgtctttccctgacaccagccagccaaaattcatcatgggagctttgtttctacaatcgggtacagggagcaaatagctcttttgccaattcacaactcaactcttctgaaatgaaacatagtactatttcctggttacttaggtcttgtttggttatttcaatgtcacgtggattaatgtgtattaaaataaattgagatgtatttgctatggatttaaatcgactaaatatcactcaatctacatatagattaatagtgaaacgaacaa

SEQ ID NO: 93303 - DNA, 1129 bp, Zea Mays
atggcatcatcgagtgctgctctcgccgtcctgatgctcagctgggcggcggctctcgcggccgcgtcgtcgccggtgacgttgttcgaagccggctacatgccgctgttcggcggcggcaacctagtaccgtcgcccggcggccgctccgtccgcctcaaacttgaccgccacaccggctccgggttcgtgtcccgatcgtcttaccaccatggattcttcagcgcttccatcaagctgcccgaccatcacaccgccggtgtcgtcgtcgccttctacctgtcgaacgcggacgtgttccctggcaaccacgacgaggtggacttcgagctgctgggcaaccggcggggccacgagtggcgcgtccagaccaacatctacggcaacggcagcacctcccgcgggcgcgaggagcggtacctcctccccttcgaccccaccctccggccgcacgcctacgccgtggcctggacccccacggccatcctcttctacgtggatgggacgcccatccgcgaggtggtccgcgtgccggccatgggcggcgacttcccgtccaagcccatgtccgtgtacgccaccatctgggacggctccgcctgggccaccgagggcgggcggtacaaggtcgactacgccttcgcgcccttcgccgccgacttctcgtcgctcgtcctgagcggctgccccgtcgccggcggcggcgacgacctcgcggccgccgagtgccaggtggccacgatgacggcggactgcgccgtcatgacccccgccaagcgcgccgccatgcgccgcttccgccgccggtacctcctctacacggtgtgccacgacatgtaccgctacaacggcaccgtcttccccgagtgcgacgccgacggctcggaacgcgacgacttccacaagtggggcgagtccaagcgcgtgtctcccagcagccgcgggtacaagcagcagcagcagcgcgcggacaaggccgtcgccgttgccgcgcctggccggcccgacacgtggccgaccgtagggacattacgtgtcgactaataatgatatgttacggttattaggagattgatggatttatattagtggacaaatacaaacaagcatagctggctgaaccgctgaa

SEQ ID NO: 93304 - DNA, 1487 bp, Zea Mays
aacgtccggatcgaagcctggctccacgcgaccgacgcagcggcggctccacgcgaccggcgcgatggcggctttgacgcgaccggcacggcggcggcgcacagccccgacaacgaccctccccgctgccttctccacgatccctacaacaccaattatagttggggaaggtgaacctcctccctcttgggatccggtaccaactccaaaagctatggttggaaaaggctccccaaggttcaacataggtggttccccaaagttgcgtaggttcattcctacaacaagtgctactaaaaagaagacttctcctaaatgcagtggggcaaaaaagagtggaagttctccaagagtagtgaaacaaagagcggattggaatccaggccttgagaggtctcttgttgacattctccatgaatttaaagaaagtggatatagaggtgacaatggttggaactcggaagggtggaatagaatggtcaaggagtttcatgtgaggaacaagtatgtctcctttacaaagtctcaaattcaggataaagaaggtcagctgaagagagactacaagatgctcaaagcagcaaagcaacagagtgggtccacctggaatgagaaaaggaatatggttgaaggaccaccagctttgtgggagaatctcattgtgacatttcctaaaatcaagaagtttaacaacaacaaggcaaccttcccgctctttgatgctttgggagagctttatgatggacacttggctgaagggacttggaattgcacttctcttgatgcaccgcgagaggaagaaccgaatgagcaacttcaggatgtagaagatggaccacaaggctttgatctgaatgttgttcatgatgtatatgatgaagttgatgatgcactcactgaaaggaatgaagatatgcttcaaggaagggctaatactctgtcacgagatgaagaaagtgggcagcgaagacctgctgcgtcaagaaacaagcaagaaaaggaactaaagaagcctagaaagactgacaacatagaaaatatgatgaacaaatacctagaaacgaggagcaagcaagtagaagatgaagctgcaagagaaaaggaagcaagagaaaaggagacaagagaaaaggaggcaactcaaagtgaagatttctccatcaaaaggtgcatatcagttctgaacacaatggaagaagtgaccaaactggagaaggcaaaagcatattcagtcttcaccaagagcaaagagaatagagagactttcatatgtgcatgtgaagcggatcaagaatcagctttgatttggctaagaaatgagatggcttagtaggtttgggcgatcaataggtgatgcttagcacatctggaggtttcttattttgaactgacatgcttagttataaagtggtgtttctttttagcacatctgttctatctcttagctgttgaagatgtcagtttatacctgtctatcaatccatgtc

SEQ ID NO: 93305 - DNA, 104 bp, Zea Mays
gaaattcaaaatagtacattttcaagcacatgtcatcaacaaaagcacttgaaaatcaattcatgctttccaaaataagaatctccaacaaaagtgataatgtt

SEQ ID NO: 93306 - DNA, 603 bp, Zea Mays
atgacacgtgaggatgcaagcaagcggggacagcagggggctcaccggggtgaacaacgtcgtgaccgaggctgcgcaagcgcgacgtgctgctcgacaaccaccaaggtgctgctgcagggagggaaagaacatttgcctgcaccgtggggaacagatcaccaacatccagggggaacgccatggggagggagcaagggagccgagagggaggaaacaccatgggggttggacgagctgatacgcgcagaggtggaaaagagggggcgcgagcaggaagatgggcttggccaccaagaagggctgcaggtcgtcgtgtccatggctgaggggaggggcgagctcagcgacggcgtggagaaagggctagagcagaggatgggcgagctcgactggggcgctcggggaagcggtgccaaggccgacgctaggaagggcgatgcagcggcgctggccaccggcgaggacgcggccgggtggaggtccgagcaggggatggatgccgtggcaagagctggaggcgagggcttggggatccgagttgagaggatggtgtgctctgctgctgggcggagagggcggctggaagatgagcccaggtga

SEQ ID NO: 93307 - DNA, 799 bp, Zea Mays
gaaacctccaaatatgataagtttccttgtgaaaccatgctgttttagtcatgttggagttggttaaagaaccagttaacaacttccttttatgcataaaacaggagatgaacctggaggcacctccagcattgggaggtggatgtgcagcccccatgctaggagattcgatggcaaaggctccaagctcaccttggatgcctttctctatgttgtttgcagcgatctcaaccaaagtgtctcctcaaattatggacatggttattggttgctatgaagagtttaagagtaagaaaataagccgatgcgaactaataaaggagctgaggcacgtagttggtgatagagtgctaatatcgacgataatgcgtctccaagataagttgcctcctgtggagaggcgtgagggaccgggtgcatcagctgccaagatggtggcgaaaccgtgaggcgggtgtcggtcggtcggtgggcgaggaatgcagaagggaggaagcagctgactttgacaaccctgtgggaagcagcaactatgaagcctcttgtgtcagtctttgtatggcggctgatgtttcttctttctgtgtcgtatgagtatgttttttcctagtagattgtatcaggagtttttcatttcaaattgagctgcgcatgttcttttgagcctttggaatagttcgtcaacgaaaaaggctccttttacctttctgataacagtgttgtgcattgttaattaatgtgggtcatatagaataatatatgatgtatacaatgtttttgagtttggctctcgctgcca

SEQ ID NO: 93308 - DNA, 2314 bp, Zea Mays
aggatcatactgtcttttggcgtttcttctccggctctttttcgtttgcctgtcggttacaaggtggaacgtcttcagaagcttctccactagattagtgtaaatagtagacttgttcaggtttagtttggttggaagaattagtttctggttcgtgttcatttctgctagcaataatggctgcgatgaacggaaaggtattgggtaaatgtggaaggaacatgaatagtctcaagagaaagcgggagaaccccgctgcatatgatgctgacatattccacaactctgaattgcatcagcaccctgtcaatgattctgctgttaggtttcatgttgataaagaccgcaaggcaaagatcgtgtgccacttcaacaagcaggttttgcagagctataagaacttcatgagtagcgcaccacctaaacgtattttgcttcgcataggtgctgtctggaaagacttcccagaaaagattgtcaaattggcacaagctgacttcagggcgaaaaaaacaatcacagaaacaggatatcagaaccagctatttttgctggattttgcccatatgacattcatagacacgaagacaggtcttcagaggccgattgcttggatcgatgaaaatggaaaccgctacttcccagaatcatttgtgcaagatcagaaaatatttatgaagaaagattttggcaacggatatcatgattacattagtgttgagtcaaatgggacacgagaaatgaatgaccagcttggaacatcagaaagttccgcagaaagttcaaacttcggttcaagtactgaagatgtttccagtcctaagagagctagagctgaaaataattccatcataaaaaaatactgtgatatgggagaagctattggagaaaatgagccatgcactttgttgcctacagcctgtaacctactaccacgccaagctaatctgggtgaggtatcacgtgcccagcgcactattgaagccgtggagaagctgttgttgcaggggatgggttcagttattgaatccaaggacattattggaatctacaggactccattattggatgaccatggacaagtccgttaccataatcacgaaaagcatgtacaggttaccagatgtcatcgtggaaacgcaaatgtccgttatgcatggcttccttgctccaaaagcactgtgcatgaaatgatgctgaatagttctttacaagttcataagccgcccattaagtgtgcagcctatggagagggcacattccttacaccagcaaatcgttctgatgcctgtgtgaaattctctgctgttgatgaaaatggcattgtccatatgatgttgtgccgtgttataatggggaacgtagaaatagttcaccctggatctaagcagcaccaacctagtagtgactattttgatagtggagtagatgaccttaaaaacccacaacattacattgtgtgggatatgaatctgaataggcacatctatcctgagtttgtagtcaccgtcaaattgccttctaaaacaaaagattacttcgtatcgcaagaagactgccagaattcatctgatctgtcactggtgttgaattctagttcacccgactgtatttcagaggagatgaacctggaggcacctccagcattgggaggtggatgtgcagcccccatgctaggagattcgatggcaaaggctccaagctcaccttggatgcctttctctatgttgtttgcagcgatctcaaccaaagtgtctcctcaaattatggacatggttattggttgctatgaagagtttaagagtaagaaaataagccgatgcgaactaataaaggagctgaggcacgtagttggtgatagagtgctaatatcgacgataatgcgtctccaagataagttgcctcctgtggagaggcgtgagggaccgggtgcatcagctgccaagatggtggcgaaaccgtgaggcgggtgtcggtcggtcggtgggcgaggaatgcagaagggaggaagcagctgactttgacaaccctgtgggaagcagcaactatgaagcctcttgtgtcagtctttgtatggcggctgatgtttcttctttctgtgtcgtatgagtatgttttttcctagtagattgtatcaggagtttttcatttcaaattgagctgcgcatgttcttttgagcctttggaatagttcgtcaacgaaaaaggctccttttacctttctgataacagtgttgtgcattgttaattaatgtgggtcatatagaataatatatgatgtatacaatgtttttgagtttggctctcgctgcca

SEQ ID NO: 93309 - DNA, 2317 bp, Zea Mays
aggatcatactgtcttttggcgtttcttctccggctctttttcgtttgcctgtcggttacaaggtggaacgtcttcagaagcttctccactagattagtgtaaatagtagacttgttcaggtttagtttggttggaagaattagtttctggttcgtgttcatttctgctagcaataatggctgcgatgaacggaaaggtattgggtaaatgtggaaggaacatgaatagtctcaagagaaagcgggagaaccccgctgcatatgatgctgacatattccacaactctgaattgcatcagcaccctgtcaatgattctgctgttaggtttcatgttgataaagaccgcaaggcaaagatcgtgtgccacttcaacaagcaggttttgcagagctataagaacttcatgagtagcgcaccacctaaacgtattttgcttcgcataggtgctgtctggaaagacttcccagaaaagattgtcaaattggcacaagctgacttcagggcgaaaaaaacaatcacagaaacaggatatcagaaccagctatttttgctggattttgcccatatgacattcatagacacgaagacaggtcttcagaggccgattgcttggatcgatgaaaatggaaaccgctacttcccagaatcatttgtgcaagatcagaaaatatttatgaagaaagattttggcaacggatatcatgattacattagtgttgagtcaaatgggacacgagaaatgaatgaccagcttggaacatcagaaagttccgcagaaagttcaaacttcggttcaagtactgaagatgtttccagtcctaagagagctagagctgaaaataattccatcataaaaaaatactgtgatatgggagaagctattggagaaaatgagccatgcactttgttgcctacagcctgtaacctactaccacgccaagctaatctgggtgaggtatcacgtgcccagcgcactattgaagccgtggagaagctgttgttgcaggggatgggttcagttattgaatccaaggacattattggaatctacaggactccattattggatgaccatggacaagtccgttaccataatcacgaaaagcatgtacaggttaccagatgtcatcgtggaaacgcaaatgtccgttatgcatggcttccttgctccaaaagcactgtgcatgaaatgatgctgaatagttctttacaagttcataagccgcccattaagtgtgcagcctatggagagggcacattccttacaccagcaaatcgttctgatgcctgtgtgaaattctctgctgttgatgaaaatggcattgtccatatgatgttgtgccgtgttataatggggaacgtagaaatagttcaccctggatctaagcagcaccaacctagtagtgactattttgatagtggagtagatgaccttaaaaacccacaacattacattgtgtgggatatgaatctgaataggcacatctatcctgagtttgtagtcaccgtcaaattgccttctaaaacaaaagattacttcgtatcgcaagaagactgccagaattcatctgatctgtcactggtgttgaattctagttcacccgactgtatttcagaggagatgaacctggaggcacctccagcattgggaggtggatgtgcagcccccatgctaggagattcgatggcaaaggctccaagctcaccttggatgcctttctctatgttgtttgcagcgatctcaaccaaagtgtctcctcaaattatggacatggttattggttgctatgaagagtttaagagtaagaaaataagccgatgcgaactaataaaggagctgaggcacgtagttggtgatagagtgctaatatcgacgataatgcgtctccaagataagcagttgcctcctgtggagaggcgtgagggaccgggtgcatcagctgccaagatggtggcgaaaccgtgaggcgggtgtcggtcggtcggtgggcgaggaatgcagaagggaggaagcagctgactttgacaaccctgtgggaagcagcaactatgaagcctcttgtgtcagtctttgtatggcggctgatgtttcttctttctgtgtcgtatgagtatgttttttcctagtagattgtatcaggagtttttcatttcaaattgagctgcgcatgttcttttgagcctttggaatagttcgtcaacgaaaaaggctccttttacctttctgataacagtgttgtgcattgttaattaatgtgggtcatatagaataatatatgatgtatacaatgtttttgagtttggctctcgctgcca

SEQ ID NO: 93310 - DNA, 348 bp, Zea Mays
caaggcaacttctcagccttgacttgggatcctagtgaagatggaaaagttatacttggtgttcttaggtgctcaagttatccaataaagacgaagtggctcaattatcatcaaaagtgctacaggttgctgtctaaagtagcgcctcctccattagggtcccggcataaaggttgtgtggtgaacgcccagagaggaggtgaccaagcttggatgcagcccctggttcatgacttgggtcagcttaatgggcaccaaccgagagagattcaagtatcatccatcagtaatccaatctcagctatgttgtcacacctggttctggggcaaaaccgaatgcatagcata

SEQ ID NO: 93311 - DNA, 1149 bp, Zea Mays
atgtccggcatcaagcctggcctcaccacatccacgaccatctatggtgctcccatcttcgaccaatactgcgataaggatctcggtggcaacgccatggagctcatccagcgcggccccatcggcatcgagcgcatgaacctctgcagcaccaccttcgctaggctgaccaagccagaccacgacgacgacctgtgctgcacaggcatcctcgacattcagttcgccagacggttgccgtctgccgacaacgaacctgtcttcaatggagagtcgtcttcctccaccactgcgccacccagatttccattggacctagagcaagtggtggacgacctcgttggtactgagacgttccaattcagccacgaccttctcttcttccacgccagcgtcgacaacgtgtgcctcaatgacaccgtcaccgatagggagagcacgctccagagccctcgcctagagtacgagtgcgtcagggtcagcaaggtcacagcgcagggccgcctcaaggaactcaatagcctcctcgccgccacaacgaagacgacatcatgcagcacacccgcgtccacccctgcgccggtctacggcttcggttccgtatgtacacgtgagaaggcggagatggtggagtcgcccgagtggaagtccgcgcctctcctggtgtctatgaccgctacaccgaacctggcttccacgtcttcatcctaccactcttccgcgatactgcccatcgggatcgacatggggcagctaagatcgatggtctcgacgccagagacagaggacgcggtgcggtgggtgacagaggcgtacaaggggaggcgcctcatggtaggcatcgacgacgtcaatctgttcaaggggatcgggctaaagttcctggcgatggagcagctgctcatggagcaccgggagctccgcggccgcgccgtgctggtgcagatcgccaaagccatgtttgaggcggcgtgctcgggcaagatctcgtgcgcggacatcttcgccttaaccgctagcgatgcgtcctacttcctcagcatcatcgacatcaacttcaccatacccgtggggcgctacgacaggactgtctccatcaccagcgagaccctgtcgaacctgcccccgtcgttcgccggcttcgactag

SEQ ID NO: 93312 - DNA, 746 bp, Zea Mays
tgtatatcccttggaaatttgttagtgattatgacttctgcttctcgtttctttttcacccagggaagggagctattcacaaatactttgtacaactcagttgttaatcagtacaatgtcctcaaatctgctatctttagagatcgtggagcagctgtatcaaacaatgccatctcactgtcacaaccatggcgatgaatgtagctttcccagtccagattcgatactgaagttaccttttcagaagaacaggtgaactgcaattgtgcaatttttctgggaaaaactcttgaagtttaatctttctgatatcactggactttaccaatcatggtggagcttattactctaatgcagatcctcgctaagatgtctggctggtcaagggtgattggtgattctgcagatagggatcctcgtaacattgcatgccgtcgtccgcaaattactgctccctcaggttgttcagtaatgtgctggttgggcactgaggaatccatcaggttgcatccttttgtctagacgtcgatttgtgttgttgaagtggtaaacattttcatcctgggctgtatcgtcatcatgtatagataggctcgagtctctctcttttttttttggctccacaattttttggagatataaaagcggcaggagttatgacatgcccacagtcggccctccttgtagaaatcctttggatgtaacctgtctctttcttatatacatactgaaagtcaaggcagata

SEQ ID NO: 93313 - DNA, 766 bp, Zea Mays
tatccttccatggagtaggcttgtcagcaactgaagaaacaaagtatggggatattacttgtcataccaagaatgctgatgagggaagggagctattcacaaatactttgtacaactcagttgttaatcagtacaatgtcctcaaatctgctatctttagagatcgtggagcagctgtatcaaacaatgccatctcactgtcacaaccatggcgatgaatgtagctttcccagtccagattcgatactgaagttaccttttcagaagaacaggtgaactgcaattgtgcaatttttctgggaaaaactcttgaagtttaatctttctgatatcactggactttaccaatcatggtggagcttattactctaatgcagatcctcgctaagatgtctggctggtcaagggtgattggtgattctgcagatagggatcctcgtaacattgcatgccgtcgtccgcaaattactgctccctcaggttgttcagtaatgtgctggttgggcactgaggaatccatcaggttgcatccttttgtctagacgtcgatttgtgttgttgaagtggtaaacattttcatcctgggctgtatcgtcatcatgtatagataggctcgagtctctctcttttttttttggctccacaattttttggagatataaaagcggcaggagttatgacatgcccacagtcggccctccttgtagaaatcctttggatgtaacctgtctctttcttatatacatactgaaagtcaaggcagata

SEQ ID NO: 93314 - DNA, 243 bp, Zea Mays
caacatttcccttttccatgacatggaagagaagctccaccagggccacaatgttgttttgatgtccaaccatcagacagaagcagatccagcaattatcgccttgcttcttgaaaaaaccaatccatggattagtgaaaacatagtttatgttgctggcgatagggttgttaccgatccactttgcaagccatttagcatgggaagaaatctcatttgtgtgtactcgaaaaagcatatgaa

SEQ ID NO: 93315 - DNA, 116 bp, Zea Mays
gagataaaggacatcttggcaaactaattagtccatgtggtttgtgatggactgtagcacccaatattctgattttgggattagtaaaatctttctaaaccaaagtaaagtgaccc

SEQ ID NO: 93316 - DNA, 670 bp, Zea Mays
cacctccacccatgctattgagccccactcttcgacccaaaccaccacactgcccagattcagatccacccagcgcagcgccgttgtgactactggatctcaccgtggttctcaccaccgtcagcaagcccacctccgagctctcctactagcggaaggtgcttcgcaccactgagcaagttgggtagtgctcgttggcctcaccgccgacgaatgtgtcctatcgcgcttcctctacaacgagtgcatcaaccactcctttgtctatgaggcaccgctccccgtctccatgtttgcgcttaggctcattgataaggcgcaggaaccgagtcgcgcggggcagagctatgcgggggcatgagccgtgcggggctgaaccgcatggagccaaagccgcacggagggcggagctgcgcacgccaggatggtccaagtgatggaccgttgggtccatcaccctaggtgaagagtatataaatatatgttgggcctgggaaccaggtggatgactagggtggattaggggtgactaatcaccctaatcggctgatcgcccaggccagctgatcaagcgatctaaaatccatggtcctcttcaacaatatttaaagtattccttgtatgcttccttctactgtatgtttggctaacaaatttttttgaggcatca

SEQ ID NO: 93317 - DNA, 1603 bp, Zea Mays
gttgtgtgcaaagaactagggttttagcggcgacggttccacttgacatgaacgcgagcgaccttcgcaccggccacctccacccatgctattgagccccactcttcgacccaaaccaccacactgcccagattcagatccacccagcgcagcgccgttgtgactactggatctcaccgtggttctcaccaccgtcagcaagcccacctccgagctctcctactagcggaaggtgcttcgcaccactgagcaagttgggtagtgctcgttggcctcaccgccgacgaatgtgtcctatcgcgcttcctctacaacgagtgcatcaaccactcctttgtctatgaggcaccgctccccgtctccatgtttgcgcttaggctcattgataaggcgcaggtccgtacctctccatgcgcttcctagactccccctcccttctgtgatcccgatctcttctcttacgagcccgaggcagaccgatagagtaagcattagaatttcaatggtttgaatcgttgtacgagttgagatctgtgcttcagtgaggttattgtttctccaatctgcgatccgtttcagttaacacaatagccagatctgaggctattgttgtacgagatggcatggggcaatgagcaattgttgtacgagtcgagatctgaggcttgcactcagcactcttaacacaatagccaatacatttgtgcaaatcttgttttagttaacctactgaagtttttatttttacaatcatgaatcatcatacctactaatatggcctctggaaccaagagcatattcaatagatttactgctcctttttttgttatgcttggtgtccttgctcaactttgcctactagccgtgcttgcaaggttgggcatggtcgcaaggcataccttgctaggcaaggtgagtcaaattggttatttaatctgaccacattataggatgctgcaagtgttgcagctcttcatcacttcatgtatatcaactaattatcttgtggctagcaatgcagggaggggagttaagttggtttacaaagtctatatggtcagtaggttcccaatttaaaacaactaaagtacaaactgacagatatgcaagtctacatttgtttaacaattgtcaaaaagatgttgcttagtaacttcttcaataatatgaatcaaatatgctatatattagggggtactggattcaggaattgtcaaatgtatttggttttttatagtttctttcaaacttttgcagcctatgttcaatgtgaagttggttagagtttcagattttataatatctcatttgtcttgttctttaggttgcagtctgtatcagacctcatgtgttcagttagtgttattctgtcactaggatatgcatacaatattgtaattgagcatagtctgtttacttcatgttactctgttcgattaaatagggtagatgttactgtatttgagtttttagattaaaagatatagaagtttagcatcctccaaagttaaggtaggcaacatgtcattctatctcgctttttaatattgatcagctgtcgatcccgctttttaatattgatcagctggtttgggacgtaaca

SEQ ID NO: 93318 - DNA, 1884 bp, Zea Mays
gcttccatgctccacggcacgcgcaggaggacggcgccgctcgcagccgctttcttcgcttccaagccccagcctcagcctccgccgcagctgccaacgccgcagatagtcgaagccgccgtcgctcgctgcccctcagacggcatcgcgctctccttcttcctgtggtgtgcccgccgccccggctatttccacccgccttcctccttcgaccgcctcctccccgccgcctcccgcctcgcctctcgcctcggcactgccaacaagcttatccgcgagctccaggccctcggcgtccacgtcaagccccagactttcctgctcctgctcaggctctactggcgcggggggctctaccctatcgtactcgatctgttctatcaaatgcgcctttggggattccaacccaatgccttcgcctgcaatgtcgtcctcgacgtccagctcaggacaggccatctcgacgcagcgcgacacacgttgcagtactacccggcacccaattacctcacctacgccattgtgctcacccatctctgcagggctgggggctggtcaggagcccggagttgttttattgaaatgctacagctggggtttgtcccaagtgcagcttctctcactgcggtttttgcctgctgcagtaaggctggaactatgtctgagcttctgcagctgttttctttcgcgcttgtttcgggttgcaatctcacctcagccatgtggacatgtttgatcgctcgtctgtgccgtgaggggcgactagaggaggcttgtaatatgcttgcaaagatggcggattctggttcttctccttcagtggtcacctacactccacttgtcaggggattgttgcgagctggtaggcatgaaaaggccagcgagcttttggggtcaatgatgtccgctagttgcagaccagacattgttttgtataatgttctgatggacagcatgctaaaggagagaagatacaatgaggcactaaatatttacatgcatattcttggcagtcagataaagccagatgcatacactttatctactttagctcaggtattgcagttttcacagaatatgggccttcttcacagcttgattttaagctccgatatctctcttgatcttgtggcctgcaattctgtgttgagtagtctgtgcaaatcaggttttccatctgaagccatccaattctacattgatagaattgacacgtgcaccagcccagacagctacactcatgctgggttactggatagtttgtgccagttaggaagggtaaaccatgcaattgatgtctaccacaatatcattgccagtgctcctgaattgaatgcatatgttcatgcagcaatcctccgtggtcttgttagacagggccagagccttgcggccttaaggattttaagagaggctgtacggaaaaattatgctgttgattctgtgtgctacactgtggttttacatggtcttttccgtgtgcatctggtggaagaggctttcaggttgttcgaccagatgaaaaattcaggattagcacccaacacttgtacatacaatgtgatgctttgtgggctttgtaggaccagggatctccatgctgtcaagcagttgttaacagaaatggaatgtgcggatgcaaaaatggacagtatatcattcaacacagtagcagtgctcctaattaagtcaaagcgcatcgactctgctgttgcattgatcagagacatgctaaatctaggcatgaagcctagtaccaaaactcgtttgttactttctcagtccactgtctataaatctgttttggtggataatgccactcccactgtagaaagcgatgggtcagactcgtccagtgatctccttgtatgctcagcttcatag

SEQ ID NO: 93319 - DNA, 1085 bp, Zea Mays
gtactgatggacttactatagccacttgtaatgtctttgtcatcatagtaatttagttacattttatttggttgacattgacgatggtacagtaaattgtctaaaaataatttggatagactatcctgtttgagtgttcgacatgccttttaatcacatcataactatagtatttttttgtgatttgatacttctttggtctaaaatttagttttatgtacccttagatcaatagtcttattggaactaaggtggagtgggtttatcatatgttacaagcattcaacagcggcaaccttgccctctaccaagaactttgcagggttcacaatgctgctcttactgcacaaccagctttggtgcagaatgagcggaagctgcttgagaaaatcaatattctttgtctgatggagataatctttagtcggccatctgaagatagaactattccattaagtgttattgctgagcggactaagctttcaatcagtgacgtggaatgtcttcttatgaagagcctctcggttcatcttattgagggaataattgatgaagtggacagtacagttcacgtatcatgggtccagcctagagtgcttggaattccacaggttaaggctttgcgcgaccgcctggatgcctgggttggaaaggtgcataccacattgctttcagttgaggcggaaacacctgatcttgttgctgtgtaatttcacagctgttacacttccgcgagaggcttggtcagcaaggtcccatttgcaaaatgtgagatgctttgtgtgacacgtagtcattttctggataatgagatctgctgctgccctgagcgtttgtcttcctgcgcctactgatcaggacatgtaatttcttttttggtgccctcaggacatggatggttagaactgcacgcagtgtcacggagacgggaccaatggattgaaaatttcatactagtagggtgttactagtagaacacgatgcaggagaatcttgctggaacatgagttgtgcctgatgtttgcatgttgcactgcgataagacgtggatcatcattaacatattagctgtttttcagtgcaca

SEQ ID NO: 93320 - DNA, 965 bp, Zea Mays
gtactgatggacttactatagccacttgtaatgtctttgtcatcatagtaatttagttacattttatttggttgacattgacgatggtacagtaaattgtctaaaaataatttggatagactatcctgtttgagtgttcgacatgccttttaatcacatcataactatagtatttttttgtgatttgatacttctttggtctaaaatttagttttatgtacccttagatcaatagtcttattggaactaaggtggagtgggtttatcatatgttacaagcattcaacagcggcaaccttgccctctaccaagaactttgcagggttcacaatgctgctcttactgcacaaccagctttggtgcagaatgagcggaagctgcttgagaaaatcaatattctttgtctgatggagataatctttagtcggccatctgaagatagaactattccattaagtgttattgctgagcggactaagctttcaatcagtgacgtggaatgtcttcttatgaagagcctctcggttcatcttattgagggaataattgatgaagtggacagtacagttcacgtatcatgggtccagcctagagtgcttggaattccacaggttaaggctttgcgcgaccgcctggatgcctgggttggaaaggtgcataccacattgctttcagttgaggcggaaacacctgatcttgttgctgtgtaatttcacagctgttacacttccgcgagaggcttggtcagcaaggtcccatttgcaaaatgacatggatggttagaactgcacgcagtgtcacggagacgggaccaatggattgaaaatttcatactagtagggtgttactagtagaacacgatgcaggagaatcttgctggaacatgagttgtgcctgatgtttgcatgttgcactgcgataagacgtggatcatcattaacatattagctgtttttcagtgcaca

SEQ ID NO: 93321 - DNA, 1594 bp, Zea Mays
cattttcactcgctgttgctggtgctgcttgctcgggacgggaaccggaggtggggttgcgatggcgctgcagtacgtggaggcgcagcggcagttgcgcccggacctctccgactggtacgcctccctcgccgacctctaccagcggaagctatggcaccagctcaccctcaagctcgaccaattcttacagctccaggtcgcacagaccggagacactatcattcagctctacaacaatttcattgtcgactttgagaccaagattaatctgctcaaacttgcccattttgcggtgataacttctcgccagtaccctgataaggatgctgcaattactttcttagagggggtgatcacaaagctgcgtgagacaagggagtcacggatcaatgaaccaattctctatgtgaagatgcaaattgcagctattaatcttgagaaaggaaacaaaaaagagtgcaagaatttgttggaagatgggaaaaccactctggatagtatgactgatgtcgatcccacagttcatgctagcttttactggatatcatctcaataccacaaggcctgccaagaatttgcagagttctataagaatgctcttctctatctggcctacacaactgtggagtctctatctgagtcattcaagctagacttggcttttgatctatctctagcagccttgctgggtgataacatttacaactttggggagttgttagctcacccgattatcaatagtcttattggaactaaggtggagtgggtttatcatatgttacaagcattcaacagcggcaaccttgccctctaccaagaactttgcagggttcacaatgctgctcttactgcacaaccagctttggtgcagaatgagcggaagctgcttgagaaaatcaatattctttgtctgatggagataatctttagtcggccatctgaagatagaactattccattaagtgttattgctgagcggactaagctttcaatcagtgacgtggaatgtcttcttatgaagagcctctcggttcatcttattgagggaataattgatgaagtggacagtacagttcacgtatcatgggtccagcctagagtgcttggaattccacaggttaaggctttgcgcgaccgcctggatgcctgggttggaaaggtgcataccacattgctttcagttgaggcggaaacacctgatcttgttgctgtgtaatttcacagctgttacacttccgcgagaggcttggtcagcaaggtcccatttgcaaaatgtgagatgctttgtgtgacacgtagtcattttctggataatgagatctgctgctgccctgagcgtttgtcttcctgcgcctactgatcaggacatgtaatttcttttttggtgccctcaggacatggatggttagaactgcacgcagtgtcacggagacgggaccaatggattgaaaatttcatactagtagggtgttactagtagaacacgatgcaggagaatcttgctggaacatgagttgtgcctgatgtttgcatgttgcactgcgataagacgtggatcatcattaacatattagctgtttttcagtgcaca

SEQ ID NO: 93322 - DNA, 1742 bp, Zea Mays
aaattataatttaggagggtcattctaacgtcgtcttatatcagataaaatggttttcgcgtacccattagttcatgagcgctcttagttcattaccatatgtactcgtgttggtgcgttcgccccgtagcagccgtcgggcttctctgccttgtacttgcgatcgagtccagacctgcggagatagatctactagtcgaccgatccggatccttcccttccgtctcacgccgtcaccctcggagccgcagtcgccgtagcagatcttctctctaatcctatcggtcaacagctgcttgctcgggacgggaaccggaggtggggttgcgatggcgctgcagtacgtggaggcgcagcggcagttgcgcccggacctctccgactggtacgcctccctcgccgacctctaccagcggaagctatggcaccagctcaccctcaagctcgaccaattcttacagctccaggtcgcacagaccggagacactatcattcagctctacaacaatttcattgtcgactttgagaccaagattaatctgctcaaacttgcccattttgcggtgataacttctcgccagtaccctgataaggatgctgcaattactttcttagagggggtgatcacaaagctgcgtgagacaagggagtcacggatcaatgaaccaattctctatgtgaagatgcaaattgcagctattaatcttgagaaaggaaacaaaaaagagtgcaagaatttgttggaagatgggaaaaccactctggatagtatgactgatgtcgatcccacagttcatgctagcttttactggatatcatctcaataccacaaggcctgccaagaatttgcagagttctataagaatgctcttctctatctggcctacacaactgtggagtctctatctgagtcattcaagctagacttggcttttgatctatctctagcagccttgctgggtgataacatttacaactttggggagttgttagctcacccgattatcaatagtcttattggaactaaggtggagtgggtttatcatatgttacaagcattcaacagcggcaaccttgccctctaccaagaactttgcagggttcacaatgctgctcttactgcacaaccagctttggtgcagaatgagcggaagctgcttgagaaaatcaatattctttgtctgatggagataatctttagtcggccatctgaagatagaactattccattaagtgttattgctgagcggactaagctttcaatcagtgacgtggaatgtcttcttatgaagagcctctcggttcatcttattgagggaataattgatgaagtggacagtacagttcacgtatcatgggtccagcctagagtgcttggaattccacaggttaaggctttgcgcgaccgcctggatgcctgggttggaaaggtgcataccacattgctttcagttgaggcggaaacacctgatcttgttgctgtgtaatttcacagctgttacacttccgcgagaggcttggtcagcaaggtcccatttgcaaaatgacatggatggttagaactgcacgcagtgtcacggagacgggaccaatggattgaaaatttcatactagtagggtgttactagtagaacacgatgcaggagaatcttgctggaacatgagttgtgcctgatgtttgcatgttgcactgcgataagacgtggatcatcattaacatattagctgtttttcagtgcaca

SEQ ID NO: 93323 - DNA, 1800 bp, Zea Mays
aaattataatttaggagggtcattctaacgtcgtcttatatcagataaaatggttttcgcgtacccattagttcatgagcgctcttagttcattaccatatgtactcgtgttggtgcgttcgccccgtagcagccgtcgggcttctctgccttgtacttgcgatcgagtccagacctgcggagatagatctactagtcgaccgatccggatccttcccttccgtctcacgctgcttgctcgggacgggaaccggaggtggggttgcgatggcgctgcagtacgtggaggcgcagcggcagttgcgcccggacctctccgactggtacgcctccctcgccgacctctaccagcggaagctatggcaccagctcaccctcaagctcgaccaattcttacagctccaggtcgcacagaccggagacactatcattcagctctacaacaatttcattgtcgactttgagaccaagattaatctgctcaaacttgcccattttgcggtgataacttctcgccagtaccctgataaggatgctgcaattactttcttagagggggtgatcacaaagctgcgtgagacaagggagtcacggatcaatgaaccaattctctatgtgaagatgcaaattgcagctattaatcttgagaaaggaaacaaaaaagagtgcaagaatttgttggaagatgggaaaaccactctggatagtatgactgatgtcgatcccacagttcatgctagcttttactggatatcatctcaataccacaaggcctgccaagaatttgcagagttctataagaatgctcttctctatctggcctacacaactgtggagtctctatctgagtcattcaagctagacttggcttttgatctatctctagcagccttgctgggtgataacatttacaactttggggagttgttagctcacccgattatcaatagtcttattggaactaaggtggagtgggtttatcatatgttacaagcattcaacagcggcaaccttgccctctaccaagaactttgcagggttcacaatgctgctcttactgcacaaccagctttggtgcagaatgagcggaagctgcttgagaaaatcaatattctttgtctgatggagataatctttagtcggccatctgaagatagaactattccattaagtgttattgctgagcggactaagctttcaatcagtgacgtggaatgtcttcttatgaagagcctctcggttcatcttattgagggaataattgatgaagtggacagtacagttcacgtatcatgggtccagcctagagtgcttggaattccacaggttaaggctttgcgcgaccgcctggatgcctgggttggaaaggtgcataccacattgctttcagttgaggcggaaacacctgatcttgttgctgtgtaatttcacagctgttacacttccgcgagaggcttggtcagcaaggtcccatttgcaaaatgtgagatgctttgtgtgacacgtagtcattttctggataatgagatctgctgctgccctgagcgtttgtcttcctgcgcctactgatcaggacatgtaatttcttttttggtgccctcaggacatggatggttagaactgcacgcagtgtcacggagacgggaccaatggattgaaaatttcatactagtagggtgttactagtagaacacgatgcaggagaatcttgctggaacatgagttgtgcctgatgtttgcatgttgcactgcgataagacgtggatcatcattaacatattagctgtttttcagtgcaca

SEQ ID NO: 93324 - DNA, 1979 bp, Zea Mays
aaattataatttaggagggtcattctaacgtcgtcttatatcagataaaatggttttcgcgtacccattagttcatgagcgctcttagttcattaccatatgtactcgtgttggtgcgttcgccccgtagcagccgtcgggcttctctgccttgtacttgcgatcgagtccagacctgcggagatagatctactagtcgaccgatccggatccttcccttccgtctcacggcaagtatcttccctcttcccctctgctcctgccaggctgccacacctccgccagcgctagggttttcattttcactcgctgttgctggtggttgttacccttcctctctctctcagccgtcaccctcggagccgcagtcgccgtagcagatcttctctctaatcctatcggtcaacagctgcttgctcgggacgggaaccggaggtggggttgcgatggcgctgcagtacgtggaggcgcagcggcagttgcgcccggacctctccgactggtacgcctccctcgccgacctctaccagcggaagctatggcaccagctcaccctcaagctcgaccaattcttacagctccaggtcgcacagaccggagacactatcattcagctctacaacaatttcattgtcgactttgagaccaagattaatctgctcaaacttgcccattttgcggtgataacttctcgccagtaccctgataaggatgctgcaattactttcttagagggggtgatcacaaagctgcgtgagacaagggagtcacggatcaatgaaccaattctctatgtgaagatgcaaattgcagctattaatcttgagaaaggaaacaaaaaagagtgcaagaatttgttggaagatgggaaaaccactctggatagtatgactgatgtcgatcccacagttcatgctagcttttactggatatcatctcaataccacaaggcctgccaagaatttgcagagttctataagaatgctcttctctatctggcctacacaactgtggagtctctatctgagtcattcaagctagacttggcttttgatctatctctagcagccttgctgggtgataacatttacaactttggggagttgttagctcacccgattatcaatagtcttattggaactaaggtggagtgggtttatcatatgttacaagcattcaacagcggcaaccttgccctctaccaagaactttgcagggttcacaatgctgctcttactgcacaaccagctttggtgcagaatgagcggaagctgcttgagaaaatcaatattctttgtctgatggagataatctttagtcggccatctgaagatagaactattccattaagtgttattgctgagcggactaagctttcaatcagtgacgtggaatgtcttcttatgaagagcctctcggttcatcttattgagggaataattgatgaagtggacagtacagttcacgtatcatgggtccagcctagagtgcttggaattccacaggttaaggctttgcgcgaccgcctggatgcctgggttggaaaggtgcataccacattgctttcagttgaggcggaaacacctgatcttgttgctgtgtaatttcacagctgttacacttccgcgagaggcttggtcagcaaggtcccatttgcaaaatgtgagatgctttgtgtgacacgtagtcattttctggataatgagatctgctgctgccctgagcgtttgtcttcctgcgcctactgatcaggacatgtaatttcttttttggtgccctcaggacatggatggttagaactgcacgcagtgtcacggagacgggaccaatggattgaaaatttcatactagtagggtgttactagtagaacacgatgcaggagaatcttgctggaacatgagttgtgcctgatgtttgcatgttgcactgcgataagacgtggatcatcattaacatattagctgtttttcagtgcaca

SEQ ID NO: 93325 - DNA, 2137 bp, Zea Mays
ggagtctccgtcaccacctcgcctgctagcctcctccgtctgctcaagacgagggaggagcagagaccgaactctgccgtctcttcctcctccctctgcacccccacgagctccatggccgccaccgccatgattgggattaccaacctacgttgccgccacgacccgctctcctcccttccccgggctacgtcgtcggccgcccggtcctgtacgctgcttcctcctcgatgccgccgccattcttcttgctgctccccttcctcctccgtctctccgtgccgggcccgggtccgaccaacagcagcactgaagcgcatccctgccgccgacaccggcttcatgggtccagccaacaatgaggccaccacgcttaaacgatcatcgtcggccgaccttcgccgccgccttatcgtccccagctccaccgctggcaccggacacgccgccagtgcttccacaggagtgctgcccgccattatcggggtggcgcatctgctcgtgtcgctgggcattctgctcgccatggacaagttcctcaagcaggcattcgtcgccgcgtccatcaagttcccgagtgcccttttcggcatgttctgtgtcttctcggtgctcgtagtcttcgacacattcgtgcctcctctcgcgaaggcgttcattggcttctttgagcccgccacgctgttcatccagaggtggctgtccttgttctacgtcccgacactggtcgtgctgccgctcgccgtcggggatattccagcggcctcaggaatcaagatccttgcaatcacttttggtggctggtttgctaccctgacggtggcaggatatacagtgttagccatgcgaaaactcgtgaagacagagcttcttgcaccatcggagcccacgaagaagccgtcgccgttttccacgtcggagatctgggcatggtcagctatattcgtcgcgtcgttcggcgtcgcatgtttcaatcccacggcgtttggtaccacggcaagaacatgccttcctttcctgcttgctgctaatgtgctgggatacatggttggttctgggtaaatacgtacgcttgtataaactcgatcgatcaataggatcccaagtatgcagttagttttggactgacgtacggtctgagtgttttcaggttaccacctggcgtcaagaaagtgctgcatccgatcatctcctgcgcactctgtgcagatttcgcggcgctagcctatgggtacatctcagggtttggacttgatgccgtgctaggtgcttacctcacaaaggtgccctctaatcctggagccggtgacgtactaatgactttccttgggtctgtgatcatatcatttgcattctcgatcttcaagcagagaaagcttgtgaagaggcacgcaacagagattttcacatcaattgccatcgcgtcgacattctctctgtactcaactgctatcatagggcgcctgattgggctagagccatcgttaaccatatcaatactgccaaggtgtattactctggcgctggctttgagcatagtgtctttctttgaaggtgtaaactcttcggtaactgctgtcgtggttgtccttaccgggctcatcggtgcgaactttgtgctagcagccatggagaaacttggtctgaacgaccccatctccagaggagtagggacagcttccagcgctcaaggactgggaacagcagcactggcggccaaggaacctgaagcgctccctttctgcgccatcgcttatagtttcacggggattttcggcacgctgatctgctcggttccggcagtcaggcaaagcctgatattcatagctggttaagagatgatctgaatttgacggtttcattctttagataaaagaagcagcttgcttcctccctccgtgttcagaaggtcaggaagcaacgccccacatgtcaggtcaggatctaatatgtgtaggggcttgaaaaaaaaaggcgaataattctgtaatcaggatgtaaccgaaatactacagttttttttttcttgtgacaaaatactactagaggaaggtagatccgttatttgtttgacagtttgtggtgtcatctttctccctccctagaaacaggagagatatagtatgattgataaaat

SEQ ID NO: 93326 - DNA, 2045 bp, Zea Mays
ggagtctccgtcaccacctcgcctgctagcctcctccgtctgctcaagacgagggaggagcagagaccgaactctgccgtctcttcctcctccctctgcacccccacgagctccatggccgccaccgccatgattgggattaccaacctacgttgccgccacgacccgctctcctcccttccccgggctacgtcgtcggccgcccggtcctgtacgctgcttcctcctcgatgccgccgccattcttcttgctgctccccttcctcctccgtctctccgtgccgggcccgggtccgaccaacagcagcactgaagcgcatccctgccgccgacaccggcttcatgggtccagccaacaatgaggccaccacgcttaaacgatcatcgtcggccgaccttcgccgccgccttatcgtccccagctccaccgctggcaccggacacgccgccagtgcttccacaggagtgctgcccgccattatcggggtggcgcatctgctcgtgtcgctgggcattctgctcgccatggacaagttcctcaagcaggcattcgtcgccgcgtccatcaagttcccgagtgcccttttcggcatgttctgtgtcttctcggtgctcgtagtcttcgacacattcgtgcctcctctcgcgaaggcgttcattggcttctttgagcccgccacgctgttcatccagaggtggctgtccttgttctacgtcccgacactggtcgtgctgccgctcgccgtcggggatattccagcggcctcaggaatcaagatccttgcaatcacttttggtggctggtttgctaccctgacggtggcaggatatacagtgttagccatgcgaaaactcgtgaagacagagcttcttgcaccatcggagcccacgaagaagccgtcgccgttttccacgtcggagatctgggcatggtcagctatattcgtcgcgtcgttcggcgtcgcatgtttcaatcccacggcgtttggtaccacggcaagaacatgccttcctttcctgcttgctgctaatgtgctgggatacatggttggttctgggttaccacctggcgtcaagaaagtgctgcatccgatcatctcctgcgcactctgtgcagatttcgcggcgctagcctatgggtacatctcagggtttggacttgatgccgtgctaggtgcttacctcacaaaggtgccctctaatcctggagccggtgacgtactaatgactttccttgggtctgtgatcatatcatttgcattctcgatcttcaagcagagaaagcttgtgaagaggcacgcaacagagattttcacatcaattgccatcgcgtcgacattctctctgtactcaactgctatcatagggcgcctgattgggctagagccatcgttaaccatatcaatactgccaaggtgtattactctggcgctggctttgagcatagtgtctttctttgaaggtgtaaactcttcggtaactgctgtcgtggttgtccttaccgggctcatcggtgcgaactttgtgctagcagccatggagaaacttggtctgaacgaccccatctccagaggagtagggacagcttccagcgctcaaggactgggaacagcagcactggcggccaaggaacctgaagcgctccctttctgcgccatcgcttatagtttcacggggattttcggcacgctgatctgctcggttccggcagtcaggcaaagcctgatattcatagctggttaagagatgatctgaatttgacggtttcattctttagataaaagaagcagcttgcttcctccctccgtgttcagaaggtcaggaagcaacgccccacatgtcaggtcaggatctaatatgtgtaggggcttgaaaaaaaaaggcgaataattctgtaatcaggatgtaaccgaaatactacagttttttttttcttgtgacaaaatactactagaggaaggtagatccgttatttgtttgacagtttgtggtgtcatctttctccctccctagaaacaggagagatatagtatgattgataaaat

SEQ ID NO: 93327 - DNA, 1106 bp, Zea Mays
gcgcttgcgctctcgcctccctccgcaatcggctgctgaagctccaccgcgcgcctctccctggagctgcgctctccatgcgcgtgtggctcctcctcgccgacgctcgagtcccagccatggtggctccctctaccggtccccatcttcctgctcggatgtcgtccagctcggcgctccgactgctccactgcgccgaactgctcatctccctgcttgtcgcgtctccctctatttccctcgcgtcttcttcttcctactgcggttttccgacgcccttgctccctgcacacgctggtcgactacgtcgtcgattccatagtgtgctgcaccctgccgcttgtctccagcttgccattgtagctgcgttctggatctgcccagctcgcgccctccctgtgcagctccctcgctgtccgcgccataaaattcgctcggccacggtcccgtcaaattgcgaagccccctgttgtgcccttgccagctcggatttcgccagccgccgttctctaacccgtgtgccggtctgcgtcgtggagttttagtttgatcagctcgtcgtcgcgtcgtttgccgtcaagtcgtcaaacacgtcatcctcaccagctcgctcccgacttcagctgaaagtcgtcgtcgttccgcgcgtcagcaacaaatcccaagaatcgggtgaagatgaagctagcaacgcgatattccctaagcgctcgacaaattgcctggatcggaaaatcgctaccgatctcgcagattcgtgtcagctgttgaaacggtaagctgatgaattgtttagaatagttcgaacgttaaataaattaatgtgttagtgcgatgctcattaggtgctcgataaattgcgtgagtcacgaaactctcgtcgacttcgcagttcttgcgattatcgagccagattcagttatagcgagttatttcgctattccggccaattagcggaattagtgtaccgaatagaatattaataggcctatgtgatgaggaaatagtttaatcacttatacagatgtgtatatatttacgataaagaaatatttgagtaattgttgacatgaaaaacatatgagaagtaaaataaaattaaaata

SEQ ID NO: 93328 - DNA, 1836 bp, Zea Mays
atggttcttacatctgacaatccacccgtgagggaccgatttggtgctctggctttgccgtccgtgagggaccgatctggtgctctggctttgcccatgagggaccgatctggtgctccgactttgaaccctaatctaattgccttcttgttctatgattgtagccgtgaggaccgatctggtgctccggctttgaccgcccatttagccatctattgcagcaggttgcaggctctcaacagcgacgtgcctggcgaccgggagccagaagtgcgtatccgagactccgagccgactcccgactgcaatggagtgatccacgagcaaaaattctgggccggccactgcccagatcccgccgacattctccaaaccaaccgtggcggcgatgaggaaggcgggggtgacctccgcctccagcggtggaggagaaggatggccgtgcggtggtggcctcaacctcggtgtgaagctgaacgtgctgctactgctgttggtggtggccaccaatctggtgtccctgtaccacctctccctccgcgccgccaccgtgccgccggtccttctccagcagcaacgtgacggcgacaaggatctggtcctgatccggcagctggaagccatccgcgcgggcgtgtcgcagctgaaccacctccgctcgtcgtcccctcccccgccgcttccgccggcggagcttgtcctctactcccgcctcgcccccgtcgcatccgcctgctccgcgcacccggagctcctccaccgctacatgtcctacactccctacgcgctctgccccgacgacgccctctccatcgccgagcccctcctcctccgcggatgccatccgctcccgcgtcgcaggtgcttctcccccaccgcatccgcatcagcatccaaactcctccccaccgaccccttctccccgcttcccgacgccgccgtccgatggcccaaggaggcgaagtgcaaatcgttctcctgcctgccgccgtcgctgggcttcgacgtggcgcgcacggaggccgcacggttcctccgcgcgcgcgggcccttagacctgacggccccgcagctactgcggctggcctcgctgagccgggcagggcccatccggcttgggctcgacatcggcggcggcacgggcacgctggcggcgcggctcaagaagctcgtcaacgccacggtgctgacgacaaccatgaatctgggcgctccctactcggaggcggcggcggcacgcggggtggtgccgctgcacgtgccgctgcagcagcggttcccggtgggggatgggaccatggacgtggtgcgggcggggcacgccgtgaaccgttggatcccggaggtggcgctggagttcctgtggtacgacgccgaccgtgtgctgcgcccgggcgggcttctctgggtggaccacttctggtgccggaggagcgacctggagggcgtctacgccgccatgctgcggaggcttggctacaagaccatcaagtgggtcgccgccgacaagagtgttgccatcggcggcaacagcagcaaggacgaggtctacctcaccgcgctgctgcagaagtccttcagttaggcagtgaacatcggggaaatgacacggaattcatccatcagccgaagaaggcgaagcaatacagtgctagtgcgattccggcagactcgcagcaatcagcttgtgttatcccactctagaatttctgctgcaacgtgcgtatgcgtgcaacaatctatgctgatactagtgtagcagcaactgttgtctatgaatctgtaagtcttctttcatacaagtaaggttaaatacatcttgcgaatgctttccac

SEQ ID NO: 93329 - DNA, 1956 bp, Zea Mays
tttagccatctattgcagcaggttgcaggctctcaacagcgacgtgcctggcgaccgggagccagaagtgcgtatccgagactccgagccgactcccgactgcaatggagtgatccacgagtgaactttagaactactctccttctcagtctcttgacttctcaaattctcgttcaatttattagggatagcaatctgtgaatcgcttagcctgagtttgtccctaaattacttggtcccttggttatatttaccccaaatctgtgaatatatgggtttaggttgtataaaacaaaacactgacactcttttatattttgaatataaggcaaaaattctgggccggccactgcccagatcccgccgacattctccaaaccaaccgtggcggcgatgaggaaggcgggggtgacctccgcctccagcggtggaggagaaggatggccgtgcggtggtggcctcaacctcggtgtgaagctgaacgtgctgctactgctgttggtggtggccaccaatctggtgtccctgtaccacctctccctccgcgccgccaccgtgccgccggtccttctccagcagcaacgtgacggcgacaaggatctggtcctgatccggcagctggaagccatccgcgcgggcgtgtcgcagctgaaccacctccgctcgtcgtcccctcccccgccgcttccgccggcggagcttgtcctctactcccgcctcgcccccgtcgcatccgcctgctccgcgcacccggagctcctccaccgctacatgtcctacactccctacgcgctctgccccgacgacgccctctccatcgccgagcccctcctcctccgcggatgccatccgctcccgcgtcgcaggtgcttctcccccaccgcatccgcatcagcatccaaactcctccccaccgaccccttctccccgcttcccgacgccgccgtccgatggcccaaggaggcgaagtgcaaatcgttctcctgcctgccgccgtcgctgggcttcgacgtggcgcgcacggaggccgcacggttcctccgcgcgcgcgggcccttagacctgacggccccgcagctactgcggctggcctcgctgagccgggcagggcccatccggcttgggctcgacatcggcggcggcacgggcacgctggcggcgcggctcaagaagctcgtcaacgccacggtgctgacgacaaccatgaatctgggcgctccctactcggaggcggcggcggcacgcggggtggtgccgctgcacgtgccgctgcagcagcggttcccggtgggggatgggaccatggacgtggtgcgggcggggcacgccgtgaaccgttggatcccggaggtggcgctggagttcctgtggtacgacgccgaccgtgtgctgcgcccgggcgggcttctctgggtggaccacttctggtgccggaggagcgacctggagggcgtctacgccgccatgctgcggaggcttggctacaagaccatcaagtgggtcgccgccgacaagagtgttgccatcggcggcaacagcagcaaggacgaggtctacctcaccgcgctgctgcagaagtccttcagttaggcagtgaacatcggggaaatgacacggaattcatccatcagccgaagaaggcgaagcaatacagtgctagtgcgattccggcagactcgcagcaatcagcttgtgttatcccactctagaatttctgctgcaacgtgcgtatgcgtgcaacaatgtaagcaaatggaacttaggctactctaacagatgcctcttcgcattctctatcttatcctctattctctgcaaataatatcaacaatgtcttctacagttctacgttccctatttttcacactctactggagataatcttaagttccatgtaatcttatgtggccaaaatccaatgattaagaaaaaagtaatcctataccaatttcatat

SEQ ID NO: 93330 - DNA, 1610 bp, Zea Mays
gaactttagaactactctccttctcagtctcttgacttctcaaattctcgttcaatttattagggatagcaatctgtgaatcgcttagcctgagcaaaaattctgggccggccactgcccagatcccgccgacattctccaaaccaaccgtggcggcgatgaggaaggcgggggtgacctccgcctccagcggtggaggagaaggatggccgtgcggtggtggcctcaacctcggtgtgaagctgaacgtgctgctactgctgttggtggtggccaccaatctggtgtccctgtaccacctctccctccgcgccgccaccgtgccgccggtccttctccagcagcaacgtgacggcgacaaggatctggtcctgatccggcagctggaagccatccgcgcgggcgtgtcgcagctgaaccacctccgctcgtcgtcccctcccccgccgcttccgccggcggagcttgtcctctactcccgcctcgcccccgtcgcatccgcctgctccgcgcacccggagctcctccaccgctacatgtcctacactccctacgcgctctgccccgacgacgccctctccatcgccgagcccctcctcctccgcggatgccatccgctcccgcgtcgcaggtgcttctcccccaccgcatccgcatcagcatccaaactcctccccaccgaccccttctccccgcttcccgacgccgccgtccgatggcccaaggaggcgaagtgcaaatcgttctcctgcctgccgccgtcgctgggcttcgacgtggcgcgcacggaggccgcacggttcctccgcgcgcgcgggcccttagacctgacggccccgcagctactgcggctggcctcgctgagccgggcagggcccatccggcttgggctcgacatcggcggcggcacgggcacgctggcggcgcggctcaagaagctcgtcaacgccacggtgctgacgacaaccatgaatctgggcgctccctactcggaggcggcggcggcacgcggggtggtgccgctgcacgtgccgctgcagcagcggttcccggtgggggatgggaccatggacgtggtgcgggcggggcacgccgtgaaccgttggatcccggaggtggcgctggagttcctgtggtacgacgccgaccgtgtgctgcgcccgggcgggcttctctgggtggaccacttctggtgccggaggagcgacctggagggcgtctacgccgccatgctgcggaggcttggctacaagaccatcaagtgggtcgccgccgacaagagtgttgccatcggcggcaacagcagcaaggacgaggtctacctcaccgcgctgctgcagaagtccttcagttaggcagtgaacatcggggaaatgacacggaattcatccatcagccgaagaaggcgaagcaatacagtgctagtgcgattccggcagactcgcagcaatcagcttgtgttatcccactctagaatttctgctgcaacgtgcgtatgcgtgcaacaatgtaagcaaatggaacttaggctactctaacagatgcctcttcgcattctctatcttatcctctattctctgcaaataatatcaacaatgtcttctacagtt

SEQ ID NO: 93331 - DNA, 1539 bp, Zea Mays
gcctggcgaccgggagccagaagcaaaaattctgggccggccactgcccagatcccgccgacattctccaaaccaaccgtggcggcgatgaggaaggcgggggtgacctccgcctccagcggtggaggagaaggatggccgtgcggtggtggcctcaacctcggtgtgaagctgaacgtgctgctactgctgttggtggtggccaccaatctggtgtccctgtaccacctctccctccgcgccgccaccgtgccgccggtccttctccagcagcaacgtgacggcgacaaggatctggtcctgatccggcagctggaagccatccgcgcgggcgtgtcgcagctgaaccacctccgctcgtcgtcccctcccccgccgcttccgccggcggagcttgtcctctactcccgcctcgcccccgtcgcatccgcctgctccgcgcacccggagctcctccaccgctacatgtcctacactccctacgcgctctgccccgacgacgccctctccatcgccgagcccctcctcctccgcggatgccatccgctcccgcgtcgcaggtgcttctcccccaccgcatccgcatcagcatccaaactcctccccaccgaccccttctccccgcttcccgacgccgccgtccgatggcccaaggaggcgaagtgcaaatcgttctcctgcctgccgccgtcgctgggcttcgacgtggcgcgcacggaggccgcacggttcctccgcgcgcgcgggcccttagacctgacggccccgcagctactgcggctggcctcgctgagccgggcagggcccatccggcttgggctcgacatcggcggcggcacgggcacgctggcggcgcggctcaagaagctcgtcaacgccacggtgctgacgacaaccatgaatctgggcgctccctactcggaggcggcggcggcacgcggggtggtgccgctgcacgtgccgctgcagcagcggttcccggtgggggatgggaccatggacgtggtgcgggcggggcacgccgtgaaccgttggatcccggaggtggcgctggagttcctgtggtacgacgccgaccgtgtgctgcgcccgggcgggcttctctgggtggaccacttctggtgccggaggagcgacctggagggcgtctacgccgccatgctgcggaggcttggctacaagaccatcaagtgggtcgccgccgacaagagtgttgccatcggcggcaacagcagcaaggacgaggtctacctcaccgcgctgctgcagaagtccttcagttaggcagtgaacatcggggaaatgacacggaattcatccatcagccgaagaaggcgaagcaatacagtgctagtgcgattccggcagactcgcagcaatcagcttgtgttatcccactctagaatttctgctgcaacgtgcgtatgcgtgcaacaatgtaagcaaatggaacttaggctactctaacagatgcctcttcgcattctctatcttatcctctattctctgcaaataatatcaacaatgtcttctacagtt

SEQ ID NO: 93332 - DNA, 2887 bp, Zea Mays
ctttttgattctggtgcatcacatagttttatcagtgccaaatttagtgccaagtgccagttaccttttcaccacaccaatgggggtatcacaatttcaacaccaggaggcagggttgccacctaccaaatcaacaggcaagtgcctataaaatttggtagtcttgtgattagaaccacccttctcatcttaggattggatagcatggatattgtattgggaactgactggttgaccaggcatcaggcagtattggatattgcagcgagggccattgaaattcactcccctgcttatggcgagactgttttatatttgcctgatcagggttgtacccgttcttgtgctttcgttatgatagaatccccagtggaaaagatcccagtggtttgtgactacccagatgtttttccagatgaattgccgggaatgccacccgatagagacattgagttcgccattgagttgcaacccgggactgctcctatctccaagaggccctataggatgcctcccacggaattggcagaattgaaaaagcaactgcaggagttgttggacaaggggtttattcgcccaagtacttcaccatggggatgtcctgctttatttgtgaagaaaaaggatgagagtttgagaatgtgtgttgattaccgccctctcaatgcagtgactatcaagaacaaatacccactgccccgcattgatgttttgttcgatcagttggtgggagccaaagtgttctccaagatagaccttcgctcgggttaccatcagatcaagatccgtgccagcaatattcccaagacggccttctcaaccagatatgtgctttatgagtttttggtgatgtcttttgggctgaccaatgccccggcttatttcatgtacttgatgaactcagtattcatgtcagagttggacaagttcgtggtcgttttcattgatgatattctggtctattccaagaatgaggacgaacatactgagcatctgcacatcgtgcttcagcggctgcgcgatcatcatctttatgctaagttgtctaaatgtgaattctggctgaaggaaattaaatttttgggtcacacaatttctcaggatgggatatctattgatcctgagaaggtacaagaggtaatggattggaaacctcctaccacagtgcggcagattcggagtttcctgggtttggcagggtattatcgacgattcattccggatttctctagaattgccaagccaatgactgaactgttgaagaagggagtcaagtataattggagccaaaagtgcgaagatgcctttcatacactaaggtagcatttgacaacagccccagtgctggctcaacctgataacaccaagccctttgaagtttattgtgatgcttctggtactggattgggatgtgtcttaatgcaagataacagagtaattgcttatgcttcccgagcactcagaccccatgagcagaactaccctacacatgatctggagttagcagctgtggttcatgctctcaagatatggagacactacctgatgggagctcactataacatttacactgatcacaagagcctcaaatacattttcactcaggcagatctgaacatgaggcagaggagatggttagaattaatcaagaactatgatttggaggtgcattaccatcctggcaaagccaatgttgtggcagatgccttgagcagaaaggcccagtgcaattgtatgaacatggatgcgagagttaccaccctgtgtgatgaattgtgcaagctaaacctggaagttgtttcttcaagtgacctaaagtatatctcggtggagcccacattacaagagcaaatagtcagggcacagattgaagataagggtgtttaggttatcaaagacatgatcaagcagaaggcagaaaaatacaagtgcttccgtcaggacagcaagggaattttatgctttggagatcgattggttgttcccaaggactctgagctcagaaagaagatactggatgaagctcacctttcaaaattctccatgcacctgggcagcaacaagatgtaccatgaatgaagagggaaatttccaacaggccccttgcaaccccttcccataccatcatggaaacaggaggacatttgcatggactttatcgtgggattgccccaatacctccaggcaccatgattccatttgggttattgtggacagattgaccaagaccgctcatttcttaccagttcataccacccacaagatagagaagtatgcagaaatttatgttgatcaaatagtgcggttgcatggtattccaaagaccattgtatctgacagaggagcactgtttgtggcacgcttttgggagcagctgcaagaatcacttgggacccaggtaatacgaagctcagcataccatcctcaaacagatggccagacggaaagggtaaatcagattttggaagacatgttgcgggcatgtgtactacactacgaaaaggattgggacaagtgtctttctttggcagagttttcttataataacagctaccagtccagtctgaagatggcaccttttgaagccttatatgggagaagatgtagaaccccactgaattggtctcaagcaggagagagggaaatatttggaccagatttggtacttgaggcagaggaaaaggtcagagttattacaaggaacttagaagctgctcaggccaggcaaaagagctatcatgacaagaggcggaagcctctacagtttgaagtgggagaccatgtttatcttaaggtgtcacccaccaagggtgtccagagatttgggatcaagggcaagttagctcctcgctacattggaccctatgagatcaaagcaagttgtgga

SEQ ID NO: 93333 - DNA, 2069 bp, Zea Mays
actgccatgccgataatttctagccacaattccatgccttgcccgtccagtagctcccatctcatcccatcccgacgaatcaaatctccatcaccacttcaccagtcaccaccttgcctagcctccgtctgctgcggacgccagacatcagtcagcacgagggaagcccaaactctgccgcctcttcctctgcgctgcgctaacaacgattcccgattccatggccgcgaccgccatgattaggattaccactttacgttgccgccacgacccgctctcctcccttccccgcaccacgtcggccgcctgctcctgtacccttccgcctcgatgtcgccaatgcagactgctccctccccattcttctggctgttccccttcctcctccatctttccgcgccgggtccgggtccgcccaacagcagcattgaagcgcatcggtggcggcaacaccagcttcatgggtccagccaacaatggcgccaccacgcttcagcgatcttcatcgcccgaccttcgtcgcagcctgatcgtcctcaagtctactgctggtacaggaggtggcaatgcttcctcaggactgctgcccaccattcttggggtggcgcatctgcttgtgtcgctgggcattgtgctcgccaccgataagttcctcaaacaggcatttgttgccgcgtccatcaagttcccaagcgccctcttcggcatgttctgcgtcttctctgtgctagtcgtgttcgacacattcgtgcctgctctggcgaaggcgttcatggacttctttgagcctgccacgctgttcatccagaggtggctaccgttgttctatgtcccgtcactggtcgtgctgccgctcgccgtcagggatgtcccagcggcttcaggagtcaagatttttgcaatcacttttggcggctggtttgctacccttgcggtcgcaggatatacagcattagctgtgagaaaacttgtgaaaacacagcttataccagcagagcccatgagcaaggcatcgccattttctacagtagaaacctgggcatgggctgctgtattcgttgcatcgttcggtgttgcatgtttcaatcccagagctcttggtaccacagcaagaacatgccttccctttctgctcgctgccactgtgctgggatacatggttggttctgggttaccatctggtgtcaagaaagtgttacatccaatcatcacctgcgcactttctgcagatttggcggcagtagcgtatgggtacctctccgggtctggacttgacgctgtgctaggtgattacctcacaaaggcgccctctaatcctggagctggtgacgtactaatgggtttccttgggtctgtgatcatatcatttgcattctcaatgttcaaacagagaaagcttgtaaagaggcacgcagcagagattttcacatcaattgccattgcgtcgacattctctctgtactcaaccgctgtcatagggcgcctgattgggctggagccatcgttaaccatatccatattgccaaggtgtataactgtggcgctggctttgagcatagtatctttctttgaaggtgtaaactcttccctaaccgctgccgtggttgtcgttaccgggctcattggcgcgaatttcgtgcaagtagctatggataaacttggtctcaacgaccccatcgccagaggaatagggacagcttccagtgctcatggactggggacagcagcactgtcagccaaggaacctgaagcgcttcctttctgcgccatcgcttatggtctcacgggaatttttggctccttggtttgctcggttccagtagtgaggcaaagcttggtattcatagctggttaggagcagctcgtgatgatctgaatttgaggatctgattctttagataaaggaaatcgtttcatgtgtaaaagaagtcgtgctcagaagacgaggaagcaaaacgcccccacgttttgggtcaggatgaagaaaggtgaataattccgtaatcaggatgtaactaaaacactagagcaaggcggatccattgtttgtttgatactttgtgatatca

SEQ ID NO: 93334 - DNA, 1390 bp, Zea Mays
gagttccgcagcgatccgcgcctttttattggcgagcctgcacgcggccttgccctcccaggaagggaggccgaactgagcagttcgaccaggcagccatccacctccaaccccccttcgcctgcgcaaatcgttaccatcccagcgagaaagatggcgcgcgtctccaatgccaagaagcggcagggcgccaagcccgcctccgcgctcagcagcaccgacaccagcaccgccgcaaagaggaaggccgaggacgaccgccccgtgcgcgtctacgccgacggcatcttcgatctcttccacttcggccacgcccgcgccctcgagcaggccaagatgctgttccccaacacctatcttctcgtcggatgctgcaacgacgagctaacctaccgctacaagggcaagaccgtcatgacccaggaagagcgatacgaatccctgcggcactgcaagtgggttgatgaggtcattcctgatgcaccgtgggttctcacacaggagtttattgataagcatcagattgactatgttgctcatgatgcgctgccttatgctgatactagcggaacagcaaatgatgtctatgaatttgttaaaaagattggaaaattcaaggaaacaaaaaggacagacggggtttctacttcagatctcataatgaggatcttgaaggactataaccagtatgtcatgaggaatttagcacggggctactcgaggaaagatcttggtgtgagctatgtcaaggagaaacaattgcaagttaatatgaagatcaataaactgcgggagactgtgaaggcacatcaggaaaagttgcaaacagtggcaaagactgctggtttgaatcatgaagaatggcttgctaatgcggatcgctgggttgctggtttcctagagaagtttgagcaacactgccacaatatggaaactgcgatcaaggatcggatacaggagaggctagggaaacagttgagcaaaggaataatcgctggtcttgtgcaggaaccggtgacagcctaaaacaggtgatgctgtcaatgaaacgcactgatgcttttcagatcatcctcccgatgtggttctggtgcgaggcttgtaagggtgcaacgcggttgctgagacgttttaattttgtggtgcatgtgaactcttcccgtatacaaatgtctataggagaggcgtttggtgttttgggcatcgtcgtgggcgtgtttctttgtatctaacgggttagattaaccttttttttgtatcgagattgatgttctttcgtggttataataataataaataataataatattgtcaaagcacaatgttgatgacattctagatttggtaccttaatgactctgtatttacgaatgtatgatatcatatctat

SEQ ID NO: 93335 - DNA, 2034 bp, Zea Mays
atgcaggacgccgtggcgacccacggccccgccaatgccgccgccggcgccaccttctactgcgccgccgccggcgtgtacgcgagcacgcaccctccggtggccctcccgtccgacccctccctctccctcgtcccgcacatcttcgcccgcctacccgccgcccgccccgacgccccggccctcgtcgacgccgccactgccgaggccctctcccgcgccgacctccgccgcctcgtatccgccctcgcggcgggcctccgccgccgtcggggcctccgtgagggggacgtcgtgctcctcgctctgccgaactccatcgccttccccgtcgcgttcctcgccgtcctcgccgccgggtccatcgccaccacaatgagcccgttcagcgcccccgccgagatcgccgctagggttcgggacaccagccccgccctcgtgttcgccacgctcgacaacgtcgggaagctcccgccgttgcgcgtcccggtcgtcctcgtccccgacgccttccacctcgcggacgagggcgcccccgagttcgcacccttccgcgagttgctgctgctcgattccgagccactgccgggcccttcggtcggtcaggacgacgcggccgccatcctctactcgtcggggacgggcggccggagcaagggcgtcgtgctcacgcaccgcaacctcatcgccacggtcgagctcttcgtgcacttcgaggcctcgcagtacgccgcacctgcttgtgataatgtctacctggcggcgctgcccatgttccacgtctacggactctcgctcttcgcggtgggacttctctcgctcggttccacggtggtcgtcatgaagaggttcgacgcaggcgaagccgttaagaccattcgcagattcaaagtcacgcacttcccggtcgttccgcccatcatggcggcgctggtgcacaccaccaagccagcggcaatgccgttggaatgcttggtgcaagtgtcaaccggtgcagcgccgtccagccgcaggctcatcgacgacttcgtcaaggctttccctcacgtcgatctcattcagggttatggcatgactgagtctgctgccgttggaactcgtggcttcaatacttcaaagcataagaagtatggttcagtaggactcctggctccaaacatgcatgcaagaattgttcatgtggaaactggttgctccttgcctccaggctcttgtggggagctctggctccatggtccagctataatgaaaggttacttgaatcatgttgatccatgcgcaataaatggtggctggctgcgaactggtgacattgcctacttcgatttcgatgggtacttgtatatagtgggccgcttgaaagaggtgatcaagtacaagggatttcagatagctccagctgacttggaagcagttttgatcgaacaccctggaattgttgatgtggctgtgacgtctactgaggatgaagaagctggagaggtaccagtagccttcgtggtgaggaaatctggaagtggcctatcgtgcacgcaagtgatggagtatgtagctaagcaggtgtccccgtataagaaggtgcggaaggtggtgttcgtggagtcgatccccaagtcgccggctggaaaggttctcaggaggcttctcagggaatctcttgcagctagcgctgttgctggtccaacaagttattccgagtccaattccatgcgccattcgagactgtaactgcaggacaaggccagccaagcaggatctcggtcaggaacagtttccagctttattttaggttgccgtgacctgaataggccttctgtatcacagttaggggcttagcacactcacatagatgaacaaagaccttttggattagtttgcttgttgagcaaaattcaaagtgtaaggaagatgttttgtcttcttcttctctttgtgtccttccgttgaaaaataccatggtcaaatctttctacaatctgaaaagaaggtagccaagtgatagttcgtagttcaagaaacggtttcacgctatgt

SEQ ID NO: 93336 - DNA, 171 bp, Zea Mays
ttctttttccctttaatttcaagttaggggagattttaagagagctcttggagatgctcttaggttcctgggtggcggtcggaggaaaaataaatggcggctggatgccttgggggttgggggaaaacgatgtgagtaaaaaaagagatggcggattaatgtaatttcaat

SEQ ID NO: 93337 - DNA, 3041 bp, Zea Mays
cggcgctctcccgatcccgagtgcatgctacctcacctgcgtgtgcgccgcgtttcaactcgagaaagaagacacaccgtcgcggcgcacgcggcctctggtttctgatttcctggttaccctttccctccctgcatttgcctttcagatcaggcggcagcaccttcctctcctccccttcccttccgtctcatcttcgttcccttccggggtcatcccttccgtcctcctcctaccaagtcccaaggccgcgagacagacagacagacagacagaaagagagagcagagcagacaatggcgacgctcgaggacctgggcgtctccgccttcatcaacatcctgggcgccttcgtcttcctgctcctcttcgccgtcctccgcatccagcccgtcaacgaccgcgtctacttccccaagctctacctcgcgcacaagcgccaccagcacgaccacgccgcccgctccgccttccgccgcttcgtcaacctcaacctctgcacctacgtcaccttcctcagctgggtgcccggcgcgctccgcatgtccgagccggacctcgtcgcccacgccgggctcgactccgccgtctaccttagaatctacacgctcggcctcaagatatttctgcccattacgactctcgcccttctggttcttatcccagtcaacgtatctggcggcacattacttgatctaagaaaggaagttgttttcagtgatatcgataagctttccatatcaaatgttagccctggatccaacagattctttatccatctcttgatggcatatgtgttcacattctgggtgtgctttatgctgtacaaagaatacagcaatgtagcatttatgaggttgcatttcctggcttcccagaagcgctgtgccgatcatttcacagtgattgttagaaacattcctcgtgtctcaagtcattcaacttctgaaacagtggatgagttcttccgaagaaatcacccagaccactatcttggtcatcagcctgtttacaatgcaaatcggtatgctaaacttgtgaagcaaaaggagaggctccaaaactggttggattactacgaactgaagttcgaaaggcatcctgagagaagaccaacaagacggacaggatgccttggtttctgtggcagggaagtggatcaaatagactactaccgggctagaatcagcgagcttgagaggaggatgacatcagaacgacagaaaattctcaatgacccaaaagctgttatgccagtttcttttgtgacatttgactcgagatggggtgcggctgtgtgtgcacagacacaacagtcaaagaacccaacccaatggttgactgattgggctcctgaaccgcgggatgtttattggcaaaatcttgccatcccatttttctctctcagtatccgcaggtttctgatgtctgtcgctgtctttgctctagtgtttttctacatgatccccatcgcgtttgttcaatcgcttgccaatctcgagggtcttgaaaaagttgctccttttctgaagccagtaatagaagcacatgtggtaaaatctttccttcagggatttcttcctggtctggctctgaagatttttctctatattctccctactgtcctgctaatcatgtcaaaggttgaaggctatgtctctttatcctcgctggaaaggaggactgcttcgaaatattactacttcatgctggtgaacgtatttcttggaagcataatcgctggcacagcatttgaacagctatattcgtttctccaccagcctcctacacaaataccaaggaccattggggtagctataccaatgaaagccacatttttcatgacatacgtaatggtagatggctgggctggtattgctaacgagatccttcgagtgaaggctctggtgatataccatctgaagaacatgttcatcgtgaagacggagagggacagggatcgggcgatggatcccggcagcataggactcggagaaaacctcccgtcccttcagctgtatttcctcctcggcctcgtgtacgccgtcgttaccccgcttctcctgccgtttataatcgtcttcttcgcctttgctttcctcgtctacagacaccagatcatcaacgtgtacaatcaggagtacgagagtgctgctgcgttctggcctcaggtgcactcccggataatagctagcctactcatctctcatgtaactctgtttgggttgatgagcacaaaggaagctgcgtactccacccctctgctcatcttcctgcctctgctgacgatctggttccacaaatactgcaagagccggttcgaaccagctttcagaaagtatcctcttgaggaagcaatggcgaaggacaccatggagcacgcatcggagcctaacctgaacctggaatccttcctggctaacgcttacctgcaccccatcttccgccttttcgaggaagccgggaaagaggaggagacggtggaggtgaggatcgacaaagccgagaagcagcagcatcgccatgaggaggacgaggctcacgcgaggagctcgtcgcagtaccgggaggaggagactcacttcaggagcacgcacgagacgcattaccaccacgaggagagccacgtcagcaggagcacccagtatcatgagggcatccacgtgaggagcgacacggactcgccgtcgccgccacacttcgtctaccactacgacatccagcagtgatgatgtcgtctctaactttgttttcctgggtgtcttgtgaatgcttctcttggctaacctgtccagccccccccccccccccccccaagaggtttgctaaagtcgctgatgattgatgaattgttgcgtgtacatgcagggtagggtctagtgttgtagtgactgtaaaagttctggtgtgccatgggacctgaacattgattccatgcaggaaaaaaaagaagtggatgaatcaagttgagtattgcgtggtatacatgagaatgtcttcataattcatttgaaaacatggagattaaaaaaaataacagg

SEQ ID NO: 93338 - DNA, 112 bp, Zea Mays
ttttctttgagttttttttgaaatttctgaagtattttttgttcaagaggaatatttattcccttgactctctaatggtgttaggaaattacatccgagggaatattctccc

SEQ ID NO: 93339 - DNA, 841 bp, Zea Mays
attaccatttcaaccactaacaatgatgtttcacaaaattaacttgtactaactcttttgaatctaggggcaagtggttattttagataatcacactttgagctattttgcaggaatttattgaggaggttatggctctggtagagcttgatcagctgagatatgcattagtagggaagcagggttctactgggttatcaacagagcaaatgaagggccttactaatttttcaaattctattgcttattgtagcagattgctagagttaccttacttttttcttgtaaaagaactattttgtttgttactgaatctcaatttaggggggaatacttccgcaactatctgcccatgatatcattaaatgtttttctaagatacttgttctccacacaaggccctttttatctgatactaatattgtatcatccaatgcaggtaatttcaatcttttagaggatcgtgcttttcttttggattttgtcttcaactatccttgtaaaggttgtgttcaggttgagctatcctgaattatttggagctcatggttctctttttctcttctttttcagcattaacctttagatttgtgtaatggatttctgcaacatcaagattgatacttgcaactccattgataagactgcatgctcaaataaagcttggaccatgaagtgagatcaagctcatggacaagtagcgatcatcttttatccaatcttagtgtattcccaatagagcacacgtgaagaaaatattttgtttgactattgtaaatgtttaaggcaatgaaaattataaatatgaaatagttgtggtatatgcatgttattcaaagga

SEQ ID NO: 93340 - DNA, 1484 bp, Zea Mays
cacttacgccaccttatagatgctttttagaactgaaacagaaagtaaagacccagaaatagatacactttcatttactgagctgagggacaagctgcttgcccttgatcctctggatatagatcatgtggtgaaaatcaataaagcggaagctgagtattggaagaagtcagaagggtatcgcatgggctagagtgatgaaatactgggcttcgattgtggtgggcagcagtgggtttctgaaaactgcttccccaccagaaccctagcaaagccaagtatgaaggatcttgattatataagtaagctgttgtagttgattgaaaaggaggagatacccgcacctggacctatggagcagcgttggactgctcgcagcaagagcccgatgagcccgagatgaagctctaaagaagatgatgtattttcatgggttggtattataatgtatctgccaacatctgatgctcgccaaaggaaggaaatcacagaggagttcttcagttacaggagcctggcgcgaagtctctgggatgattattccgcctatgaacactgggccaagatcgaggtgtgggctagcttcaagattaattattcagacactgtttgtgttcttcctattttccctagggttcagaagtgaaaacagcataagtcttctcacttgcaccgttgcacggatatctgattgggttattttagtttcatggcttgtgattgttctgtctccactcttcaatcaagttgcacggatatctgattgggttattttagttccacatttatagtgcattggtcttgtatttgtttcgtacaacttaaatctggaggagaacaaaaacttttaaaatttagatcccagttcatcagttactccctttgtcccaaattataattcgtcataggaatttaatgggttctgcttctgtacagcgttgcagcccccgtgaccgtcatgttggaccaatgttcttatttcacacagtctccctacacaagattactgatactggactggagtttgtgctttattggcttatgctatcttgttcaatgctttctcttgctttggaattccttaaccgtaagcatggaaatgcaattataattctaaatccttctttagtaaggtgccttttgacttctcaaaattaaattgtaactaattttgaagctctacggaagcctaagcaaatgttccatcaaattctgaagaaacaaatgatgcattgactgacagtatatcagatggacatgcaattgcagcattaacctttagatttgtgtaatggatttctgcaacatcaagattgatacttgcaactccattgataagactgcatgctcaaataaagcttggaccatgaagtgagatcaagctcatggacaagtagcgatcatcttttatccaatcttagtgtattcccaatagagcacacgtgaagaaaatattttgtttgactattgtaaatgtttaaggc

SEQ ID NO: 93341 - DNA, 736 bp, Zea Mays
tgcgcggtcgcgtccgccatctctcctcgccccactctcatctctcctgcaatccccacggtctctctcagatccgcgtccgcgacatcctctgccctggatcgccgcgctcggctctctccgcgccgccatcaaggggttctcctaccaacaacggacgccatcaacggatggcctcggatccgccccatcgcctcctaccaacaacggacaccatcaacggacgaggatctccgctctaccctcctccccacgccatcaatggaagggggctcggtccacctccgccgcggccgccgcgccgggccgcaggtccacctccgccatccgctcgctcttctcccggccgttagccgccgccggcggggctccgtcgggctccggcgtcgccgcgctgccggacctccaccgccgcaagtccttctcctgcgggggcgggggtgacgcgctggccgccgcgggcaagccacaacggcggtcgtgcgacgtgcgcgggcggagcactctctgggcgctcttccaccaggacgaccgccaaccggttcgtgacggcaccgagttcggcgccttcccggcctcgtcctccgccgccgcggccgcgctcgccgccaaggtcctctcgcccccgcagcctccgccgctgccacctcccgcgtgcgtccctgcgatttttaattctgtgttaaacttttggtggatttctataattgaactatgaaggggtgcttccggctta

SEQ ID NO: 93342 - DNA, 1324 bp, Zea Mays
gttatattttagatcttttgtttagcattttttaatccacatgtatttctctatcatataaaactctatattgattctttaaaataatttatatgaatttgataatgtttgtcacaactcacacgaattctgtataccataatgaattaatggttgagagactatgcacaagtcatgcaaattaacaagactcatacaagcgtcgaacaatgtgctaatgatgatcagagacacaagggtagcacatgatcaggtcttaacatgtttggtttccgaacatgcttttctccagatccccaaggaagaagaagatccggtcagatatatgtcgatgctcatcccaacgtacataagctatcaatggtattatatgttcccgttgcaacgcacgggcacacaactagtaagttgaaaaaaaacagtaaatatcctttgcggtggcgggtctaggctggggtgagacaatcgggccgaaccaaatgaaacaggcccttgagctcaaagtttggtgggctccatcggaaagaatggatgaaccgcataacgaaatggaggaaccctaggcccgccaaacacacacacacacaaacagaaaactgagtcagagaggtgcagatcaatgcggcggtggtggtgcgccgccggcggcctcgcccgctgcgtcctctcgtcctccacctccgtcggcgcatcatcagcaagtgcggcactacgccaagaaggagaggtcgcgcgctccgctcacgcccactaaatccaaagtcaagaaatacaagatgaaggccccctcgtccatgaagttcagattcagaaccatgaaagacggacaggtccgcaggtggagggccggcaagcgccacaatgcacacctcaagtctaaggaggccaaacggagacttcggaagcctgctttggtgcatttggcctacgcaaaggttataaagaagctcaacttctgtgggtagcaaatcaataaagacatagcggagtttggcatgggaaactagttaactgatactgaccgccaaccgctgcatctcagttgtaaacgctggagcctctccttggaccaaatacttgctttttgtcacatgatgcattatctcgtctgttcagacactggtgaggagccttttgttttctgcaaatgtagctggtataattttcgctgcattctgttatgcacacaatcggagagattcatcgtgagtagtttggaaatagctgccagcaaataaaaaagctctgtaacatccaatggctacagttctttgttgtggttatgatttgggaatttatgtatggtttccagtattcaacgagc

SEQ ID NO: 93343 - DNA, 1460 bp, Zea Mays
gttatattttagatcttttgtttagcattttttaatccacatgtatttctctatcatataaaactctatattgattctttaaaataatttatatgaatttgataatgtttgtcacaactcacacgaattctgtataccataatgaattaatggttgagagactatgcacaagtcatgcaaattaacaagactcatacaagcgtcgaacaatgtgctaatgatgatcagagacacaagggtagcacatgatcaggtcttaacatgtttggtttccgaacatgcttttctccagatccccaaggaagaagaagatccggtcagatatatgtcgatgctcatcccaacgtacataagctatcaatggtattatatgttcccgttgcaacgcacgggcacacaactagtaagttgaaaaaaaacagtaaatatcctttgcggtggcgggtctaggctggggtgagacaatcgggccgaaccaaatgaaacaggcccttgagctcaaagtttggtgggctccatcggaaagaatggatgaaccgcataacgaaatggaggaaccctaggcccgccaaacacacacacacacaaacagaaaactgagtcagagaggtgcagatcaatgcggcggtggtggtgcgccgccggcggcctcgcccgctgcgtcctctcgtcctccacctccgccatagcatcccatgcccgcccgctgccggcacccctgatgcccaaatctccctcctttaccgtccctttctccttgtcctgtcgcaggcaccactctctccagggattcttccacctggtcatcgcttcttccttccgccctccgtcggcgcatcatcagcaagtgcggcactacgccaagaaggagaggtcgcgcgctccgctcacgcccactaaatccaaagtcaagaaatacaagatgaaggccccctcgtccatgaagttcagattcagaaccatgaaagacggacaggtccgcaggtggagggccggcaagcgccacaatgcacacctcaagtctaaggaggccaaacggagacttcggaagcctgctttggtgcatttggcctacgcaaaggttataaagaagctcaacttctgtgggtagcaaatcaataaagacatagcggagtttggcatgggaaactagttaactgatactgaccgccaaccgctgcatctcagttgtaaacgctggagcctctccttggaccaaatacttgctttttgtcacatgatgcattatctcgtctgttcagacactggtgaggagccttttgttttctgcaaatgtagctggtataattttcgctgcattctgttatgcacacaatcggagagattcatcgtgagtagtttggaaatagctgccagcaaataaaaaagctctgtaacatccaatggctacagttctttgttgtggttatgatttgggaatttatgtatggtttccagta

SEQ ID NO: 93344 - DNA, 1731 bp, Zea Mays
gaccctttattagttcttgtgtttgaggaattagagactaaaaagaactaaaaagtagggactaaagattagtcctatggaaccaagcagagcctaagtcgcaccgtccaggtgtcaactgcaagggaaaacaaagagtgtgtgctgtgtgttatccatttcttctcctctctgctctgttcacttcgttctagtggggagcgccgccgctgcagttgccgccgccaccagagcagtccacctcggtctgatatggcgaccgggagtgcaagtgccatcgcgtccttctccgtggcggcggcagcggctgctgctctgcgcgtcaggcggccatgcgctcgcgcttgcgcttgggccccctcgcagcgaccgcagcaaggggcactcgtcagcctcaagccttgcgcctcactggcaccacaagctcctctgtggcgcgcggagtcggatgccgcggggggtggtgccggcgccggcgatgtcatgggcctcctcctccgggagcgcatagtcttcctcggcaacgagatcgaggacttcctcgcggacgccgtcgtcagccagctcctcctccttgacgccatcgacccggactctgacatccgcctcttcgtcaactcaccagggggatcccttagcgcaacaatggccatctatgatgtaatgcagcttgtgagggcagacgtgtccactattggaatgggcatagctggatcaacagcttctataatccttggtggtggcacgaagggcaagcgatttgccatgcccaacaccaggattatgatccatcagcctgtcggaggtgcaagcgggcaggccctagatgtagaggtccaagcgaaggagatattgaccaacaagaggaatgtcattcggatcgtatcaggcttcacaggccgcactcctgagcaggtagagaaagacattgacagagatcgttacatgggccctctcgaggctgtcgattatggactcattgatggcgtgatcgatggagacagtattatcccacttgagcctgtcccggagagggtgaagcctaagtacaactacgaagagctgtacaaggatccacagaagtttcttacaccagatgtcccagatgatgagatatactagtcgaaaagttgtattttgtgcgaatgttaagtctgttcttcagcaagcagatgtttttcgtcgcttgtagctgtcaaaccaaccatagcactagtagcttattgatcttgtttactgactggatggtgattcgagcaggcaactagaacctgttggttgtgtttctggtgttacattgtggtgttagaatggtccggctgtttcgttttgagtcctgaccatttcaggtgtggtacgttgagatcagttaactgttcgtttttttttttttgaccaccagcaaaagcttctacatcccatttcaaaacattttctttatcatgataagtcttataaaatacaaagaatacataactgtaaagtcagtatggcatgcaattgtgactgctcgattgacgattggctggaaatccgtgtttccagagacagatttcaaaggagagtaaaaagttctcagctcaacgtgttctctaatttattcgctgtcatgtggccaccaaaacaggatgaagagtttgccgtgaagtatttctttcttaagctcaaaagtacagtaatggatacaacaatcagattatttagaataggagaaaaaaaagaatacaccaa

SEQ ID NO: 93345 - DNA, 412 bp, Zea Mays
gggaaaacaaagagtgtgtgctgtgtgttatccatttcttctcctctctgctctgttcacttcgttctagtggggagcgccgccgcggcagcggctgctgctctgcgcgtcaggcggccatgcgctcgcgcttgcgcttgggccccctcgcagcgaccgcagcaaggggcactcgtcagcctcaagccttgcgcctcactggcaccacaagctcctctgtggcgcgcggagtcggatgccgcggggggtggtgccggcgccggcgatgtcatgggcctcctcctccgggagcgcatagtcttcctcggcaacgagatcgaggacttcctcgcggacgccgtcgtcagccagctcctcctccttgacgccatcgacccggactctgacatccgcctcttcgtcaactcaccag

SEQ ID NO: 93346 - DNA, 801 bp, Zea Mays
tttcttgttctctactcgggaaacagacaggacagggacggaggccaaacccaacccaaagcccaagccgaagaggaaaggataggagacggatagggtacccgcgatgaggcccgccgccgccagtaccggcgggttccatctcgtgctccccgcggcgcacaggctgcctcctagtcttcctagcatcagtagccgaagaggtgtaaggatacgagcggcggcggcagcaggcggtggcggcgcgctgctggggcgtcccatggaggacgtgtacaaggtgcgcgtggagcgaggcgaggtggcgcgggcacggatggaggcgctgcgggtcatggagacgtggtcgtcgtggcgcacgggtggccggtgccggatgccgtgggactggcaggtcgaccagctcgtgtacatcgtgtccggggaggtgaaggtcatccccgccggcgctgtccacggcgacgactacatgcacttcgtggccggggatctggtcaggtacccgcgctggttcgaggccgacctctacttcgacggcccgtacgaggagcgctaccggtttctcgcctacggagacgacaactagttagtacatctgcatttcaagcagctttgcctagaccctagagtatccatctaccggcaatgcatgcgttgtaatgttcctctgtaatgtattggtgtggcgtagtcaggcaccgaaataaaccaatcattccaatgtttgcgaattttattatataacttattagttcctccaaacttctaaattggctatgatacgcgtgcaagagaaataaa

SEQ ID NO: 93347 - DNA, 86 bp, Zea Mays
aaggaaatttagcaatactttcttgaaacaaaatttgacgtataaatatctggtgttgcttcaaaatagtgatggcaatataatat

SEQ ID NO: 93348 - DNA, 936 bp, Zea Mays
atggcccaccctccctgctcgcctccatggccacctggaggcggattcggcctccccgagtcaccgcccaacgtctcgccgcccaaccaaagcgagaaatccactgggcgaagcttctgcacctcccgaacgggggaggggaggggagcacgccagcactatgtgcctgcgggtagggtttctcccggtccgatggcgtccgccatgtcgtcgaggtcacgacccgccggccacttcggagtgttcccggtgaacgctatggccggcacgggaggcagcgacggtggggtgcagctcgcggacaagctcaagataatcaagactgacaactttgaccccgacgcctacgtgcagtccaagtgccgcgccatggacgagaaggaaatggacaaatattcctgcaagcacaacgtgtgcacctacaacatcaggatgtctgggtacttgaatggagagcatgtggagaaagcacgaacactatgggatgagatgattcaggaaggggtccagcctgatataactgcgtacaacacaatgattagtggagggcattgtatggcacgggatgctgaggcagcaatgcttgtgcgtgcagacatgaaaaggaaggggtttgtgttggcgccagaggttgttgaggaattgctggatggattatgtaaaaatgggagggttgaggatggcttgagtgttttgcgagaggagatgaagagggaagaatttgtgccaacctggaggagttacgaggtgttgattatggggttttgtgatggatggaaggtggaggtggcaatcagactccaagcagagatggctggaaaaggattcactgctggcagcgaggtgtactatgcatttattagtgcttatgagaagtctgaaaactatgagatggtcgagaagttgaggaaggaaatgccagcgatgggcacttag

SEQ ID NO: 93349 - DNA, 450 bp, Zea Mays
caaggaggttgaaggcgaactagagagaagaggaagatgttggtggcgacggatccgaggttgtggcacaaggtcaccgccgtctccggggttgccgctttggggctcggcacctacggcgtgcacatgttccgcccaagaaccccgcgtacaaagaggtttggcacacaacgtccctgtaccatctcgtccacaccacggcgctgctcggggcgcccatcaccaagcgccccaacgtttggagggctcctcactactggaattgtgctcttctctggaacgtgctacaccgtggcttatcttgaagacaggaagttttcttcaccggcaccattggggggctttgcgtttattgctgcttgggccagcctcctgtgcgtgtactatgtctggtattgacgtgatgcagttttctttgtcatgatcaccgactatggcatcggaaacctc

SEQ ID NO: 93350 - DNA, 525 bp, Zea Mays
gaattcaaaccatatagtacatacaatttgatcaaagaacatgagtgtacataaatttttctagcatgcacatataattgaagcataaatcatcaaacattctctaaacacaaaaatgtccaagtctcaatggagcaaccatttgatttcaactcagctgttgcacagctgcctgaagccaacatcctgctagcaggtctgaggtttatgtaggccatgtcttcctgctttgctggtgaaggcgcatacagtccaggaagggatttagcgaccttgcagaacagaggctacatgattccagtttccagatgtctccttcgccagtggacactttcccggtgacacatacagggaacaagaatcagatagctggtcacttcataaaaaactatatggcaagcaggggcggatgcacggggtgggcaaagagggccgtggccccacctcaatttttgtcttcttatatatatactgaatatgatgagaattgaaataaataataaatacgtgaagacaaaaatacag

SEQ ID NO: 93351 - DNA, 2051 bp, Zea Mays
atgtgtattgaagcgcctcttgccttgttggccgatctggatgcctacttttttatactcggaaggaagaaggatgatcctctctcgtcactgctttcctgcccaaagctttttctggcagacgaggatcttgtccttgtcggccttgttctcgctgctgtgcttctcgcagctccatcgcatccctttggcaatgggtgccacagaatcgaggaagtaggtgctctcccggattatggcgtagcccgtgggacgaaggatacggtccatctcaaggagcacgtacttcatctcgcacctgtgagactctgctgtgaacaggccatcaagatgcaacaggtcataggtgcgtggatatgtcgagaacgcctcacacctgtcgtggttgacgccgatgagccctctgtcgtagacgacgccgagggagtttgggccgtaggaggagacgacgttcatgacccagacggggtccttgatgaggctgcctgcgaatcctccgtacacggtgttcatgtccatgacgttcctgatcttgtcgctccccagcgccggcagcagcgtcttgtagtgcttgaccctgagcttccaccgggcgtcgtcctgcttgaaggcggcggcgctgctgcccgggacgacgctgatgcgctccggggcgacgctgagcctctggggccacttgggcgtggcgttgagccccagcttcctgtacttggggctgggagccgtgacgcaggagcgcatgggcacgtaccaggcggcgtcggggtcgacgctgtcgtcgcacttggcgggcgtggtgaccggggtgagcttgtcgtagcaggcgtcggcggacttctgccacacggcgatgtcccccttcatgctgtagagcttgaagcacatgctggccagcatcttcttgagcctgtccaggtcggccttctgcgcctgcgcggtggtgttccagccgtgccagcggttctcgtagttgacgggcgggccggagagcacccagaagccgcccgggcggaggacgcggtggatctccaggaggtagaggccgccgaactcggtccaggggatgaggcagcgcgagcagtgcgccatgtcgaaggcggcggacgggaacggcaggcgctgcgtggagatgatgccgaggatggccgggatgccgcgctccagcgcgaactgcacctgggcctcgtggttgtccctgggcgccagcgacacggtgaggatgccccgccccagcaggtcgccgccccagctggcgacgccgcagccggtgtcgagcgcggtgcggacggtgccgtcgcgcatgcccgggaccaggccctgcatcaggtccacgtacgcgccgacgccgttggggaacatggtgccgccgccggggaaccggaagcggtcgccctccttgacgagccagtgctggttggacttctggctgttgatccagtcgtaggggacgttccggtaccagcactggtccttgctcttgggccaccggatgggcggcttgtaccccttgggcggcggcaccaggcactgctgccggtcgggcggcggcgggcagtgccgctccatgaagctgaggcggtagttgccgtacctccgccagcgcttggggtcggtgcagggggtgtagtcctggtagtcggcggggcactcggggaacgccacggcggccgtggacgccagtgccggccgagcctggccgtcgtcggagggacggcgggtcgtcgtggcggcgccgagggcgaggagagccgtcggcgccggctggatggagtccagcaggctccgtcccgtgctgtagatgccgcccaggtagaaggagaaggcgcagagcacgacgacgacgagcgccaccggcaccgccctggaccctgcgccggcgccgcccgccctctcgggcttatcttccttgctgtacttcatggcgccgcccacgccacgctattctccccgtcgtcgagcgctgcagctgtaacgcgaggagaaattaaacttttattaccggggtgcggggtgcggggtggcagagaagaagaaaaaaaggcgcaggggac

SEQ ID NO: 93352 - DNA, 995 bp, Zea Mays
aatcctaggagttccatctcccgtacatctccatcttcaagctgctatccacagcgattctcccagcgcctaccgctttccaggacccaccacccctgcccctgttcaatcctcttcttggacattgcctccctcctgtcccttgttgttcatctctctcacctcagctcaccttgccggcagtcaggctcattagccgagaccctccacccagtgctcgaccaacgacgtcgtttccccgtcgtccgagctccaccacaccgatgcgtccgccctgctcctccacattgaggtctgctcggagcagtagtggcaacagtgcttcttccattttctcgtgtcgagcttcctccccatcacactcagccgcgactccctggtgcataccatcgcggttggcctctccctcgccaatgctgttgtcctgcagctcctccaccggtctgttggtgcctaggccacggtctgttggtgtgcctccctgaccacgcgctcagcttcccggaccaacgcccgctcagcctcgatgcttgttgtgccaagcgcatgccgaccgacggtgctccctcagctcgtccatctccatgctcgatctctgcctttgtattatcgatgctgcgctgagtcgtctcttcgccctgcgtcctcgacatgtccacgatgccacagtctgcaagtcatggtggtcgttgtcgtcttgcccatgccatggccgcaacttcctgtgttgctccctagtccacgtcatccagtccggattttttgtgtggaagaaggtggaactgcagatgaaggagaaagcgaaatctagtgtgttgctcactaggcgttcgacaaaaggctcaaaccagatattgttgccgttttgtgaatattgagcctgatttagtgatggtgagtaattttgcaattcaggttaattaattggtgggcatatgtgatgatgaaatgtcaaaatcgcttgcaatgatgtgttcgcatgtgcgattgaaaag

SEQ ID NO: 93353 - DNA, 1888 bp, Zea Mays
ggcgcgtatacgagcgaaggaaacggaagtttaagttattcccaaattgaacggcccaaagggaaaccccaccacaaccggtctcgagtctcgacagatcggcgtcttcgatgccgccggcgcaggcgccctccagcggcggcgccgcgtggcgccagctgctcctgctcctgacagtcctcccgctcacgctcgctgcgctggctttcgtgctccagtggcgcggcggcggcggcgtcgatgaccctaccactcgctggccctcccacgccttccccggcatggccgagcccaccccaccgtccctcccctcgtccgactgcgcagacgtgctcgtgggatcctccgccccctccttcccctacatccgcggctggtcattcacctccgactcgggcgctgctatgggttctgtagaggaacatctccaacccaaggtgtgcgtgcagacgagcacctccgcggggcttgagcagatcctgccctggctcttctatcacaaggtcgtcggcgtcgcgcagttcctgctcttcgtggagggcaaggcggcgaaacccaatgtcgcgggagtcctcgagtcaattcctggggtaaaagtggtgtacagaactaaggatcttgaggagcggcaggcacggagtcgaatctggaatgagacttggctttcaggatttttctacaaaccttgcaactatgaactctttgtgaagcaatccctcaacatggagatggctattgtaatggctcgggatggtggcatggattggatcatacatttagacactgatgagttactttatcctggcggagctgctgagtattctgttagacgtttgttagctgaggtccctcgtgatgtcgacatggttatttttccaaactatgaaagcagtgttgagcatgataatataaaagatccattcagcgaagtatctatgttcaagaggaattatgatcatcttcctaaagatacttactttggcatgtataaggaagcgacacgaggaaatccaaattattttctcacctatggtaatggaaaatctgctgcacgaattcaagaccatctccgtcctaatggcgcgcacaggtggcataattatgcaaagagcccaaatgagatcaagttggaggaggctgcagttctgcattatacatacactaaattttcagatttgacatctagacgtgatcgctgtggatgcaagcctacaaaagaagatgttaagagatgtttcatgttagattttgacagagcagcttttataattgcatcaactgctagtgaagaagaaatgcttcgctggtacaatgaacgagtcgtgtggaccgataagcagctgaacttaaagcttctgaggaaaggagtgctgactcgcatatacaccccaatgacaattgttcagagtctgcgcgaatccggtgtcttcacttccgccattacagctggccaacctgctgtgaatgccaaactctcacccaaggaaaccaatgcgcagagccaaaatgttaccgcacctgggaacatgacaagagtggtcagatctactgattcaaaggcatctggcagaaagatactgcaagccgttgatcttgccttcagcgatactaatgtaactgctgttccaccgttgtcgccgcccagtttggacgaacacaggcatcatagtgaataataatgtcatacgtatcatatatatattttttgctcggcgtataagttcctaagaaaaggaggaaaagaaagttactgacatcttcgttaagagaagtgctaacatcagcttggatggtcaatttttatgcaatcgagctttatttgtttcatttttaaactaaaattaattaatatctcgaacgaattttgaagaaacatttggattgtggt

SEQ ID NO: 93354 - DNA, 641 bp, Zea Mays
ctccacagagaaatggattttagtgttcggttcgctaatcttttttcttgtaatgtttcttgtttctttttggctaggtacaatgaacgagtcgtgtggaccgataagcagctgaacttaaagcttctgaggaaaggagtgctgactcgcatatacaccccaatgacaattgttcagagtctgcgcgaatccggtgtcttcacttccgccattacagctggccaacctgctgtgaatgccaaactctcacccaaggaaaccaatgcgcagagccaaaatgttaccgcacctgggaacatgacaagagtggtcagatctactgattcaaaggcatctggcagaaagatactgcaagccgttgatcttgccttcagcgatactaatgtaactgctgttccaccgttgtcgccgcccagtttggacgaacacaggcatcatagtgaataataatgtcatacgtatcatatatatattttttgctcggcgtataagttcctaagaaaaggaggaaaagaaagttactgacatcttcgttaagagaagtgctaacatcagcttggatggtcaatttttatgcaatcgagctttatttgtttcatttttaaactaaaattaattaatatctcgaacgaattttgaag

SEQ ID NO: 93355 - DNA, 1703 bp, Zea Mays
gttattcccaaattgaacggcccaaagggaaaccccaccacaaccggtctcgagtctcgacagatcggcgtcgatgaccctaccactcgctggccctcccacgccttccccggcatggccgagcccaccccaccgtccctcccctcgtccgactgcgcagacgtgctcgtgggatcctccgccccctccttcccctacatccgcggctggtcattcacctccgactcgggcgctgctatgggttctgtagaggaacatctccaacccaaggtgtgcgtgcagacgagcacctccgcggggcttgagcagatcctgccctggctcttctatcacaaggtcgtcggcgtcgcgcagttcctgctcttcgtggagggcaaggcggcgaaacccaatgtcgcgggagtcctcgagtcaattcctggggtaaaagtggtgtacagaactaaggatcttgaggagcggcaggcacggagtcgaatctggaatgagacttggctttcaggatttttctacaaaccttgcaactatgaactctttgtgaagcaatccctcaacatggagatggctattgtaatggctcgggatggtggcatggattggatcatacatttagacactgatgagttactttatcctggcggagctgctgagtattctgttagacgtttgttagctgaggtccctcgtgatgtcgacatggttatttttccaaactatgaaagcagtgttgagcatgataatataaaagatccattcagcgaagtatctatgttcaagaggaattatgatcatcttcctaaagatacttactttggcatgtataaggaagcgacacgaggaaatccaaattattttctcacctatggtaatggaaaatctgctgcacgaattcaagaccatctccgtcctaatggcgcgcacaggtggcataattatgcaaagagcccaaatgagatcaagttggaggaggctgcagttctgcattatacatacactaaattttcagatttgacatctagacgtgatcgctgtggatgcaagcctacaaaagaagatgttaagagatgtttcatgttagattttgacagagcagcttttataattgcatcaactgctagtgaagaagaaatgcttcgctggtacaatgaacgagtcgtgtggaccgataagcagctgaacttaaagcttctgaggaaaggagtgctgactcgcatatacaccccaatgacaattgttcagagtctgcgcgaatccggtgtcttcacttccgccattacagctggccaacctgctgtgaatgccaaactctcacccaaggaaaccaatgcgcagagccaaaatgttaccgcacctgggaacatgacaagagtggtcagatctactgattcaaaggcatctggcagaaagatactgcaagccgttgatcttgccttcagcgatactaatgtaactgctgttccaccgttgtcgccgcccagtttggacgaacacaggcatcatagtgaataataatgtcatacgtatcatatatatattttttgctcggcgtataagttcctaagaaaaggaggaaaagaaagttactgacatcttcgttaagagaagtgctaacatcagcttggatggtcaatttttatgcaatcgagctttatttgtttcatttttaaactaaaattaattaatatctcgaacgaattttgaag

SEQ ID NO: 93356 - DNA, 1937 bp, Zea Mays
aacggcccaaagggaaaccccaccacaaccggtctcgagtctcgacagatcggcgtcttcgatgccgccggcgcaggcgccctccagcggcggcgccgcgtggcgccagctgctcctgctcctgacagtcctcccgctcacgctcgctgcgctggctttcgtgctccagtggcgcggcggcggcggcgtcgatgaccctaccactcgctggccctcccacgccttccccggcatggccgagcccaccccaccgtccctcccctcgtccgactgcgcagacgtgctcgtgggatcctccgccccctccttcccctacatccgcggctggtcattcacctccgactcgggcgctgctatgggttctgtagaggaacatctccaacccaaggtgtgcgtgcagacgagcacctccgcggggcttgagcagatcctgccctggctcttctatcacaaggtcgtcggcgtcgcgcagttcctgctcttcgtggagggcaaggcggcgaaacccaatgtcgcgggagtcctcgagtcaattcctggggtaaaagtggtgtacagaactaaggatcttgaggagcggcaggcacggagtcgaatctggaatgagacttggctttcaggatttttctacaaaccttgcaactatgaactctttgtgaagcaatccctcaacatggagatggctattgtaatggctcgggtatgtctcttgcctgttatatctgctgttaattctgttatgttaatgattgagcttttcatttgtagctttagttagtcattggggctgctacgcaacaatgttgatttctagtttttctttgtgattttttctttagacatttcatacactaaggacaatgctatttgttgaaggatggtggcatggattggatcatacatttagacactgatgagttactttatcctggcggagctgctgagtattctgttagacgtttgttagctgaggtccctcgtgatgtcgacatggttatttttccaaactatgaaagcagtgttgagcatgataatataaaagatccattcagcgaagtatctatgttcaagaggaattatgatcatcttcctaaagatacttactttggcatgtataaggaagcgacacgaggaaatccaaattattttctcacctatggtaatggaaaatctgctgcacgaattcaagaccatctccgtcctaatggcgcgcacaggtggcataattatgcaaagagcccaaatgagatcaagttggaggaggctgcagttctgcattatacatacactaaattttcagatttgacatctagacgtgatcgctgtggatgcaagcctacaaaagaagatgttaagagatgtttcatgttagattttgacagagcagcttttataattgcatcaactgctagtgaagaagaaatgcttcgctggtacaatgaacgagtcgtgtggaccgataagcagctgaacttaaagcttctgaggaaaggagtgctgactcgcatatacaccccaatgacaattgttcagagtctgcgcgaatccggtgtcttcacttccgccattacagctggccaacctgctgtgaatgccaaactctcacccaaggaaaccaatgcgcagagccaaaatgttaccgcacctgggaacatgacaagagtggtcagatctactgattcaaaggcatctggcagaaagatactgcaagccgttgatcttgccttcagcgatactaatgtaactgctgttccaccgttgtcgccgcccagtttggacgaacacaggcatcatagtgaataataatgtcatacgtatcatatatatattttttgctcggcgtataagttcctaagaaaaggaggaaaagaaagttactgacatcttcgttaagagaagtgctaacatcagcttggatggtcaatttttatgcaatc

SEQ ID NO: 93357 - DNA, 773 bp, Zea Mays
acggaagtttaagttattcccaaattgaacggcccaaagggaaaccccaccacaaccggtctcgagtctcgacagatcggcgtcttcgatgccgccggcgcaggcgccctccagcggcggcgccgcgtggcgccagctgctcctgctcctgacagtcctcccgctcacgctcgctgcgctggctttcgtgctccagtggcgcggcggcggcggcgtcgatgaccctaccactcgctggccctcccacgccttccccggcatggccgagcccaccccaccgtccctcccctcgtccgactgcgcagacgtgctcgtgggatcctccgccccctccttcccctacatccgcggctggtcattcacctccgactcgggcgctgctatgggttctgtagaggaacatctccaacccaaggtgtgcgtgcagacgagcacctccgcggggcttgagcagatcctgccctggctcttctatcacaaggtcgtcggcgtcgcgcagttcctgctcttcgtggagggcaaggcggcgaaacccaatgtcgcgggagtcctcgagtcaattcctggggtaaaagtggtgtacagaactaaggatcttgaggagcggcaggcacggaggcggttccctgtccctcttttaatattctaaggagtgacggaagttacatgataggcaccgagtcggctatcaagttcatgatggaaccgagtcggtacaaagtcatacgtgaattgaattctatgtcttcgagtttatctcttattctgttgag

SEQ ID NO: 93358 - DNA, 1070 bp, Zea Mays
cacgggtgaggtctattccttcctgctacagtccaaagtcatggatccaattacctgaccgattcgcgagactgatgggacggcgtcacagcggcggcggcggccgcggcggcggaagaggaagagggcgagggcgagggcgtgggcgagatgaggaagaagatcttcctctgcacaaggctgcaaggtctggtgatgcggcagcagtggagtcggtgagcgagtccaaccctctcgccgtcaattcaagggatcgcctctcacgcacaccactccacctggctgcatgggctgggcatgttgatgttgtgagatgcctttgcaagcacaaagctgatgtgggagctgcagcaatggacgacactgcagcacttcattttgcttcccagaaaggccatgtagaagtggctcgtgagctgctggcatctggggcctctgtgaaagccaagaaccggaaaggcttcacggcgctgcactttgctgctcagaattctcacctggatcttgtgaagtaccttgtgaagaaaggtgttgacgtcacagcaaagaccaaaggtggccagacagctctacatgtcgctgaggatgatgaagtgcgtgcgttcctgaaggagtgcgagcaatccttgaagaagggtgccgagctaccatcggagaaggatgattctgccgagaaagagggcgatagcaagtcttcaggtgaggttatgaaagatgaggaggatgcagagcagggcgagaagaggaaaagcgaattggttggtgcgtcgagtttgtcaggagcaaaaaaagccaaagtttctcttggtcatctagtttgtgaaaatgacatggacgaggaagaggagtgatttcgagcagccttgaccttgaggatgcaatagaagtgcacttcgatgttttgttatgctagtcttagtctgtacggcgatcttgaatgtaaagacaagtgcaaagttgaatctcagttctcatgtattgcatggatgaaaattctaagggcttgtttggtaggactctggctcctttgaaaacggatgtagctctggctcatttatttgtaggagcag

SEQ ID NO: 93359 - DNA, 435 bp, Zea Mays
cacgggtgaggtctattccttcctgctacagtccaaagtcatggatccaattacctgaccgattcgcgagactgatgggacggcgtcacagcggcggcggcggccgcggcggcggaagaggaagagggcgagggcgagggcgtgggcgagatgaggaagaagatcttcctctgcacaaggctgcaaggtctggtgatgcggcagcagtggagtcggtgagcgagtccaaccctctcgccgtcaattcaagggatcgcctctcacgcacaccgtatgaaccaccaccatccctgcaaatcctccctttccctccctccttccctctctatcttattactagcagagaagcgccgagtagccgtgccttgcgttacggatcgttatcatcttattgattgtatataattagatgtctgtcattgagccttggtcatt

SEQ ID NO: 93360 - DNA, 2148 bp, Zea Mays
gcgcgcgcgaaggagacggataaacgcacacgcgcgcgcgtagctaagctagctagtccatatgtttgcgtcgcggaccaccactccacaatacacaaagcggctgcggatgtgagtactataaagaaagcgatgaggcgccaggccggtagccaaggatcgagtcgtttaattttctactaggagctagcagcgagcgggttatttgcaacgacggcatcgtcttggcgttggcgggcgtgtttggcaccatgggcgactactactaccgccgccgctcgccgcacctcctcccggcggcggtgctggcgctgctcgccgtcgtcgtcgtcgtgagcagcagcctcccgagtgcggcggcggcgggggcgggccggaatgtgatcacgcacatcaagggcttcgaaggccctctgcccttccacctcgagacagggtacgtggaggtggacgaggagcacggcgcgcgcctcttctactacttcatcgagtcggagaggaacccggcggaggacccgctcatcctctggatcaccggcggccccggatgctccgcgctctctggactcctcttcgagatcggacccctcaagttcgatgtggcggggtacacggaagggttcccgcggctggtctacttcgaggattcatggaccaaggtgagcaacgtgatcttccttgacgcgccggtggggacgggcttctcctactcgcgggaggaggccggcctgaacgtgagcctgacggagtccgggcggcagcaccacgtgttcctccgcaagtgggtggcggagcaccccgagttcgcgtccaacccgctgtacatcggcggcgactcctactcgggctacaccgtgcccgtgacggcgatggacatcgccaccagcagcgacgacgaggagccgccgaagctgaaccttgtgggctacctggtgggcaacgccgcgacggacgaccggtacgacacggggggcaaggtgccgttcatgcacggcatggggctcatctccgacgagctgtacgaggcggcgaagcagggctgcggcggcgacttctacgtggcgccggaccccaccaacgcgcggtgcgccagcgcgatgatggccatcaacatggtgaccttcgccgtgaaccccgtgcacatcctggagcccttctgcggcgcggccgtgcgggccggcggcggcagcatcttccagggctacggcggcggcgcgaggcggtcgatgctggtgcgtgacgacgtccgccacccgggcttcttcgccaagcagcggctgggcctgcccgtggagtgcagggacaacgggtaccggctgtcctacatctgggccgacgacccggaggtgagggaggcgctcggcatcctcgagggttccattggttcgtggagccggtgcaccatgctgtcgcactacaggcacgacgtcaccaccgtcatcccctaccatgtcaacctcaccaaggcaggatacagggcgcttgtgtacaacggcgatcatgacctagacatgaccttcgtgggcacccaagagtggatcagaagcatcggctaccccatcgtcagcgactggagaccatggttcgccaaccgacaggtcgcagggttcacaagaacatacgcccacaaccttactttcgccactgtgaagggaggagggcacacagctccggagtacaggccgaaagagtgtcaggccatgttggatcgatggacatcagaagcaggccaactctgatgaatgtggtgaccgcggaattaacaaagtacgtcgtcgttggtgtctctccgtcgaattactcatatgtaataataataataagacgggctttaatttgattcatagctagggagaggcaggcagcttgtagtacttttggctatgagcatgtctcacgcgtgtggtttccaagaacattcgatacaacaaaatgctggatcacccgacagtaaaacccattactaatatagagcaggtccaacaatgagggcctctttggcggacacattactacgtcagtccgctgacgtgaggggctagcaaggggtggacctatgtttatggagagcggggcacaagcctcactcaatttcgttgttttatgtatttactgtatctacaaagttttaatcgtcactatgccttc

SEQ ID NO: 93361 - DNA, 1866 bp, Zea Mays
gcgcgcgcgaaggagacggataaacgcacacgcgcgcgcgtagctaagctagctagtccatatgtttgcgtcgcggaccaccactccacaatacacaaagcggctgcggatgtgagtactataaagaaagcgatgaggcgccaggccggtagccaaggatcgagtcgtttaattttctactaggagctagcagcgagcgggttatttgcaacgacggcatcgtcttggcgttggcgggcgtgtttggcaccatgggcgactactactaccgccgccgctcgccgcacctcctcccggcggcggtgctggcgctgctcgccgtcgtcgtcgtcgtgagcagcagcctcccgagtgcggcggcggcgggggcgggccggaatgtgatcacgcacatcaagggcttcgaaggccctctgcccttccacctcgagacagggtacgtggaggtggacgaggagcacggcgcgcgcctcttctactacttcatcgagtcggagaggaacccggcggaggacccgctcatcctctggatcaccggcggccccggatgctccgcgctctctggactcctcttcgagatcggacccctcaagttcgatgtggcggggtacacggaagggttcccgcggctggtctacttcgaggattcatggaccaagcaccacgtgttcctccgcaagtgggtggcggagcaccccgagttcgcgtccaacccgctgtacatcggcggcgactcctactcgggctacaccgtgcccgtgacggcgatggacatcgccaccagcagcgacgacgaggagccgccgaagctgaaccttgtgggctacctggtgggcaacgccgcgacggacgaccggtacgacacggggggcaaggtgccgttcatgcacggcatggggctcatctccgacgagctgtacgaggcggcgaagcagggctgcggcggcgacttctacgtggcgccggaccccaccaacgcgcggtgcgccagcgcgatgatggccatcaacatggtgaccttcgccgtgaaccccgtgcacatcctggagcccttctgcggcgcggccgtgcgggccggcggcggcagcatcttccagggctacggcggcggcgcgaggcggtcgatgctggtgcgtgacgacgtccgccacccgggcttcttcgccaagcagcggctgggcctgcccgtggagtgcagggacaacgggtaccggctgtcctacatctgggccgacgacccggaggtgagggaggcgctcggcatcctcgagggttccattggttcgtggagccggtgcaccatgctgtcgcactacaggcacgacgtcaccaccgtcatcccctaccatgtcaacctcaccaaggcaggatacagggcgcttgtgtacaacggcgatcatgacctagacatgaccttcgtgggcacccaagagtggatcagaagcatcggctaccccatcgtcagcgactggagaccatggttcgccaaccgacaggtcgcagggttcacaagaacatacgcccacaaccttactttcgccactgtgaagggaggagggcacacagctccggagtacaggccgaaagagtgtcaggccatgttggatcgatggacatcagaagcaggccaactctgatgaatgtggtgaccgcggaattaacaaagtacgtcgtcgttggtgtctctccgtcgaattactcatatgtaataataataataagacgggctttaatttgattcatagctagggagaggcaggcagcttgtagtacttttggctatgagcatgtctcacgcgtgtggtttccaagaacattcgatacaacaaaatgctggatcacccgacagtaaaacccattactaat

SEQ ID NO: 93362 - DNA, 2050 bp, Zea Mays
gcgcgcgcgaaggagacggataaacgcacacgcgcgcgcgtagctaagctagctagtccatatgtttgcgtcgcggaccaccactccacaatacacaaagcggctgcggatgtgagtactataaagaaagcgatgaggcgccaggccggtagccaaggatcgagtcgtttaattttctactaggagctagcagcgagcgggttatttgcaacgacggcatcgtcttggcgttggcgggcgtgtttggcaccatgggcgactactactaccgccgccgctcgccgcacctcctcccggcggcggtgctggcgctgctcgccgtcgtcgtcgtcgtgagcagcagcctcccgagtgcggcggcggcgggggcgggccggaatgtgatcacgcacatcaagggcttcgaaggccctctgcccttccacctcgagacagggtacgtggaggtggacgaggagcacggcgcgcgcctcttctactacttcatcgagtcggagaggaacccggcggaggacccgctcatcctctggatcaccggcggccccggatgctccgcgctctctggactcctcttcgagatcgcctgtatggcgcaatggatgacccagtttttcccatctgaattccgcaattggacaaatatatggggaagctggttcttggacttgtgttatcaagaagaagagtcatgctcctccaccacctcccccattggacccctcaagttcgatgtggcggggtacacggaagggttcccgcggctggtctacttcgaggattcatggaccaaggtgagcaacgtgatcttccttgacgcgccggtggggacgggcttctcctactcgcgggaggaggccggcctgaacgtgagcctgacggagtccgggcggcagcaccacgtgttcctccgcaagtgggtggcggagcaccccgagttcgcgtccaacccgctgtacatcggcggcgactcctactcgggctacaccgtgcccgtgacggcgatggacatcgccaccagcagcgacgacgaggagccgccgaagctgaaccttgtgggctacctggtgggcaacgccgcgacggacgaccggtacgacacggggggcaaggtgccgttcatgcacggcatggggctcatctccgacgagctgtacgaggcggcgaagcagggctgcggcggcgacttctacgtggcgccggaccccaccaacgcgcggtgcgccagcgcgatgatggccatcaacatggtgaccttcgccgtgaaccccgtgcacatcctggagcccttctgcggcgcggccgtgcgggccggcggcggcagcatcttccagggctacggcggcggcgcgaggcggtcgatgctggtgcgtgacgacgtccgccacccgggcttcttcgccaagcagcggctgggcctgcccgtggagtgcagggacaacgggtaccggctgtcctacatctgggccgacgacccggaggtgagggaggcgctcggcatcctcgagggttccattggttcgtggagccggtgcaccatgctgtcgcactacaggcacgacgtcaccaccgtcatcccctaccatgtcaacctcaccaaggcaggatacagggcgcttgtgtacaacggcgatcatgacctagacatgaccttcgtgggcacccaagagtggatcagaagcatcggctaccccatcgtcagcgactggagaccatggttcgccaaccgacaggtcgcagggttcacaagaacatacgcccacaaccttactttcgccactgtgaagggaggagggcacacagctccggagtacaggccgaaagagtgtcaggccatgttggatcgatggacatcagaagcaggccaactctgatgaatgtggtgaccgcggaattaacaaagtacgtcgtcgttggtgtctctccgtcgaattactcatatgtaataataataataagacgggctttaatttgattcatagctagggagaggcaggcagcttgtagtacttttggctatgagcatgtctcacgcgtgtggtttccaagaaca

SEQ ID NO: 93363 - DNA, 2415 bp, Zea Mays
ttcccaactgcccactacctctcgttcccgtctccttcctctattcgtgttgtccgttcgctgccgccgtcgcctggttcgcatcgcatacagcgcctcagtccagatcgatcctccctcttcccagatcgggtctagttggacggcagcagccgccgccgcggcatctgtcatattcacgccgcgtgtgctctctctttctgtctccctctctatctgcgacgactgggtgtgataccgcagccgccgccctacgctgggttcccgagccttcgccgatctcttctccggcgaagagcgcccaccagatccgccgcgcatcgatgtctcctttggctcttctccaagctctcatcttcatcctgtgctgctcgcctctggcttctgcttcgtcgtcggagctaacccttgcaggagctgcttgtggagatgatcagcttgtcatcttcgatgcttctgatggcctccttaacctgtcggtcaatggggttctgatgcaagatcgcgtttttgcctgccagaagctcggcttctactttggcagtggatgcctccgctgcagcaacctttcagatgcgtggaggagtgccgtaaagcagtactgtggtgaagggagcgaaaagagccatgcaactttacatcaagatgtgccaaggaagctcttgaggtggtccacagaaaatagctcaaggaatgcatgtgaaaggtctgggttgaatgaaaataatcaggacattggtgattcttcagaaaagcaggagcatctcctggctgtgccaggtgtgattctcttatgctgtggccttatgttaccatgctttcatgctgaaaggaaagaagtcagcaggcatgacaatgcaaccattcagcgcaacgcacttgaatcagtttcatcctatgaaggaagcatgtcatctgagaaagtcccaccaactccacatcgaatacctccaagtccctctagatttgcgccgtctccacagatagctagagttggatctgtcaacttaagcatccagcagatcctcagggcaactcagaacttctcaccttcatttaagttaggtgaaggaggatttgggatggtctacagggctgtattgccagatggcaatgttgttgcggtcaagagagctaaaaaggatcagtttgcaggtcctagggatgagttcagcaatgaagtagacttgcttgctaagatagaccaccgaaatttggtgaggttactgggttttactgataaaggaaatgagcgcattatcatcactgagtatgttccaaatggtactcttagagaacatctagatggtcaacatggaagagtcctagattttaatcagcgtctagaaattgcaattgacgtggctcatgcacttacttatcttcatctgtatgcagagaagactataattcatcgtgatgtgaagtcatcaaacatcctgctgacagatagctatcgggccaaggtgtctgactttgggtttgcaagaagtggccctagtgacacggagaagacacacatatcaacgaaagtgaaaggcacagctgggtacctggaccccgaatacttgaggacataccagctaactccaaagagtgatgtcttctcatttggcatattgcttgtagaaattctttctgctcgcagacccgtagagctgaagcgaacccctgaagagaggatcacaatcagatggactttcaaaaaattcaacgaaggcaacacgagagagatactggacccattgctggaagatcacgtggacgacgaggtgcttgaaaagctccttagcctggctttccaatgcgctgctccgacacgggacgaccggccgaccatgaaggaagttggggagcagctgtgggagataaggaaagagtacggaaagagtgttaggaaggtgtgaagatcatggaaaacatttccctgtttctcaagactttccctggaccaaggggactaagggggtgtttggttttatagggattaaattttagttcttccattttattctatttaagtccctaaattaccaaacacggaaatcaaaactttattttagttttagtatttggtaatttagagacttgaatggaataaaatggatagactaaaaataagttcctagaaatcaaacaccctctaagcatgcgaagtatttgtgcccattggataaacacctgatcatctatgtttcttggaagatgtgacctgaagaaatgtacagtgcgataacaccgccatcagtttgtgctttcttgtctcagtttgcagtgcactccctctatggagaatgtatattttggagttctcgcatttcttgattctgttgatatggtattctgatggatgtacccgcatacattactgcaaacggtctgaaataatatacgaagggaaattgtttgtattgg

SEQ ID NO: 93364 - DNA, 992 bp, Zea Mays
catttggcgatgttctggaaagggactgagaacttttgtactgttcacagagaagactataattcatcgtgatgtgaagtcatcaaacatcctgctgacagatagctatcgggccaaggtgtctgactttgggtttgcaagaagtggccctagtgacacggagaagacacacatatcaacgaaagtgaaaggcacagctgggtacctggaccccgaatacttgaggacataccagctaactccaaagagtgatgtcttctcatttggcatattgcttgtagaaattctttctgctcgcagacccgtagagctgaagcgaacccctgaagagaggatcacaatcagatggactttcaaaaaattcaacgaaggcaacacgagagagatactggacccattgctggaagatcacgtggacgacgaggtgcttgaaaagctccttagcctggctttccaatgcgctgctccgacacgggacgaccggccgaccatgaaggaagttggggagcagctgtgggagataaggaaagagtacggaaagagtgttaggaaggtgtgaagatcatggaaaacatttccctgtttctcaagactttccctggaccaaggggactaagggggtgtttggttttatagggattaaattttagttcttccattttattctatttaagtccctaaattaccaaacacggaaatcaaaactttattttagttttagtatttggtaatttagagacttgaatggaataaaatggatagactaaaaataagttcctagaaatcaaacaccctctaagcatgcgaagtatttgtgcccattggataaacacctgatcatctatgtttcttggaagatgtgacctgaagaaatgtacagtgcgataacaccgccatcagtttgtgctttcttgtctcagtttgcagtgcactccctctatggagaatgtatattttggagttctcgcatttcttgattctgttgatatggt

SEQ ID NO: 93365 - DNA, 183 bp, Zea Mays
atggcaaaccctagcaacgacaaagggggcggctcaccggcagagcggacgaggaggagcaggacgaagcgagaccccagcggggacaaggtctacagcgtgccaccgcaggagttcgcggacaccgtgcagaggctcacgggcgcaggcaccagtcactcgtcccagcaccagcaggctccg

SEQ ID NO: 93366 - DNA, 783 bp, Zea Mays
atggagaacagcagcaagaacaagcagcagcagcaggccgtggacgcagcttcctgcagcaagcccgccgccaggccgcactggagacgccgggaccccgcggacacggcggtccacgtcgtccggcccgaccagttccgtgcagtcgtacagcaactcacaggcgccgcttcatcgcagccgccaccgccagcacatcaccatcatggcgagtatggcaccgcagcagcacaacagccgcagcaccaagcagctgctgctggtgccagtagaaatgcggcggcacagcagcaccaagctgctgctggtaccgccattaccagtgcgacgccgcagcagctgtatcgtcatggcggcggcggtggccccaagacgctggggcagattcagagagagtgcatggcctgggcgaactccgacgacgacgacgacgactaatgcacacttcaatccaacgatgatcgatcgagggattcttaattaattatctactagagtggctacttccttatattgcaaaacgaagagtgtatgtcgcattttgtttatttactagagtagttaaggagagaggtttattgctctccagtccatttattcttatataaacaacccaagaggctcaaccaacatatatctgcaaggaaattaaaaagcatctagttgagccatatgtgattttggtgattgtatggaaacataattaataattgaactaatatagtttgttaatatgtgtggcgtaaaggttgaggtgttcgtttggtttatatatttataacg

SEQ ID NO: 93367 - DNA, 1757 bp, Zea Mays
cacaacggggcacgactctgaccaccacgccaattcgatcttcctgccggcgcggggcgcggcgcggggcgagggctcgagcggagcaatccatataacccgtttataccctacctcaattccactcatcagctcactccggcgccatcatcttccttctctcagttcctcacctcgatggactcacttgccgccgcctgcctctgctcccgccgtcgccgcgctcgccgactcctcctggccgctgcggcggccaccactgggtacggcctctaccgcctctaccgtcaccaccgccgccgcatcgtcgctgccctctcccttgccgacgccgtgtctcaggtcggttccgacctcgccgaattcctccgctccgagtccgaccaggtcccacgaagcctcctccagctctccaagctcgccgcttccgaacccgtctcctccgccgcgtcttccctctccgagtccctcgcgtccggcgtcctccgcgccatctctcaccagcgccaattacatcaacaacagcagaaaaacccccaaaccccgctccaagatcggatcttggatcgtctcctctccccggagggcgccggattcgcttccgctgtcgtcggaagcttagcgaggagcctcgtcctgtcctcctgcgacgcccgcagggcggaggccggcgaccgcgaggagccgcggtggctggctgcgctctgcagcgccacgggcaaggaggcttctgcggacctcgtccgagtcttcgtcagcaccgccgttgccgcctacctcgaccgcaccgccgcagtgcgcagcaacaaccatctgctcgctggcctctctgatccaaggcacgaagcccaggtcaaggacctggctgtctctgtctgcaacggtgctatcgaaaccttcctcaggacgtcgcggcagcttgccaaggaggcctccagtgctcgcattgaggtaacatcaatggagcgtgtggtggaagattcagacagcaacttcgtgatccacaaggtttcaagcacgctggccgctccgagcaacaggagatttgtactggacgtcacaggcagggtcaccgcggagacggtgcggtcattcctcgacttcctagcacagcggatgtctgatggggcacggaagagcatcgtcatcgcccgtgatgaagttgcggagagagggctcgttgctgtcaagtacctcggtgccaaatccatggctatcttcaccatctccttggcattatgcatgcacattttgatgggaacaaggttccttttgccggcatagctacctagcttgtggggagctgggattccatcgcaggtgattgattactacttgtcctgattctaggtgcagagtaagttatgtagattgcaaattgatcctataataccagttgtctttttgtgtgtgtgtgtgtgttggtgaaaagtatgtaaactttagctagaacccgctgggatttgtagttggtttttgtttgtttggttgaaggaagtatatatgcatctgaaatgacactggccaatttggcaatgtgattttgaggttagacacctctattgttgcgttctaatagctgtcactagattgttgttgctggttgtttttgttgtcataagctgttgatcaatgtaaaacaaccaaacagagcagcacgagctggaatcttgactgcttgctcttgaaactctctcttttgtacacttcttcagttgtaagaaagtggaaaatgaagtgaagcttccctttgtttt

SEQ ID NO: 93368 - DNA, 687 bp, Zea Mays
atggccgcgcggactggccgctgggagctggctgtaccgcgttgggcgagccgcttccgctgccgtgcgctggccacaacgccgcgtcgaggcccggacgggctggccgaaaatggctgccacgccgcgctgggctacagggggcaagagcgccgtcgggggctgcgacgcagggaagctctcgccgccggccgagaacaagggaagaaggtcaggcgagagggagagatgagtggaatctcacctgcgcatgaggacaggccaccacaaaggctcctaggctcatcgccgagggacctcatggcacgcagcgaggggaagctccgggacgatcgtcgagcggttgcgcagagcagtgtgagcaggagcgtcgagagaaagcatggcacggtttggagagcagtgggcgtcctggaggggtctgataaggcgtcgagggcaggcaacagttcccggagtccgcatggtgtgggcgcgagtggaggagcagttatggaaggagaggggaggaaccgacgtgcaggccctgcatgcgcgtccgcgagcacgagtgtggctgatgggtcgggcgcacaagaaatggtcctgtgggcgaatgcaggtgaggtattcgggcgcaaaggcgaggtacagtttcgtccgagtgaaactagcacgcgtgaaaaggacaacagtttgggaagatga

SEQ ID NO: 93369 - DNA, 458 bp, Zea Mays
tttattgtttatacctcccatacattatccttggtcttcacctccacctacacctacatctccacctaccgaacattagacccctccagctaccttgccaacgcatcaatgagaagacgggttagactttgttgaaaccctcttcgctagtggaggtatcgaccatcactcgtcactgtaccccaatggtgatcggcgatcgtgagcttccatgttatgtgttgtgatacttgagacttttattatgactatgtatgagatattgtctcttattatgactagatgagatgtgtcttattatgactatgtttgagacttttgtgatttaattgatgagactatggatttaaatattgttatgtgattgtatatgagatgttttatgtgaaaatatgttgtgctatatagatgttgatatatttgttatattttggaatgtggtgtaaaataaaaataaa

SEQ ID NO: 93370 - DNA, 1570 bp, Zea Mays
gagaacgtggccttccagggagtacttgccgacggcgagcaggaaggcgtcgcgccaccgggtgtagagggtggacgacacgtcgaggaggacgggaatgatagccctgatgttctgaactgcaaccgcctgagcgtgcagattgatgagcgcagcggcttcatgaaggagaagagcttcacgcgtgcgagcgtcaggagcgtcgtcacgaatggtggaggcgtcgtcgttgttgacctcctcgtccaaaggatcagcagcggcgcgggcctgggcggcccgggcgagagcgtcgcggatgcgggcggcggccgcgtcgcgctccttggtggcctcagccgcctcgcgttcagcatcgcgggcacgcgcaagggcgagctcgcgagtttgaagacgagcagccctctcctgctgcgcgcgcagagcagcctctgccgcagcagcgtcgtcgactctgggagaagggggctggtggctagccatggacggcgcgcaggagcagcagccgtagcagcgtcggttgagcgcgctagacagcggaagatgattgaagccgacgacgaggcgacgctccacttcatccagttcacactgctggctgtcgtggtcggcagcgctgccaaggccacagcggcgcacgcatcgtaggcagcctcaggacctcgccatcgccacactgggcatcgtcgcatgggaggccaccacgctcacgctcagcctcgcgtgtacggagatgtgggccattgccgctgacacgtgctggaggccatcaccgtgacggccatagcgcagctggcttacgtgctaatgctgcaccgcgccaccgccaacaacgctgaagcaggcaaccagttctcccaaaggatttggtggctacgaactaagataggaagaggtatttctatttgggtcttaacggtgttagtgaaaaacaaacggaatggtaaaatccaaagaaacgtgtaattttttatgttcttagactagggtctttcgatggtattttctagagacaatgaactttcgctgctagagaaccaattttcccttttaaaaaatcaatgttttaaaacttttgcctaataatttagcgcaaaacacatttttagtgtatgcatgttatatacttggatttgtattcaaaagtactttaatatgatgctcattttgtatctattgatggcataatttaaaagaaataaatggccaaagttccgctcaaaagaccttgccaaaaaaaaattaatggcttattttatgggatgtagggagtattatgcatgtaagttggatgacattcactcagataggagtcctcaataagttaagaaaacaaaatctaaggatgtttgatagatatatatagcaagtgtatattaggcaagttcatattcggcaagtccacaatcagtgtgattagcacctgccatgtattgtgattggcacctgccatgtactgtgattggcacctgccatgtactgtgattggcacctgccatgtacactcagccacattggctatatatatgaacgtcaccacctcactgcagtgtgtggtgtcttctccaat

SEQ ID NO: 93371 - DNA, 486 bp, Zea Mays
atgaaggagaagagcttcacgcgtgcgagcgtcaggagcgtcgtcacgaatggtggaggcgtcgtcgttgttgacctcctcgtccaaaggatcagcagcggcgcgggcctgggcggcccgggcgagagcgtcgcggatgcgggcggcggccgcgtcgcgctccttggtggcctcagccgcctcgcgttcagcatcgcgggcacgcgcaagggcgagctcgcgagtttgaagacgagcagccctctcctgctgcgcgcgcagagcagcctctgccgcagcagcgtcgtcgactctgggagaagggggctggtggctagccatggacggcgcgcaggagcagcagccgtagcagcgtcggttgagcgcgctagacagcggaagatgattgaagccgacgacgaggcgacgctccacttcatccagttcacactgctggctgtcgtggtcggcagcgctgccaaggccacagcggcgcacgcatcgtag

SEQ ID NO: 93372 - DNA, 1493 bp, Zea Mays
tctccccctctcctcctctagcttctccttctctctctctccttcctggaccattctctctatctcctttctctctctacacatactcagacgagcagaagcagctagggacaccataggcaaactacttcagcaagaaattaaactatctcctacgcaagatcagaagaaactgtgtatggagcaagaagaggttggcctcgccctgggcctctccctcggctccggccaccaccaccaggagctcaagccccaacatccgtcgcatccgtgtgcggcgttgttggagccttctctgtcgctcagcggcccggcgaccaaggatgatggcccgaccgcaccggtgaggaggttcgctgccgtgaagagggagctgcagacgatggaggggaacgacgacgaggccaccggcagggtacttgtctactcagtggcgtcgtcggcggtggttactgccgacgacgacgaagggtgcaacagcagccggaagaagctgaggctgtccaaggagcagtcggcgctgctggaggaccacttcaaggagcacagcaccctcaaccctaagcagaaggctgctttggccagacaactgaacctgagcccaaggcaagtggaggtttggttccaaaacagaagagccagaaccaagctgaagcagacagaagtggactgcgagattctcaagcgctgctgcgagacgttaacagaggagaaccggcgtctccaccgcgagctccagcagctccgcgccctcagccacccgcacccccacccggctgcctttttcatgcccaccgccgctgccgctgcgctctccatctgcccctcctgccagcgccttgttgccaccggagcatctgccgccgccgcaaccaccgccggtgcagataataagcctaaggcgggcggccccggcggccgagcgccacacgtgttcagccctttcaccaattctgccgcctgctgaacacgcatacatatgtatatacatgcatgcgcacacatacatatatacgtatttttctttagcgctagccacgctctatcattcatcgatggtcatctactagctagatagtaattggttcactagatggcatatattcctgtcccctccccccttaattcattagctttgttttttcacaagctaattaatgaattgatagcggcgtcgcgtgaggacgatggagcaccacgcatgcatatgattctagtagcaaaaacaagagatatatgtcttgtttaatttggtgttgcttctgcttagtatagtgcccactgctggtgctgtagctgtagctttaattagtaggtgttcctgatggatttcctcttgtattagttaactgtcagtcagggaatagtaatgatgacagcatgacaccacatacacatcccagtttatttggatgtggatccatgtatatatgcacatgccacatgacggatctgtttcaacaattaaatactatattgatttgtcttcagaa

SEQ ID NO: 93373 - DNA, 75 bp, Zea Mays
gctggctttggtcaaactggccactctcgggatttcgtcggcggtgtacggctaaaaatcaccggactgtccggt

SEQ ID NO: 93374 - DNA, 1827 bp, Zea Mays
agctataaaggtttgcgcagccgtagaggatccgagcagcagccacgtgggccgtgctcatggtccctttacgtctacaaataccctcccgctctccctctccttcttctctagactccccttcgtccctttctctctcttcacactcgcctcgccattaaagctccaaaaaagaaaaaaaggctgcgaaaaaaatcatcttctcttctcctaaaatcttccaccttgaaccgtccctgtccgcgaatttctagatgccccgatcgcttccgatttttttctggatttctccgattttttgaagtatttttccttgtggacggtttcattgccattcctcgacggggttagggtttgcggggatgagggtgcacggcgaggtgtcggacgatgaggcggccgtggctgtggttggggaaacggtgccctcctcgccgcctcccgcctccgtggtgcagccgctggtggtggggtacgccctcaccaagaagaaagtcaagagcttcctgcagcccaagctgctcgcgctggccaggaagaaaggcattcatttcgtatcaattgatgagacttgccccctctctgaacaaggtccatttgacatcattttgcacaagcttactagtaaggagtggcagcaagttttggaggactatcgtgaagagcatccagaagtgactgtcctcgacccaccaaatgctatccaacatttgcacaatcgccaatcaatgctacaagaagttgctgatttgaacctgtccaatggttatggagaggtttgcgctccacgacaactagtcatcatgaaagatccgtcttccatacctgatgcagttgccaaggctggactaaccttgcctttggttgccaaaccattggtcgctgatggtacatcaaaatctcatgagctatcccttgcatatgtggaagcatcattgcctttgcttgaccctcctttggttctccaggaatttgtcaatcatggtgggatcctatttaaggtatatattgttggtgaaacaatacaggtagtccgcaggttttcacttcctgatgttaatacatatgacctgggaaacaatgacggtatctttcgattcccaagagtttcttgtgctacaaataatgcagaagatgcagatgttgacccttgtattgcagaacttcctccaaagccacttcttgagaaacttggccgggagcttcgacgccggctgggtcttaggctgtttaacatagatatgattagagaacatggaagaaaggaccggtactatgtcattgacatcaactattttcctggatatggcaagatgccaggatatgagcacatattcactgacttcctgctaagcctcgtgcaaagcaagtacaagaggctaagtgggagctgaagcgtagagaagatttactttcgatggagactattaacagatgccagctagcctggccatataacagtggcagctagaaaggtcttccaggttgtacatagcaagggggtgggtcttagcatgaatgcggtgtttgggccggggccttgactgaaggcgcatagcagaactaagataaaaaatgcagtgtttgggccggggcagtatctgaagaaaggttttggctccgtgcccagcctactgtgtaattcgtttgaccgagtggccgacctgtgtaaatcgttttaccgagtgccgacctgggcttctttagtttcaaaaacaaacaaacaaaacctttgcttcgtttttgcattcattgtttatcacccgactgatgccccgttctttgattgagatttgctgtagttaattttgcggagatttcgctgtt

SEQ ID NO: 93375 - DNA, 1768 bp, Zea Mays
agctataaaggtttgcgcagccgtagaggatccgagcagcagccacgtgggccgtgctcatggtccctttacgtctacaaataccctcccgctctccctctccttcttctctagactccccttcgtccctttctctctcttcacactcgcctcgccattaaagctccaaaaaagaaaaaaaggctgcgaaaaaaatcatcttctcttctcctaaaatcttccaccttgaaccgtccctgtccgcgaatttctagatgccccgatcgcttccgatttttttctggatttctccgattttttgaagtatttttccttgtggacggtttcattgccattcctcgacggggttagggtttgcggggatgagggtgcacggcgaggtgtcggacgatgaggcggccgtggctgtggttggggaaacggtgccctcctcgccgcctcccgcctccgtggtgcagccgctggtggtggggtacgccctcaccaagaagaaagtcaagagcttcctgcagcccaagctgctcgcgctggccaggaagaaaggcattcatttcgtatcaattgatgagacttgccccctctctgaacaaggtccatttgacatcattttgcacaagcttactagtaaggagtggcagcaagttttggaggactatcgtgaagagcatccagaagtgactgtcctcgacccaccaaatgctatccaacatttgcacaatcgccaatcaatgctacaagaagttgctgatttgaacctgtccaatggttatggagaggtttgcgctccacgacaactagtcatcatgaaagatccgtcttccatacctgatgcagttgccaaggctggactaaccttgcctttggttgccaaaccattggtcgctgatggtacatcaaaatctcatgagctatcccttgcatatgtggaagcatcattgcctttgcttgaccctcctttggttctccaggaatttgtcaatcatggtgggatcctatttaaggtatatattgttggtgaaacaatacaggtagtccgcaggttttcacttcctgatgttaatacatatgacctgggaaacaatgacggtatctttcgattcccaagagtttcttgtgctacaaataatgcagaagatgcagatgttgacccttgtattgcagaacttcctccaaagccacttcttgagaaacttggccgggagcttcgacgccggctggtactgaggtcttaggctgtttaacatagatatgattagagaacatggaagaaaggaccggtactatgtcattgacatcaactattttcctggatatggcaagatgccaggatatgagcacatattcactgacttcctgctaagcctcgtgcaaagcaagtacaagaggctaagtgggagctgaagcgtagagaagatttactttcgatggagactattaacagatgccagctagcctggccatataacagtggcagctagaaaggtcttccaggttgtacatagcaagggggtgggtcttagcatgaatgcggtgtttgggccggggccttgactgaaggcgcatagcagaactaagataaaaaatgcagtgtttgggccggggcagtatctgaagaaaggttttggctccgtgcccagcctactgtgtaattcgtttgaccgagtggccgacctgtgtaaatcgttttaccgagtgccgacctgggcttctttagtttcaaaaacaaacaaacaaaacctttgcttcgtttttgcattcattgtttatc

SEQ ID NO: 93376 - DNA, 119 bp, Zea Mays
atatacaaatgcaaaaatgcttgggttagtaacataatcattttaaaacgaagcagcaggtcagtgtctttgaaattaaacaaccaaaatcgctgtaaattattttgttgggaagggcg

SEQ ID NO: 93377 - DNA, 95 bp, Zea Mays
aattgtgccacatcaacaaattacatttgatcgacattatcatttttcgactaatcgtggttagtggggcttatcggtgccatggggatcagttt

SEQ ID NO: 93378 - DNA, 121 bp, Zea Mays
caacaaatatgatgataaccaatggttaatcgtgtttttgaggacctttggaagacgaaggcccccaacaagtggcccgagttctgaggaggaataaaacaccacgatcactcaaaaaacg

SEQ ID NO: 93379 - DNA, 144 bp, Zea Mays
atggcgggagagaaagtggcttcagacctcgccctagtgaaagctttgagtgctgctgaggagatgatgcatggagaaagcagccttttgactgaagttgttgagggtatggctggtgcgacagatggatatatccaaagatga

SEQ ID NO: 93380 - DNA, 339 bp, Zea Mays
atggacaagagcagagcgaagcccaccaccccaagcaccacgccggtgatcacagcggctgtattatccgacgatgaagacgatgaagacgacttcttcgtcttcccatctttagagctagatgtactagcacttttctttggtcgtggcggtggtgacagggacgatttcgatgggggactgggagatgaatttgattcaccctttggtggcgagggtgactttgaagatgattttggcgccaaagctgatgcttcttgtggtggcggcgacttcttggaggatgatggcgaggactgtgggctagaggccatttattggtttggtcttgtagaatga

SEQ ID NO: 93381 - DNA, 216 bp, Zea Mays
atgacgccgaaggagaagacgtccgacctgtccgtgagcttgccgctggacgcgtactccggcgccaggtagccgaaggtgcccatgacgcgcgtggagacgtgcgtgttggtgtccgtcgtgagcttggccagcccgaagtccgccaccatggcctcgaagttgttgtccagcaggatgttggcggccttgatgtcgcggtggatgatccgagga

SEQ ID NO: 93382 - DNA, 1701 bp, Zea Mays
atatcaatcatccagaaggtcaaactctcccctgtttcgacttggttccctgctcctgccctgaaaggagttgtcttggttccctgcccctgccctgaaagcagcagttggagagtcgaatcgtccttcttctctccggcgggaggaggcgggcggtgggcggtgggcggcggcaggaccgtgatgacgagcagcagcaacaacggcggccggccagacgacggcggcgaggtggtcctggaccacgagtaccaagaggagtacgtgaggaactcgcgggggatgagcctcttcgcatgcagatggctgccggcagttgcaggcaagagggggagggctccagctccaaaggcgctcgtcttcctctgccacggctacgccgtggagtgcagcgtgacgatgcgcggcaccggcgagcgcctggcgcgtgccggctacgccgtctacggcctggactacgagggccacggccgctccgacgggctgcagggctacgtgccggatttcgacgcgctggtgctggactgcgacgagtacttcacctcggtggtggcggcggcggcgcagtcgcagtccaaggacgcccaccaacttccccggttcctgctcggggagtccatgggcggcgccgtggctctcctcctccaccgccggcgccccgagtactggagcggcgccgtgctggtggcgcccatgtgcaagatcgccgacgacatgcggcctcacccgctggtggtcaacatcctcagggccatgaccaccatcatcccgacgtggaagatcgtgcccagcaacgacgtcatcgacgcggcgtacaggagccaggagaagagggacgagatccgcagcaacccttactgctacaaggacaagccgcgactcaagaccgcctacgagctgctcaaagtcagcttggacctcgagcacaacctcctccaccaggtgtcgttgccgttcctgatcgtgcacggcggggcagacaaggtgacggacccgtcggtgagcgagctgctgtaccaatcggcggcgagccaggacaagacgctcaagttctatccgggcatgtggcacgccctcacctccggcgagtcgcccgacaacatccaagccgttttccaagacatcatcgcctggctcgaccacaggtcacccgacacggaacaggaggagctggtgtcgtcggaggtggagcagaaggccaagcacgacgaccagcgccaccaggagcagctccaggacggcaacaaatagctagctgcttgcttgcctgctgctttcttctctttacagaacgaaccgtttcatttggtcatgcatggatacacatcatgtctcagtgatacgtaccgactaaattaaattattagatcgaccgcgcttacctagaaattaaacaatcagctgttcgacatcatatatcatcaggtcctttattaattttagactccaacgtgatgcattatatatatggtttactgcagcaatctagctacatcatatacctatctacattatcgcctaatgagttagatatgaaactttacattaatgaaaaaactcgcttctattttgatagaagaggaaatctgtatattccggcgggcaaaagtgaaattaaacatctattggaggaagatgataacacaaaatacttctaattagtggtaaatggcaaacaccaaaaataaagaaaatatagtc

SEQ ID NO: 93383 - DNA, 647 bp, Zea Mays
aagcccggcccggtccgttgtgtaataaactgataactacgaccttaacgactagagttcgagtattctcgtctcatctgtggaagaggagagaagactgaagagaagggaagacatggccgtgacggcggaagcggcggcagagatggtgttggagcggcgggcgtacgcgcgggtggggctcctcggcaaccccagcgacgtgtacggcggcagggccctgtccttcgccatcgccgacttttccgccaccgtccacctccgcccttcgcccgagctgctcatccagccgcatccgcaccacgacctcgtcgccttcccctctctccctcaactctcctctgtcagccaactgaccaagcatcgtgccggaggggctacagtcacagatgggccaaggcgtaaggctaaggaagagaagcgtaaagacgtttggaccggcttgggttaatgggctgagtgagtgcgcgtgagagcgatatgtacactgttgtctgctggggagggtagcgaataatcagaactcatcttcatctccaagacattgtgctctctgcttcctgccttcttcctccttactctgaatctactctgagtattgtatccagtatatgcgagagtgtaacaagtggtatcagattcgtcga

SEQ ID NO: 93384 - DNA, 701 bp, Zea Mays
ggtgcaccacttagtaaaaggggagtaggaaggcaacaaaaaaataggatcaaaagttgcctcgaaggtggaagtggtgggtctaaatgcactaaaagggttgctgaaaatgagaatgagaagacaaaaaatgattagaggaaaagtgcggtgtcccaattgtggagaattaggacacaggaaaactagttacaagtgcccactcaacggaacaaagaaaaggccaagaaggccaaggaaaaatagtaccaaaggatggtttcctaaagagtctacgcctgagagaccgaaaactacaagagaacaactaatgcaagagagtcctagaataatgacaagaagacgtcttggaattttgatgggagaggggacatcacaggaggcttcttcgcaagctttggagacttcgacaacaactccaagaaagatgactccaagaaagacgaagagaaagttatgaaattgtatttttaaagacacttagagaaatatgttagtgcggtaataaatatgttagtgcagtaataaagacgactccagttttcagtacgcttgccattctttttatcatgttcatatgttgttagtttcagaattattttcaagactgtaagccatggtttatgagacatgatcttacagtttgtttcggagtgaagttgtgagtaaaaagtggctgaataaacttctgtgttgaagcc

SEQ ID NO: 93385 - DNA, 3800 bp, Zea Mays
cagtcgaccgatccccatttcccctcctcatctgcgtttcatttcattcatcatcatcatccatggaggcttccacccccaccgctcgccgaggtggagcccccgccgactacgccgccatgtccctttctccctccccctccttctcccacacgccgaggagcggcgcctcgtcctccgcccacaagccccccaccacaagcaggcaccgggatcgggggcccctcctcttcaacggcaacagtaacagtaacagcagcatcgctgcccagcaggccgcacagctgcagcaaacctccaccaccacctcctccaaggggtcctccggatccggaggcgttaacatccaggtcctcctccgatgcaggccattgagcgatgaggaacgccgcgtcggcactcccgtggtggtcacttgcaatgaccagagacgcgaggtctccgttgcccagaacatcgctaacaagcaaattgatcgcacctttgcattcgacaaggtgctaggaccaaagtctcaacagcaggacgtcttcaaccatgctgttgtgccacttgtcagcgaggttttggacggttataattgcacaatatttgcatatggccaaactggaactggcaaaacatacacaatggaaggaggagggggcaaagcactgaatgctgacctcccgactgatgccggtgtcattccaagggctgttaagtgcatatttgacatcctcgaggcacagagtgcagagtacagcatgaaggtttcttttcttgagctgtacaatgaggagctcacagatcttctagccgcagaggaatcgaaattctccgatgacaagtccaagaagcctttggcactcatggaggatggcaagggtggagtctttgttagagggctcgaggaagagctagtttcttcagctgccgagatctacaggatactggagagaggctctgcaaagagaaaaactgctgaaactcttctcaacaagcaaagcagtcgctcacactctattttctctatcaccatccatattaaggaatgcacacctgagggtgaggaaatgatcaagtgcggaaagcttaatctcgttgaccttgctggctctgaaaacatatctcggtccggtgctagagacgggcgagctcgcgaagcaggagaaattaacaagagtctgcttacacttgggcgtgtcattaatactcttgtcgagcactctggacacataccatacagggatagcaagttaacaagattgttaagagattctttgggagggaagacaaagacttgcattatagcgaccatttcaccttcagtacactgccttgaggagacgctaagcaccctggattatgcgcatcgtgcaaagcacatcaagaataagccagaggtcaatcagaagatgatgaaatctgcgctcatcaaagatttgtattttcaaatggaccgtctcaagcaagaactatatgctgcaagggagaaaaacggtgtttacattccgagggaacaatacatagcagatgaatctgaaaagaagcatgatggaggaattcttcaggctatgtcagagaaactggatcgtttggagcttgttttggaatcaaaagataagcaattggaagagcttcatggactctatgaatctcagaaagtactgagtgcagatctaagtgatcaacttcagacattacagaaaagaatgaaggaaacagagtgcaccctagcggatcttgaaacgagatacatgaaggcaaatgatactattaaggagaagcaatatttgatagaaaatcttcttaaatcaggtaagaatttgctccttccaggcaaagcttatcataatgaagacttcttgatgagtttaaatttttacattcatttttgttattggttttcagaaaggaaggaaaagatcgaagacaaaaatggaagtataattcaatatttccattcccagctgatccaggaaatgaatgtattgcatagaacagtctcaacctcggtctctcaacaggagagacaactaaaagcacttgaagaagagatgcagtcttttgtcacctcaaagggcaaggttgccggaggacttcaagagcatgtaagaaagctcaaagagagctttaattctaggatagcagaattgcatggttttgcaaatgaactcaagcataaatctatgttgagctttgaaaaccttaattcgcaagttaccacacacacatctagccttgaggattgcatgaaggacctattggttgatgccgatgaactactcattgcactacaaaatgggctttctcagcatgaagtgaactttgctacgtttattgagcaacagcatgaggggctctctagaaatttagagggaacaaagtttgtttcggcaactacaatgaacttcttcagaactatagattcacatgcattgggactcctaaagattttggaagaatcaaagatggaacatcaaaagcaactcttccagcttcagaagaagtttgaggccgttgttgctgacgaagagaagtacttgatggagaaggttgcagggttgtttgcagaatcaaacgctcgaaagaaaaatatggttcaagatgacatatgcagcctcaataggactgtttctgagagttcgaacaatttacaaaccgaaactaccaagctgcatgattttacatcttctatgaaagagcaatgggaaggctacatgaagaaaactgaagaggcattccagcaaaatgtatcatctattgaacagaaaagaggcttcttggcagggaattttcagcagtgcaaggaaaaggtagaatcatgctcagaacaatggattactgcacaaaatttggtgttggcacttggaagaaggaatgcagaagccatcggtttggttataagtgatgggaatgaggtgagcaaccaactgggtgcaagaatttcatctgctgttgctgctggatttgaagataatgacatttcaagcaaatcccttctaagttgtattgacgattcattgaagttggaccatggtattcgcgagaatgtgaaatccatcgtcatgacatccagagcacaacttcatgacttggaacatggtcactatgagatgacaaaagcaataacagggaatgccgataggtctctgggagaagattataaggtggatgaagcaacttgttcaacaccgagaaggcgtgagataaacattccggacagccaatcgatcattgagttggtaacccccctagaagatatcgtgaagtcattttgggacagcagaacaccgacgaagcctgctctaaatgcaaaagggaagcagcagttggtagggtcgacgacccctgaaacacaaagagcccctctttccgcaataaattaggagtttcattactgtatatactacaaacattcttgtgtggtcaagtaatgttgatcaagaatgttgagagaagttactggtaaaggagagctgtgtattctccagattcatccaatgtatgaacggaatcatacatccaatgtattttggagtggagtgcaactccaaaatacagagcaaatcgagcatgaccatttgtcaagttccgtgaaatggactcatttatttgtatctatgctgttgtgcacttgtttttaataccttcgtccttaaaccttcgtccgtgaaatggactcatttattcgcgagaatgtgaaatccatcgtcatgacatccagagcacaacttcatgacttggaacatggtcactatgagatgacaaaagcaataacagggaatgccgataggtctctgggagaagattataag

SEQ ID NO: 93386 - DNA, 3430 bp, Zea Mays
cagtcgaccgatccccatttcccctcctcatctgcgtttcatttcattcatcatcatcatccatggaggcttccacccccaccgctcgccgaggtggagcccccgccgactacgccgccatgtccctttctccctccccctccttctcccacacgccgaggagcggcgcctcgtcctccgcccacaagccccccaccacaagcaggcaccgggatcgggggcccctcctcttcaacggcaacagtaacagtaacagcagcatcgctgcccagcaggccgcacagctgcagcaaacctccaccaccacctcctccaaggggtcctccggatccggaggcgttaacatccaggtcctcctccgatgcaggccattgagcgatgaggaacgccgcgtcggcactcccgtggtggtcacttgcaatgaccagagacgcgaggtctccgttgcccagaacatcgctaacaagcaaattgatcgcacctttgcattcgacaaggtgctaggaccaaagtctcaacagcaggacgtcttcaaccatgctgttgtgccacttgtcagcgaggttttggacggttataattgcacaatatttgcatatggccaaactggaactggcaaaacatacacaatggaaggaggagggggcaaagcactgaatgctgacctcccgactgatgccggtgtcattccaagggctgttaagtgcatatttgacatcctcgaggcacagagtgcagagtacagcatgaaggtttcttttcttgagctgtacaatgaggagctcacagatcttctagccgcagaggaatcgaaattctccgatgacaagtccaagaagcctttggcactcatggaggatggcaagggtggagtctttgttagagggctcgaggaagagctagtttcttcagctgccgagatctacaggatactggagagaggctctgcaaagagaaaaactgctgaaactcttctcaacaagcaaagcagtcgctcacactctattttctctatcaccatccatattaaggaatgcacacctgagggtgaggaaatgatcaagtgcggaaagcttaatctcgttgaccttgctggctctgaaaacatatctcggtccggtgctagagacgggcgagctcgcgaagcaggagaaattaacaagagtctgcttacacttgggcgtgtcattaatactcttgtcgagcactctggacacataccatacagggatagcaagttaacaagattgttaagagattctttgggagggaagacaaagacttgcattatagcgaccatttcaccttcagtacactgccttgaggagacgctaagcaccctggattatgcgcatcgtgcaaagcacatcaagaataagccagaggtcaatcagaagatgatgaaatctgcgctcatcaaagatttgtattttcaaatggaccgtctcaagcaagaactatatgctgcaagggagaaaaacggtgtttacattccgagggaacaatacatagcagatgaatctgaaaagaaggctatgtcagagaaactggatcgtttggagcttgttttggaatcaaaagataagcaattggaagagcttcatggactctatgaatctcagaaagtactgagtgcagatctaagtgatcaacttcagacattacagaaaagaatgaaggaaacagagtgcaccctagcggatcttgaaacgagatacatgaaggcaaatgatactattaaggagaagcaatatttgatagaaaatcttcttaaatcagaaaaagttcttgttggtgaagcacaaacactccgatcagagctggagaatacagcaggggatctacatgggctattttcaaaattagaaaggaaggaaaagatcgaagacaaaaatggaagtataattcaatatttccattcccagctgatccaggaaatgaatgtattgcatagaacagtctcaacctcggtctctcaacaggagagacaactaaaagcacttgaagaagagatgcagtcttttgtcacctcaaagggcaaggttgccggaggacttcaagagcatgtaagaaagctcaaagagagctttaattctaggatagcagaattgcatggttttgcaaatgaactcaagcataaatctatgttgagctttgaaaaccttaattcgcaagttaccacacacacatctagccttgaggattgcatgaaggacctattggttgatgccgatgaactactcattgcactacaaaatgggctttctcagcatgaagtgaactttgctacgtttattgagcaacagcatgaggggctctctagaaatttagagggaacaaagtttgtttcggcaactacaatgaacttcttcagaactatagattcacatgcattgggactcctaaagattttggaagaatcaaagatggaacatcaaaagcaactcttccagcttcagaagaagtttgaggccgttgttgctgacgaagagaagtacttgatggagaaggttgcagggttgtttgcagaatcaaacgctcgaaagaaaaatatggttcaagatgacatatgcagcctcaataggactgtttctgagagttcgaacaatttacaaaccgaaactaccaagctgcatgattttacatcttctatgaaagagcaatgggaaggctacatgaagaaaactgaagaggcattccagcaaaatgtatcatctattgaacagaaaagaggcttcttggcagggaattttcagcagtgcaaggaaaaggtagaatcatgctcagaacaatggattactgcacaaaatttggtgttggcacttggaagaaggaatgcagaagccatcggtttggttataagtgatgggaatgaggtgagcaaccaactgggtgcaagaatttcatctgctgttgctgctggatttgaagataatgacatttcaagcaaatcccttctaagttgtattgacgattcattgaagttggaccatggtattcgcgagaatgtgaaatccatcgtcatgacatccagagcacaacttcatgacttggaacatggtcactatgagatgacaaaagcaataacagggaatgccgataggtctctgggagaagattataaggtggatgaagcaacttgttcaacaccgagaaggcgtgagataaacattccggacagccaatcgatcattgagttggtaacccccctagaagatatcgtgaagtcattttgggacagcagaacaccgacgaagcctgctctaaatgcaaaagggaagcagcagttggtagggtcgacgacccctgaaacacaaagagcccctctttccgcaataaattaggagtttcattactgtatatactacaaacattcttgtgtggtcaagtaatgttgatcaagaatgttgagagaagttactggtaaagg

SEQ ID NO: 93387 - DNA, 1343 bp, Zea Mays
atgaaccaggatgctccaacaagcagaagggattattttgaagataggagggactgtgccagagcatctaatgctgaagacttaatgaatgctacaaaaaatggtgtgcttaattcacacgccagaagggatgattatgaagaagggagggacagtgccagggcacccaattctgaaaactatgaggaggggagggactgtaccagggcatccaatgccgaaaacattgtgaatgctacaaaaaaaggtataggaacacaactaatagttgaagtataaatgtttcagctgatagaactgaagagaagaggggccgtgacaaaaacaaatgtaaaaaacttgctaaactaaagcctggagaaaaaattaaagtaacgttctacaacaaccgtgctctttgtacaacattcgcacgacacataggtagaatcgttcgtgatcctagtattacctctgtgagagtaaagaagtggactgacattactgagacatctctaaaacatatttttgctgcagtcaaggacaagtttgaaaacatggatgaaaacattgaaattgatgtctacaaaaatgacatcatggagcatgctagggatttgtggaacaattggcgcggtgacttaagtcgacactatgtcaagccgacaaagaatatgcagcaagccattaagaattgtccgaatgattttgcacaagctgattgggagtggttggtcaaagagcatttttgcagtaaggaattcattgcaagttatcctattactgcatagtgcaacaatttattttttacctctgattatgttgttagcatccatttcatgtaattcctcatgatattctaggcaaagagcaagagaaattctagaaaccgatccaatttgacaatccttcatcacagtggcagcaaaccattcaggaaagtgatttatgacaatggcggcaaggataataatccaccagctttggatgccttattttttatgactcacacaaagggtgacaattttattgattctgagtcctccagcaagcatgcacaaattcaggaacaaatgttttcagatccttctctttccaatgcacaacttatggacaagtgcttcccttcaaaacggcaggaccatatcattggatatggtggtcgagtgaaagcaagacatcttcgaagtccatatgttagtaaggctgaattgttagagaagctaaaacagtcggaggatgagaaacgagcaatgcttgaggagaacagagagcttcgagaagaaaatcgggctacaaacagtcgtgtaagccaaatggaaaaggagtgggcagagttgaagaaacaaataagtagtagttag

SEQ ID NO: 93388 - DNA, 344 bp, Zea Mays
attgtctccttgaggtgcagccacgtgcctccttataatgcagcttatgtatgaccattgcatcaatatttttgtatcaaccacatccttgcatcaatagtcgtttttatatttctatcttgccattaatctgttttcttgcttctattcacagcttaccatttttgtgcatttgttatctatgtaggctgtagcaatgcaaagcaagtatggaaatgtgagatcccctccaaggtcacacttcatcagcccaggattgcttcgtcaacaacatgtgaaaaggtcctatccaaaccccaatataggcataggaacaaacaatgagagttcgtctagaaagcgag

SEQ ID NO: 93389 - DNA, 147 bp, Zea Mays
ccaattgaattcacttttgaatccgggtttgaattttctatctcaaacaaaatgcacaatcagaatccaacatggtgcaatattcattatatatatatatccattcatttattattctacataggaaattgcttttgaatatgtagc

SEQ ID NO: 93390 - DNA, 101 bp, Zea Mays
gccgtcatcgatatatagatccatgcatcagttgttgtttgtcggttcgttcatgttcagcaatgaacaaaaaacgatcaggaaaactgcaaaaaaaaaaa

SEQ ID NO: 93391 - DNA, 2151 bp, Zea Mays
caggtaggggcgtagggtatccggctaccgctcgtcctcgtgcacgcggctgttaaacacagtgaccccctcgttagctctccgtccatcccctcttccatcaggatcagcggtggggtatcgatctgctctagttggacggcggcatccctgattctaccctgatcgatcccatggatgcccaagacggcgatgagagaccgctgatcatccatcgcctgccactactccaggatgaaagtacttccgaattcactagcgacgggacggttgatcttcgcaatcagcctgctcggaagcagagaactgggaagtggaaagcatgcttcttcatcttaggtgccgagtttgctgaatgtgtggccttcttcgcgatctcgaagaacctggtgacgtacctcacgggcgttctgcacgagagcaacgtggacgccgcgacgactgtgtccacctggatcgggacctcgttcttcacgccgctcgtcggcgcgttcttggccgacacattctgggggcgatactggacgatactggccttcctctccgtgtacgtcacggggatgacggtcctgactgcttcagctcttctcccgctgctcatgggcgcgtcctacagccgtagcgcccaccgcctcttcgcgtacctgggcctctacctcgccgctctcggcaccggcggaatcaagccgtgcgtctgcgcgctcggtgccgaccagttcgacgcgtctgaccccgtggagcggcgggccaagggctccttcttcaactggtactacttctccatcaacatcggctccctgctgtccgcgacggtggtcgtctgggtgcaggacaacgttgggtggggagtcgggttcgcgatcccgaccctgctcatgctgtcgggactcgtgctgttcgtcgccggtaggaaggtttacaggtaccagagagtgggagggagccctctgacaagagcctcgcaggtggtggttgctgctgtcaggaactaccgtttggtgctgcctgagcctgacgacagctcggccctgctgcatcaggcgcctcccggaacgacggaaggaaatgattccacgatgcagcatacgagtcaattcaggtattcgtacatcatccaatccaattccaaatacgtcaggataccccctccaaatacgtacacatcttgagattctttgatccaggttccttgacaaggctgccattgtagcgccatcctccggcgagaaaggagcgacggcaagcccatggcggctctgcacggtctcccaggtcgaggagctgaagacggtgctgcggatgttccccgtgtgggtgtcgatggtgctcttcttcgcggccaccgcgcagatgtcgtccaccttcatcgagcaaggcgagaccatggacaaccgcgtggggccgttcaccgtgccgccggcgtccctctccaccttcgacgtcatcagcgtcatggtctgcatacccatctacgacaaagcgctggtgccgctggcccggcgcgccacgggcaaggagcggggcctgtcgcagctgcagcggctgggcgtcggcctcgcgctgtccgtggccggcatggtgtacgcggcgctgctcgaggccaggcggctgtcgctcgcccgcgcagcggcggacgggcggccgccgatgtccatcatgtggcaggcgccggcgttcgcggtgctcggcgccggggaggtgttcgcgaccatcggcatcctcgagttcttctacgaccagtcgcccgacggcatgaagagcctcggcacggcccttgcgcagctcgccgtcgcggcaggcaactacttcaactctgccgtgctcgccgccgtcgccgccgtcaccacgcgcaacggggaggcaggatggatccccgacgacctggacaagggccacctcgactatttcttctggttcatggctgttctcggcgtggtcaacctgctgcacttcctgcattgctccgtcaggtacagaggcagcagcaacaacagcacatactcttcttgagtcttcacacgatctgtgccaagtatatggcaaaatgtcaacaaagagagatgtcaatcgaacttgttaacgagacacaacaggatgcccgcattctccatttggcgtctccacaataataatgtgtccctgcgtcggtcc

SEQ ID NO: 93392 - DNA, 2062 bp, Zea Mays
caggtaggggcgtagggtatccggctaccgctcgtcctcgtgcacgcggctgttaaacacagtgaccccctcgttagctctccgtccatcccctcttccatcaggatcaggtctctccctctccgactctatctctccctgccaatactcatctacaaaaagagagattatatccatcctctttgtgcactgatttaattatgatccttcttttcgtttgttcttatgccattgtttggccaccagcggtggggtatcgatctgctctagttggacggcggcatccctgattctaccctgatcgatcccatggatgcccaagacggcgatgagagaccgctgatcatccatcgcctgccactactccaggatgaaagtacttccgaattcactagcgacgggacggttgatcttcgcaatcagcctgctcggaagcagagaactgggaagtggaaagcatgcttcttcatcttaggtgccgagtttgctgaatgtgtggccttcttcgcgatctcgaagaacctggtgacgtacctcacgggcgttctgcacgagagcaacgtggacgccgcgacgactgtgtccacctggatcgggacctcgttcttcacgccgctcgtcggcgcgttcttggccgacacattctgggggcgatactggacgatactggccttcctctccgtgtacgtcacggggatgacggtcctgactgcttcagctcttctcccgctgctcatgggcgcgtcctacagccgtagcgcccaccgcctcttcgcgtacctgggcctctacctcgccgctctcggcaccggcggaatcaagccgtgcgtctgcgcgctcggtgccgaccagttcgacgcgtctgaccccgtggagcggcgggccaagggctccttcttcaactggtactacttctccatcaacatcggctccctgctgtccgcgacggtggtcgtctgggtgcaggacaacgttgggtggggagtcgggttcgcgatcccgaccctgctcatgctgtcgggactcgtgctgttcgtcgccggtaggaaggtttacaggtaccagagagtgggagggagccctctgacaagagcctcgcaggtggtggttgctgctgtcaggaactaccgtttggtgctgcctgagcctgacgacagctcggccctgctgcatcaggcgcctcccggaacgacggaaggaaatgattccacgatgcagcatacgagtcaattcaggttccttgacaaggctgccattgtagcgccatcctccggcgagaaaggagcgacggcaagcccatggcggctctgcacggtctcccaggtcgaggagctgaagacggtgctgcggatgttccccgtgtgggtgtcgatggtgctcttcttcgcggccaccgcgcagatgtcgtccaccttcatcgagcaaggcgagaccatggacaaccgcgtggggccgttcaccgtgccgccggcgtccctctccaccttcgacgtcatcagcgtcatggtctgcatacccatctacgacaaagcgctggtgccgctggcccggcgcgccacgggcaaggagcggggcctgtcgcagctgcagcggctgggcgtcggcctcgcgctgtccgtggccggcatggtgtacgcggcgctgctcgaggccaggcggctgtcgctcgcccgcgcagcggcggacgggcggccgccgatgtccatcatgtggcaggcgccggcgttcgcggtgctcggcgccggggaggtgttcgcgaccatcggcatcctcgagttcttctacgaccagtcgcccgacggcatgaagagcctcggcacggcccttgcgcagctcgccgtcgcggcaggcaactacttcaactctgccgtgctcgccgccgtcgccgccgtcaccacgcgcaacggggaggcaggatggatccccgacgacctggacaagggccacctcgactatttcttctggttcatggctgttctcggcgtggtcaacctgctgcacttcctgcattgctccgtcaggtacagaggcagcagcaacaacagcacatactcttcttgag

SEQ ID NO: 93393 - DNA, 417 bp, Zea Mays
aaacacaaaagcaccacaattatatattcacaaaagcatcacaattataatatcattcacaactagatcatttacagatagctagctagatcattcacaaaagctctagagatgatcagtcacaaaagcaccacatcgacatcactccagcttgaagcagttcaaaagcccacaactacatcactaatgtttcatatcactccatctattgttcaaaagcccacaactacatcactctagctgctccagagttgatcagtcacaaaaagcaccaaagctacactaatgcttcaagcagttcaaaagccttcagacaaccactccagcttattgtatcctcctgttttaaggtacaagctttctttgtccagagcaccctccactagatggtgttgcagccttatgccttagctacag

SEQ ID NO: 93394 - DNA, 2183 bp, Zea Mays
atgtcccttggtcctctctctgacatctcttgtctcctcttcattgcaaatgtttctcttcctctctcccacctctcctctcctctccattgcaaaccttcgggatgaaggttgagagcctgctctgaaacgacgtacgtaaagggagcaaggaaccggagagcgtgcggcgggcttctggattttagagtaggcacctgtcgcttggacgtgcttcggagaagtaggtgtccaaaagttgcttacagtggatccagatccttcgaacaacattgctcaagctcatgatatagactgtcatggaggcagctgcagatgaggagaggccactgattcagtacctggctccagaggatgatgaagcttcctcacgatacactagcgacggaacgctcgatatcaacaagcagcgtgctctgaagaagagcaccgggaactggagagcatgcttcatgattctgggtaccgagttcgccgaatgcctggcattttacgcgaccgcaaagaacctggtcacctacctcacggctgagcttggtgagaccaacatcgatgccgcgacgaacgtgtccacctggattggcagctgctacctcacgccgctcatcggcgccttcttggccgacacgtactggggaagatacaagacgatgatagtcttcctcttgctctacatcgttgggatgcttactctgacagcgtcggcgtggctccccttggccatggaggacgactcacctgacaacagcggacttcggcgtgccacagcgtacctggggctctacctcgtttccctaggcacaggaggcatcaagccctgcacggcggccctcggggccgaccagttcgacggcggcgacgcggcggagcgggtcaccaaggcctccttcttcaactggtactacttctgcaccaacatcggctccctgctgtcggggaccgtgctcgtctgggtgcaggaaaatattggatggggagtcgggtttacggtgcagacggtgttcatgctgttcggcctcgccgtgttcgtcgccggtcgcaaggtgtataggtacaagaagctgggcgggagccctctcacaagggtagcccaggtggttgtcgcagctgtgaggaactgccatctcgtgctgcctgatgatacgtcagccctgtaccacgataagcttctaccaactgaaccaaatttcaggattgagtctgccagacaattcagattctttgacaaggctgccataatcaccggcgagaagggtgcagcagcgccgacgagcccgtggagactgtgcacggtgtcccaggtggaggagctgaagatgctgctccggttgctgccggtctgggcatccatggtgctcttcttcgccgtcagtgcgcagacggtaaccacgttcattgagcaggctagggtgatggacaaccgcatcggcccgttcaccattcctccggcgtcgatagcgaccttcgacgtgatcagcgtcatggtctgcgtccccgtctacgacgccgtgctggtgcctctggcccggcgtgccactggcaacgaccgcggcctgtcgcagctgcaccggctctccatcgggatcgcgctgtccgtggtcgtcatggtgtacgcggcgctgctcgagggcaggcgcctggccctcgcgcgggccaacatgcccgccatgaacatcgcgtggcaggcacccatgttcgccgtgcacggcgcggcggcggtcttcgccaccgtcggcgtgctcgagttcttctacgaccagtcgccggacgggatgaagagcctcggcaacgcgctcgcgctgctctccatggcggccgggagctatttcaactcgcttgcgctcagcgctgtcgggtcgatcacggcgcgcggcggggaacgcgggtggctcccggacgacctgaacaagggtcatatggactatttcttctggatgatggccgctcttggaacgctcaacctgctgcacttcttgcactactgcaacagacgatacagaggcaacaacaacaacacttcttgacgtgtgctgtcatgctgtgtgcaccatgtttctcaaaatcatagtttgataatactatattttgtaattatcataataatactatagttttagccagctccaaaaatactaggttctaagaaacattgcttaaatacaacatcatggcgttaggagctt

SEQ ID NO: 93395 - DNA, 2060 bp, Zea Mays
atgtcccttggtcctctctctgacatctcttgtctcctcttcattgcaaatgtttctcttcctctctcccacctctcctctcctctccattgcaaaccttcgggatgaaggttgagagcctgctctgaaacgacgtacgtaaagggagcaaggaaccggagagcgtgcggcgggcttctggattttagcagagtaggcacctgtcgcttggacgtgcttcggagaagtaggtgtccaaaagttgcttacagtggatccagatccttcgaacaacattgctcaagctcatgatatagactgtcatggaggcagctgcagatgaggagaggccactgattcagtacctggctccagaggatgatgaagcttcctcacgatacactagcgacggaacgctcgatatcaacaagcagcgtgctctgaagaagagcaccgggaactggagagcatgcttcatgattctgggtaccgagttcgccgaatgcctggcattttacgcgaccgcaaagaacctggtcacctacctcacggctgagcttggtgagaccaacatcgatgccgcgacgaacgtgtccacctggattggcagctgctacctcacgccgctcatcggcgccttcttggccgacacgtactggggaagatacaagacgatgatagtcttcctcttgctctacatcgttgggatgcttactctgacagcgtcggcgtggctccccttggccatggaggacgactcacctgacaacagcggacttcggcgtgccacagcgtacctggggctctacctcgtttccctaggcacaggaggcatcaagccctgcacggcggccctcggggccgaccagttcgacggcggcgacgcggcggagcgggtcaccaaggcctccttcttcaactggtactacttctgcaccaacatcggctccctgctgtcggggaccgtgctcgtctgggtgcaggaaaatattggatggggagtcgggtttacggtgcagacggtgttcatgctgttcggcctcgccgtgttcgtcgccggtcgcaaggtgtataggtacaagaagctgggcgggagccctctcacaagggtagcccaggtggttgtcgcagctgtgaggaactgccatctcgtgctgcctgatgatacgtcagccctgtaccacgataagcttctaccaactgaaccaaatttcaggattgagtctgccagacaattcagattctttgacaaggctgccataatcaccggcgagaagggtgcagcagcgccgacgagcccgtggagactgtgcacggtgtcccaggtggaggagctgaagatgctgctccggttgctgccggtctgggcatccatggtgctcttcttcgccgtcagtgcgcagacggtaaccacgttcattgagcaggctagggtgatggacaaccgcatcggcccgttcaccattcctccggcgtcgatagcgaccttcgacgtgatcagcgtcatggtctgcgtccccgtctacgacgccgtgctggtgcctctggcccggcgtgccactggcaacgaccgcggcctgtcgcagctgcaccggctctccatcgggatcgcgctgtccgtggtcgtcatggtgtacgcggcgctgctcgagggcaggcgcctggccctcgcgcgggccaacatgcccgccatgaacatcgcgtggcaggcacccatgttcgccgtgcacggcgcggcggcggtcttcgccaccgtcggcgtgctcgagttcttctacgaccagtcgccggacgggatgaagagcctcggcaacgcgctcgcgctgctctccatggcggccgggagctatttcaactcgcttgcgctcagcgctgtcgggtcgatcacggcgcgcggcggggaacgcgggtggctcccggacgacctgaacaagggtcatatggactatttcttctggatgatggccgctcttggaacgctcaacctgctgcacttcttgcactactgcaacagacgatacagaggcaacaacaacaacacttcttgacgtgtgctgtcatgctgtgtgcaccatgtttct

SEQ ID NO: 93396 - DNA, 2052 bp, Zea Mays
atgtcccttggtcctctctctgacatctcttgtctcctcttcattgcaaatgtttctcttcctctctcccacctctcctctcctctccattgcaaaccttcgggatgaaggttgagagcctgctctgaaacgacgtacgtaaagggagcaaggaaccggagagcgtgcggcgggcttctggattttaggcacctgtcgcttggacgtgcttcggagaagtaggtgtccaaaagttgcttacagtggatccagatccttcgaacaacattgctcaagctcatgatatagactgtcatggaggcagctgcagatgaggagaggccactgattcagtacctggctccagaggatgatgaagcttcctcacgatacactagcgacggaacgctcgatatcaacaagcagcgtgctctgaagaagagcaccgggaactggagagcatgcttcatgattctgggtaccgagttcgccgaatgcctggcattttacgcgaccgcaaagaacctggtcacctacctcacggctgagcttggtgagaccaacatcgatgccgcgacgaacgtgtccacctggattggcagctgctacctcacgccgctcatcggcgccttcttggccgacacgtactggggaagatacaagacgatgatagtcttcctcttgctctacatcgttgggatgcttactctgacagcgtcggcgtggctccccttggccatggaggacgactcacctgacaacagcggacttcggcgtgccacagcgtacctggggctctacctcgtttccctaggcacaggaggcatcaagccctgcacggcggccctcggggccgaccagttcgacggcggcgacgcggcggagcgggtcaccaaggcctccttcttcaactggtactacttctgcaccaacatcggctccctgctgtcggggaccgtgctcgtctgggtgcaggaaaatattggatggggagtcgggtttacggtgcagacggtgttcatgctgttcggcctcgccgtgttcgtcgccggtcgcaaggtgtataggtacaagaagctgggcgggagccctctcacaagggtagcccaggtggttgtcgcagctgtgaggaactgccatctcgtgctgcctgatgatacgtcagccctgtaccacgataagcttctaccaactgaaccaaatttcaggattgagtctgccagacaattcagattctttgacaaggctgccataatcaccggcgagaagggtgcagcagcgccgacgagcccgtggagactgtgcacggtgtcccaggtggaggagctgaagatgctgctccggttgctgccggtctgggcatccatggtgctcttcttcgccgtcagtgcgcagacggtaaccacgttcattgagcaggctagggtgatggacaaccgcatcggcccgttcaccattcctccggcgtcgatagcgaccttcgacgtgatcagcgtcatggtctgcgtccccgtctacgacgccgtgctggtgcctctggcccggcgtgccactggcaacgaccgcggcctgtcgcagctgcaccggctctccatcgggatcgcgctgtccgtggtcgtcatggtgtacgcggcgctgctcgagggcaggcgcctggccctcgcgcgggccaacatgcccgccatgaacatcgcgtggcaggcacccatgttcgccgtgcacggcgcggcggcggtcttcgccaccgtcggcgtgctcgagttcttctacgaccagtcgccggacgggatgaagagcctcggcaacgcgctcgcgctgctctccatggcggccgggagctatttcaactcgcttgcgctcagcgctgtcgggtcgatcacggcgcgcggcggggaacgcgggtggctcccggacgacctgaacaagggtcatatggactatttcttctggatgatggccgctcttggaacgctcaacctgctgcacttcttgcactactgcaacagacgatacagaggcaacaacaacaacacttcttgacgtgtgctgtcatgctgtgtgcaccatgtttct

SEQ ID NO: 93397 - DNA, 739 bp, Zea Mays
aactcatcacccgtagtatcaattatcataacctccgactccgacgatctgaactgtgaagatgagcacttatccaccgccgacgggggaatggaccaccggcctctgtggctgcttcagcgactgcaagagctgttgcctgtcgttcttgtgcccgtgtatcccgttcggacaggtggcagaggtcttggacaagggcatgacatcctgtggtctggccggcctcctctactgtttgctgctgcatgccggggtggctgtggtcccgtgccactgcatctacacctgcacctaccgtcgcaagctccgggcggcgtacgacctgccgccggagccgtgcgccgattgctgcgtccacatgtggtgcgggccatgcgccatctcccagatgtaccgggagctcaagaacagaggcgccgacccggccatgggatgggaagtgctctcgaaaaagacgactatggctcctgtaccaatgcaagacatgacgcgctgacgacagcaactcgatctcctagcaaaccaggattacgtgttgcatatatgcacagtttgtgtgttatgtggctatgtcagcaagtaaatggatcggagtctatgagtggataaaattaagtggatgtgttcgcgtcttagtaataagtgaataaaatttcataagtgttactaaaataggtaaatagggtacatgtatgtttggatcccattatgaactatttgtaataatagctatatatac

SEQ ID NO: 93398 - DNA, 428 bp, Zea Mays
cacacaatcacataacaatatttaaatccatagtctcatcaattacatcacaaaagtctcatccatagtctcatcaattacatcacaaaagtctcatccatagtcataataagacacatctcatcatccagtactaataagagacaatatctcatacatagtcataataaaagtctcaagtattagaacacaataacatggaagctcacggtcgccgatcaccatcgggttacagtgacgagtgatggtcgataccttcactagcgaagtgggtttcgacaaagtctaacctgtcttctcgttcatgcgtcggcaaggtagctggaggggtctaatatacatgtacaaagatgtaggtataggtggaggtgaagaccaaggataatgaacggaaggtgggaggcaccgggacgtgtatcccttgggcc

SEQ ID NO: 93399 - DNA, 90 bp, Zea Mays
tttctggtattctttccgtttggaaagagtacttttgggttaataacttgggttaatgttaaaacctggctctctactagtaataattac

SEQ ID NO: 93400 - DNA, 193 bp, Zea Mays
aatccatgtgaaagagttggtagatgtaattcttttgctacaggatatgatcttgaagctgaatagttatatccatcttaaaatgtacgtcttaaataagcatatctctagtagtgttttcccataatttctgacagaggttagtgtccacttattaatctaattcctaactgattctggaagtcagaccatc

SEQ ID NO: 93401 - DNA, 792 bp, Zea Mays
ctgctttttaggacaatgaatcctgtcgaatatgatgttatcactctgtatgatagtatgattttcatttcctgtcaggtcatttcagaagagaacaaatctggacctctgattgtgttacttaaggatgtagagaaatcattcattggagttaccgagtcactttcatctttgtggagcaaatttaatcgcttccatctggtgttcttattataggatcccacactcagatctaaataattaaatttacaggatgaagctctacttacagattggaagcagcagttggatcgtgatgttgaaacccttaaagccaaatcaaacattggtagcattcgcacggtaagctgcagaattgaagacagagttatatgggtttcttggaacttaatatatcccactgtcaactgtacatctttctttaaactgttgggcctgtgatgtctgatctaatatggcctgggtgtattattaacaaatgaccatttgcatgtgtttgatagtatttcttctgtttgatactttgttgcctttttctgtctgaatgtatattttgaccatttgtatgattatgcaattattttatgtctatgtatgcaattatctttctcttgtcgatgcaaaatagccagcatgtgcgacttttttctcctatttttttaggactgagattgatggatattgtgaaggtgaactaatcaaggtacctttgagagaggtaggaacaacaatggtcgttgttgctgcacaaacaaaggctattgctggtaacttttacttgttatattattt

SEQ ID NO: 93402 - DNA, 621 bp, Zea Mays
ttttatgacgagtgcaaacgcagattcagtgtagctgtggaaaacattcacagactgttttaactgcttgccagtgtcagcattgatagatgaaaagattctctgtatgcatggtggtctatctccggagttgaacaagcttgagcaaatactcaacctgaatcgccccacagacgtgcctgatactggattgctctgtgatcttctttggtctgatccttccaatgaagcaacgggctgggccatcaatgatcgaggtgtttcattcacatttggtcctgataaagtttcagaatttcttgagaagcatgatttggaccttatctgccgagcacatcaggttgttgtgttcttaaagatgtgacctacttattaccttataaactacaaagtgtatcaatagtttacttatgcttttgcattgttgaaattgcttgattgatctccagaggaccaagttatggttatcgaggcagagtgatgcttgcttttgaagataatggatcctcaaaaattggagtctgatttgacaagcagatccctgatggtaatgatcttggtggtttgtgcgaggaagatcatggcttcttctgctctggttagctcaaacttccgaattct

SEQ ID NO: 93403 - DNA, 1422 bp, Zea Mays
aaccactgcaatccaaccacatagattttagcaggtgtgcaatccacaaggagctcgtcacagaacacagtctagaacaccaccgtgcaaacgacagcctgtaggaaaccgtcatggctgccggcggtgccgaccaaagggggaataatgctgcgacgacgacttttgtggtgccagcggtggcgctgagcttggggaagccgatgccgcgggtgggcttcggcacggcaacggcgacgctgggccaagcggagggccgcgccggcgtgacggaggcgatcctccgcgccctggacgctgggtaccgccactttgacaccgccgcagtctacaacacggaggcctcgctcggggacgcggtcgttgaggccgtgcgcgccgggactgtcgcctcccgtgacgatctctacgtcacgtccaagctctggatcaccgacgcgcaccccggccgcgtcctaccggctctccacaggacactgcagaatctgcagatgtcgtacgtggacctgttcctgattcaccacccggtgagcatgcgggcgccggccgacgacgaggctgaaggagcaggccccgcggtggtggtgaagaaagacctggtggccatggacatggagggcgtgtgggaggagatggaggagtgccacaggcgagggctggccagggccatcggcgtcagcaacttcagctgcaagaagctagagcacctgctctccgtcgccaagatccctccggctgtcaaccaggtggaggtgaacccgtactgccggcaggagaaggtcaggaatttctgcagggccaatggtatccagctctgcggctactctgcgatgggtgcgagcggcacagcgtgggccaacaactccgtcatggactcccctgtcctcaaacaaatcgcccacgctcgcggcaaaaccgtcgcccaggtgtgcattaggtgggtttacgagcagggtgactgcgtgatcgtcaagagctttaaccagagcaggatgcgagagaacctccacatcttcgactgggagctcaccgacgatgaccaccgcaagattagcgagctccctgagtccaggggcaactacgatttcttgatccatgaatctgggccgtacaaaacagcacaagagttatgggacggtgagatcacagccggccaatctaaccaaacgccgctcgtctccgacgactgatcatacagctttgtgatctcctttgtcacgaagaaggcctggagtatctctctttgtcaagattcaaatggttagaataaaatatttgtgacactgtatagaatgtcagcgacacgagagaaaacattacttatcttcaaacataaaaatccgtcgataattaatcgcaactgtgaagtctatctaaatctgcatgtgatcgtatctgcaggtgcaattttaaacccgtacc

SEQ ID NO: 93404 - DNA, 1348 bp, Zea Mays
aaccactgcaatccaaccacatagattttagcaggtgtgcaatccacaaggagctcgtcacagaacacagtctagaacaccaccgtgcaaacgacagcctgtaggaaaccgtcatggctgccggcggtgccgaccaaagggggaataatgctgcgacgacgacttttgtggtgccagcggtggcgctgagcttggggaagccgatgccgcgggtgggcttcggcacggcaacggcgacgctgggccaagcggagggccgcgccggcgtgacggaggcgatcctccgcgccctggacgctgggtaccgccactttgacaccgccgcagtctacaacacggaggcctcgctcggggacgcggtcgttgaggccgtgcgcgccgggactgtcgcctcccgtgacgatctctacgtcacgtccaagctctggatcaccgacgcgcaccccggccgcgtcctaccggctctccacaggacactgcaatgtcgtacgtggacctgttcctgattcaccacccggtgagcatgcgggcgccggccgacgacgaggctgaaggagcaggccccgcggtggtggtgaagaaagacctggtggccatggacatggagggcgtgtgggaggagatggaggagtgccacaggcgagggctggccagggccatcggcgtcagcaacttcagctgcaagaagctagagcacctgctctccgtcgccaagatccctccggctgtcaaccaggtggaggtgaacccgtactgccggcaggagaaggtcaggaatttctgcagggccaatggtatccagctctgcggctactctgcgatgggtgcgagcggcacagcgtgggccaacaactccgtcatggactcccctgtcctcaaacaaatcgcccacgctcgcggcaaaaccgtcgcccaggtgtgcattaggtgggtttacgagcagggtgactgcgtgatcgtcaagagctttaaccagagcaggatgcgagagaacctccacatcttcgactgggagctcaccgacgatgaccaccgcaagattagcgagctccctgagtccaggggcaactacgatttcttgatccatgaatctgggccgtacaaaacagcacaagagttatgggacggtgagatcacagccggccaatctaaccaaacgccgctcgtctccgacgactgatcatacagctttgtgatctcctttgtcacgaagaaggcctggagtatctctctttgtcaagattcaaatggttagaataaaatatttgtgacactgtatagaatgtcagcgacacgagagaaaacattacttatcttcaaacataaaaatccgtcgataattaatcgc

SEQ ID NO: 93405 - DNA, 246 bp, Zea Mays
atgggggcaagcagcgaggagcttgcaatgaccatggaaacggcgaggccgagcagggaggcgaggctgtgcgtccatggagggccccgctccagcgctgaaccagagaggaggaggaaagtggcatggggagaggagaagagagagggtgggctgccatttatagagcaaagctctggacatgtcagactgcaccagcaggtggcagaacttgaggtgatttgggcactggttagagagttatag

SEQ ID NO: 93406 - DNA, 3553 bp, Zea Mays
tccttatacagtgctcctttgaactcgatcacctctcatctcccatccatcttcgatcgcagctttgctgccatcgccatggacatgctcaacctcctgctcctcgtatcctccatctacacgtcgttagcgtttacaccggtggcggcaactgacgccgacgccctcctccggttcaaggcctccatccagaaggaccctgggggtgtcctctcgtcttggcagccgagtggcagtgacggcccatgcaactggcacggcgtggcgtgtgacagcggcgacgggagggtaacacgccttgacctcgccggcagcggcctcgttgccggacgcgcgtcgctggccgcgctctccgccgtcgatacgctgcaacacctgaacctgtccggcaacggcgcagcgctccgcgccgacgtcaccgacttgctcagccttcctcgcgcgctgcagacgctggacttcgcctacggaggcctcggcgggagcctccccgtggacctgctcaccctgcacccgaacctcaccaccgttagcctcgcgaggaacaacctcaccggcgtgttgccggagtcactcctcgccgaagcggcgagcatccagtggttcgacgtgtcaggcaacaacctctccggggacatctccaggatgtcgttcgccgacacgctcactctgctcgacctgtccgagaaccgcttcggtggcgcgatcccgccggcgctgtcacgctgctcggggctcaggacgctcaacttgtcgtacaacggcctcaccgggccgatactggagtcggtggctggaatcgccggccttgaggtgttcgacgtctcgtcgaaccacctcagcggcccgatccccgacagtataggcaactcatgtgcttcgctgacaattctgaaggtgtcgagcaacaacatcacgggacccatcccggcgtctctgtcggcgtgccatgcgctgcggatgttcgacgctgcggacaacaagctgtccggtgccataccggccgccgtgctcggcaacctgacatcgctggagagcctgctgctaagcaacaacttcatctcgggctccctcccgagcacgatcacctcctgcaccagcctcaggatcgccgacctcagcagcaacaagatctccggcgtgctgccggcggacctctgctcggctggcgccgcgcttgaggagctccggatgccggacaacatggtcaccggcatcatcccaccgggtctttccaactgctcgcgcctgagggtgatcgacttcagcatcaactacctgaaaggtccgatcccgccggagctcggccagctgcgcggcctcgagaagctggtgatgtggttcaacggcctagagggccggatcccggcggagctcgggcaatgccgcggcctccgcacgctgatcctcaacaacaacttcataggcggcgacatccccgtcgagctgtttaactgcaccggtctcgagtgggtgtcgctcaccagcaaccggatcactggcaccatccggccagagttcgggcggctaacgcggctcgccgtgctgcagctggcgaacaacagcctggggggcgtgatccccaaggagctcggcaaatgcagcagtctcatgtggctggacctcaatagcaaccgactcacaggcgagatcccgcgacggctcggccggcagctcgggtcgaccccgctcagcgggatcctgtcaggcaacacgctggcgttcgtgcgcaacgtggggaactcgtgcaagagcgtgggcgggctgctggagttcgccggcatccgtccggagcggttactgcaggtgccgacgctcaagagctgtgacttcacgcggctctactccggcgcggcggtcagcggctggacaaggtaccagacgttggagtacctggacctgtcttacaatgcactctccggtggcatccccgaggagttcggcgacatggtggtgctccaggtgctggacttggcgcggaataacctcacgggcgagatcccggcgtcgctggggcggctgcacaacctgggcgtgttcgacgtgtcgcacaacgcgctctccggcggcatcccggactccttctccaacctctccttcctggtgcagatcgacgtctctgacaacaacctcagcggtgaaatcccgcagcgcgggcagctgagcacgctgccggcaagccagtacacgggtaacccgggcctctgcggcatgccgctgctgccgtgtgggccgacgccgagggcgactgcatccgtcctcgcaccgcccgacggcagccgttttgacaggcggtcgttgtgggtcgtgatcctcgccgtgctggttaccggcgtggtggcgtgcggtatggcggtggcgtgcttcgtggtcgcacgcgcgcggcggaaggaggcgcgcgaggcgcggatgctgagcagcctgcaggacgggacgcggacggcgacgacgtggaagctgggcaaggcggagaaggaggcgctgagcatcaacgtggctactttccagcggcagctccggcgtctcaccttcacgcagctgatcgaggcaactaacgggttctccgccggtagcctggtcggttccggcgggttcggcgaggtgttcaaggccacgctcaaggacgggtcgtgcgtggccatcaaaaagctcatccacctgagctaccagggagaccgtgagttcacggcagagatggagacgctgggcaagatcaagcaccggaacctggtgcctctgctgggctactgcaagatcggcgaggagaggctgctggtgtacgagtacatgagcaatgggagcctggaggatggcctccacggacgggcgctgcggctgccgtgggagcgccggaagcgagtggcgcgcggtgccgcgaggggtctctgcttccttcatcacaactgcatcccgcacatcatccaccgggacatgaagtccagcaacgtcctccttgacggcgacatggaggcccgcgtcgccgacttcggcatggctcggctgatcagcgcgctggacacgcacctgagcgtgagcacgctggcggggactcctgggtacgtgccgccggagtactaccagagcttccggtgcaccgccaagggcgacgtctactccctgggtgtggtgttcctggagctcctgaccgggaggaggccgacggacaaggaggacttcggggataccaacctcgtcggctgggtcaagatgaaggtcagggagggtaccggcaaggaggtcgtcgacccggagcttgtgattgctgccgtggatggagaggagaaggagatggcgaggttcctggagctgtcgctgcagtgcgtggatgacttcccctcgaagcggcccaacatgttgcaggtggtcgccacgctcagagagctcgacgacgcgccgccgtctcatcaacaagcgcctgcctctgcctgtgactgatgctggtgacgcttcatggtctctgttgtgtactgttgatgcccattgctccactgtgtgcattcctggtccgtaattctgtactaatggacggacttttgaagtacaaattcgatgt

SEQ ID NO: 93407 - DNA, 562 bp, Zea Mays
aagattccctagccttcggatctcgccagtctccttccccttgttccgctcgcgcgccgtggtgggccctctacgttgcgcagatggtgtcatcttctccgcggcatgcgcggcgatcccaaccttcgcgcgggaattacagtttcataccgacctagcaacgcagaccccccacctgggctataaaatgtgagcgcccgtgaccctgagccatagccgtcgcaagccatacgccaaggggagaaaagggagactcatcgccgagagatagagagggcaggaaggacccgagctcggcgccgtggggctattgctcgtgcgctgtcaatcccaaaccaagctgatagcataggagcttcaccggagaacgtggagcgttttcaaaggatatgcgcgtgcggtgtgcgtcggagttgcggggaatttctcgccgcagttaactagccgccgcaggttcgcctggtgccgtggaccactccctagtcgccgtctctgccttcgtggcgaggtcacgagaatctgaagatcatcctggtacctggaatctcaagtcccaggcaag

SEQ ID NO: 93408 - DNA, 2076 bp, Zea Mays
acaagcagagtatcatgccacttataaacagaaaaatcagtgctacaaacatggtaacatattacaacaatatgcacagaacaaattaacaagaacaaaggggaacaacatgagctgaatgaaataatgaactttttttctctctagatctcgaccctgtatacagaaggaatttgtcatatgaatatgatacagaagcgttgcctatgttagcatactgatcctaccagacatatcaagcatgcaacgatcgcggcagcaatcaggcaacaatgctggagacctatcctcatctagaaccagtgagctttctcctggcatgcaacgatcgcagcagcaaaatggaaatgcccatgcatgtacatatatacggaaagatggagctggctaaagcaaggactgcaacgtcaaaacacagcagacagcttcgatctaaaaaagaaaatcctgcaaagttcataacactgagggctacagcagcctttcttccacctgacatcatgagcctttaatcacctatcatgaatgtgtctcgatccaggtcacaacatggtagattcgcacatcctccgctgacagcaatgctttattgtgaccacccccaccaaaggttgcaaggaatctaatgcacaagcaactgatcttcagaacatgcatctgcaccttgctgaatcttggactgttcagagctcttcatcaatgttccatgctgtaccagagttattgatagcaacactacttagacttctctcctaccattagaagcatttggcctcctaggatgtccaaactgcatattatccctggagcgatctccagggtggacaaaatcatccaaattcctgtagctaccatttcttggaacagaattcagacgctcatattcatcaggcctcatgttcataccagcccttggttctgagaacatgtccaagcgtcttggtctaggtccaccaccagtcctccggatgttgttggaagaattcctacctggagtattggatggaaccctcatgggtaagaagtccttgggaatgctatccaggtccataaaacatttcctggcctttgcatccgctattagtgatgcccaatcctcagactgcatgagagcattagcattaccaacaacctgaaaagcaatgaagaccaagtaacatgggatacatcaagaagatcactgaagaaaagtagaatgcacttaatgcatattgtagaggcagagacatacccatagagctctccttgctcgagttagagctacattcatacgacgtatatcagcgacaaaacctacaccatggtttgaagcacggacacaagacataataatgatatcacgctcctggccttgaaaagcatcaactgtatttatgtagatatccttcccttcctcagtattcataacatccttgaattcccgctgaaggcatttcaactgcaacttatatggtgtgattataccaacagaaaccttcttggcaccattagctttcagaaacttctgaaggtgctcatataaacgcaatgcaaactgcgcttcatgaatattctgatatgaagatgacccacccctatgagactcacggccatgtgacatgtcgtaaaagatataaggtgccataagtgcatctctgtaataggcttcatcaggtaatttaacaacactctcactatctgtaaggcgaccttgatagaagtattttgatggaaattcacggatctggggatgcatcctgtattgcactgacaacaaaatggtaggacaaccagcctgctgaaacctctcgaaaagactcctactgtaaagcaaagttccagctgctttgctaataacagtagcagggagttgttgtggatcaccaaccaggacacatctagctgcaccaagagccaatggagggaggactcctacttcactagcctgagcagcctcatcaataacaaccatatcaaagccatgactcaggcgagaaaataacttacgcccgctacttgacacagttgtaaaaacaatctcagcttcattggcaaaactggcttccagactagccctagcatcttcaatattaaagc

SEQ ID NO: 93409 - DNA, 2166 bp, Zea Mays
cgacaatagcccatagtaacataaatgactgatgcaaacatcaacaagacaacactctgcaaagtgccagaactatccgtagatcaacatacaagcagagtatcatgccacttataaacagaaaaatcagtgctacaaacatggtaacatattacaacaatatgcacagaacaaattaacaagaacaaaggggaacaacatgagctgaatgaaataatgaactttttttctctctagatctcgaccctgtatacagaaggaatttgtcatatgaatatgatacagaagcgttgcctatgttagcatactgatcctaccagacatatcaagcatgcaacgatcgcggcagcaatcaggcaacaatgctggagacctatcctcatctagaaccagtgagctttctcctggcatgcaacgatcgcagcagcaaaatggaaatgcccatgcatgtacatatatacggaaagatggagctggctaaagcaaggactgcaacgtcaaaacacagcagacagcttcgatctaaaaaagaaaatcctgcaaagttcataacactgagggctacagcagcctttcttccacctgacatcatgagcctttaatcacctatcatgaatgtgtctcgatccaggtcacaacatggtagattcgcacatcctccgctgacagcaatgctttattgtgaccacccccaccaaaggttgcaaggaatctaatgcacaagcaactgatcttcagaacatgcatctgcaccttgctgaatcttggactgttcagagctcttcatcaatgttccatgctgtaccagagttattgatagcaacactacttagacttctctcctaccattagaagcatttggcctcctaggatgtccaaactgcatattatccctggagcgatctccagggtggacaaaatcatccaaattcctgtagctaccatttcttggaacagaattcagacgctcatattcatcaggcctcatgttcataccagcccttggttctgagaacatgtccaagcgtcttggtctaggtccaccaccagtcctccggatgttgttggaagaattcctacctggagtattggatggaaccctcatgggtaagaagtccttgggaatgctatccaggtccataaaacatttcctggcctttgcatccgctattagtgatgcccaatcctcagactgcatgagagcattagcattaccaacaacctgaaaagcaatgaagaccaagtaacatgggatacatcaagaagatcactgaagaaaagtagaatgcacttaatgcatattgtagaggcagagacatacccatagagctctccttgctcgagttagagctacattcatacgacgtatatcagcgacaaaacctacaccatggtttgaagcacggacacaagacataataatgatatcacgctcctggccttgaaaagcatcaactgtatttatgtagatatccttcccttcctcagtattcataacatccttgaattcccgctgaaggcatttcaactgcaacttatatggtgtgattataccaacagaaaccttcttggcaccattagctttcagaaacttctgaaggtgctcatataaacgcaatgcaaactgcgcttcatgaatattctgatatgaagatgacccacccctatgagactcacggccatgtgacatgtcgtaaaagatataaggtgccataagtgcatctctgtaataggcttcatcaggtaatttaacaacactctcactatctgtaaggcgaccttgatagaagtattttgatggaaattcacggatctggggatgcatcctgtattgcactgacaacaaaatggtaggacaaccagcctgctgaaacctctcgaaaagactcctactgtaaagcaaagttccagctgctttgctaataacagtagcagggagttgttgtggatcaccaaccaggacacatctagctgcaccaagagccaatggagggaggactcctacttcactagcctgagcagcctcatcaataacaaccatatcaaagccatgactcaggcgagaaaataacttacgcccgctacttgacacagttgtaaaaacaatctcagcttcattggcaaaactggcttccagactagccctagcatcttcaatattaaagc

SEQ ID NO: 93410 - DNA, 390 bp, Zea Mays
atgaaccatccgcaggaggatcccagactcgggcatggaggaagcagagggcacgacatggagtcgtcgcagtactccaagtcgaaggccaccacagtgctactgcaggacggaccttcaccggcgctggggacatcacggtggccgagcacgcaccagagccaaggtggagacaaactggaggccgagatggggctaggagccatgggaaggagacccgagcagggcaagcgcatggccatggagacgagggaggagctcggcgaactcgaagcctcgcgccggccagggagcagcagccggccatggaagaaagagctgggggactgcggcacgcaggggctccacggcgcgcaaacgctagggcgctgcgagcttgagggaggctga

SEQ ID NO: 93411 - DNA, 116 bp, Zea Mays
ttgtttctatatttatttcccatttcagatttttgttgaatttgtctcaagtttaaacttcaattttcgaaaatacttcaggcctagatttcaacatgtttttgcagaaacatttc

SEQ ID NO: 93412 - DNA, 231 bp, Zea Mays
atggccgccacggcccagatcctgctctgggcctggaagaacatgaggagcggtatgttcacggcgtgcgcgaacagcctcgggatcgcccagcgggcgtacggcccggcggcgcgcgacacgtggtcgggctggtggaggaacgagtgcaggagccgcggggcgaaggcgtacgccggcgccagcgccagcgcggtggcgccgcagatgatccacgactgctgcgtgtag

SEQ ID NO: 93413 - DNA, 1610 bp, Zea Mays
aaagccactcgctgactcatctccatccacaacatcacatactcgctccaacagtcccacccacgctacctagacagtagacacgtgtaccatggtgttcttcaaggcgcgtcgcatggatcctgagttggtgttgccggcgcggccgacgccggccgagacgaaagcgctctccgacctcgacgaccagcggacgctgaggtactacgagacggtgatcgccttcttccgcagccggcgtggctacagcagccacagacgacggccagacgatccagccaaggccatcaaggcggccctcgcggaggcgctcgtgtactactaccccatcgccgggcggctcagggaggccgccggtgggaagctggtggtggactgcaccgcgcagggggtggtgtttgtggaggccgatgcggatgtgcggctggaggagctgggcaggcctctgttgccgccgtacccgtgtgtggaggaactgctgtgcgatgcgggtgaaacaagagcggtgattggcaagccattagtcctcatgcaggtgacgaggctcaaatgtggcggatttgtcattggattccacatgtgccatagcattgcagatggattcggcatggttcaattcttcagatgtgtcgccgaactagctcgcggtgaaaaagtgcccacacttttgcccgtgtggagaagagagctcctaacacgacacaggtcaaatactactgcatataatcacacagccacggttaggtccgagtccgactccgacgactacaaatctgacgacgtcatgctgtcaactccaatggacgacatggtagtccagtacttcctcttcgggccaagggagatcgcaaccctacgaagccacctgaggggagacgaccagctgctgctcgccacctccgctacatccttcgagctgctagcggccgtcatgtggcggtgccgcaccttggcgctgggctacgagtcccatcggcgcgttcgcctcatggttaccatgaacgcgcgcgggaagtggaaccagcacacgcccatcccgcggggttactacggcaacgcgcacgtgtcccccatggcggaggccaccgccggcgagctctgcagccagccgctcgcccgcacggtcgatctcgtgcgcaggaccaagctcagcgtcaccaaggaacgcatggagtcgatggtggacacgatcgcttcgacgcgccagtggccgcctccgacgatggacaggatctacgaggtttctgacaccaagtggattgccaccaatgcgacgcagtttgggtgggccgagctggtgggtggtgggataccactggctggcgaccttgcctccaagctgggaagcgaccacatgagctgcaggaaccaggatggcgaccactcgaccatcgtgtcgatgcttctgcccaagccggcgatggacaagtttagcagtgagctgtctgtttggttgaacaacaagcatgatcacaagaacttggttatactcagttctctctagtctaccaacagatttaaacaatattaatgtacctacaatttgttgtacgaaagagaaatgattggctcaatgagaatgaaataatttcggtgttcttctacagttc

SEQ ID NO: 93414 - DNA, 135 bp, Zea Mays
atggcgtggcgccccctgctccttcttcctcgcgcagcagcagccgagcgtcccctccatgggccgacctcggccaagtccctgtccatggcgcgcatggagcagcccctagggccagtgcccctccatctatag

SEQ ID NO: 93415 - DNA, 785 bp, Zea Mays
aagcatcacgttcaatttctagaaattccctgctatcgttagcttcaaggacaaacgttgctggcctcctagtttccatacgtcggctgcccctgctagctcgcccaaatctcggccatggcgcacggccatcccgtcccggcctccctactcccagcaccgttcgttgaagctggccatgtctcccaactccgttcatggatctgctcagctcctaggcaccaccgcgccgccgctctagatgttgtgctcggccccctgacgtccacccaacgagtagcaacagcgccaccagctggtcctccccacgccgttggggactgctgcgtctttcctgtcgtagtgcagatcgtcgtctccctgctcgtcttgcgccgtcgttcaccactgttccggacttgtgtcatcgccgtcgtcttaacttgacagcaagcgccgctgctcagttcgcctctgtccgacgccgaactgggctgcccgtcctcaaccttgccgatgtcattttccctggtgcttgctctcgccctaggccatggagcagcagcagcacgacactccttcgtgtcgcgccctcgatgtgttcgatgaaataccgcagcgagctccatctcgatctatgcagttccggtcacgtcgtcgtttaccccggtaaggaatagttgttctccttatgttattcatcaccagtacctgtaaccgacataaattaattagatgctaattgtgtgtatgttattgtgtgcttttgaggatagtaatccttggaggtttggttgaatatgaaa

SEQ ID NO: 93416 - DNA, 345 bp, Zea Mays
atgaagggagttccggccacagagggacgcagggagcgcaggaagctccaagcggaggagacgcgcagggaagaatcgagcacgagatatagacgctggaaaaatctgcgcaggggcggcgggatttttgctccaggagcgaagccacacgcagagaaccgaagtgcaggctgggagctcgaccgtagagggagagatgagaaggagcggctggggaagaagccagcccacggcacggcagtggaaaaatcccagcgttggatgaggatgacagctgaagtggataagagagaaagagagatttcgaacggtgaaaagatgaggatgggctgggattttacttag

SEQ ID NO: 93417 - DNA, 1472 bp, Zea Mays
agttacatttgcatcaggctttgatgattgctgtacaaggatgatatggactcccgcccaaagctgtttggtattcagaagcaggttttggcgctgtacaggggattccttcggacagcacgccttaaggcccctgaagaacgccgcaggatcgagtctgttatcttggcagagttccgtgacaacgcaaggagtgttgaccgtaggaactttgtacacatagagtacttgttgaggagagggaagaagcagcttgagcagctcaagaatcctgatattactagactcgctacccttgtagtaaagaatgaggatcacttggatgtggtaaatgctatactggacactgatgatagctgcataaggattgtgcggaaaaacgggaagacatccctacatactgctgcaaggattggataccatcgtattgtcaaggcactcatagagagggatccaggaattgttccgatcaaggataggaagggacaaactgcacttcacatggctgtgaaaggcaagaacacagatgtagtggaagagttactgatggctgatgtttccattctcaatgtgcgggacaagaagggaaatactgctttgcacatagctacacggaaatggaggccccaggggtctggaataacaggagcctgatggttgcatcagtagagttgaccacttctcagtattgcgagatgcatcttacatggtcaagaagataattcctattctgaactacttgctcgtgtacaagtctccttatcatgtcctttcaagccagtctattctttgcttgattcatcacgggtgcacattattgtaattagaatcttcagagtactcgaaggatagttaaagctgtttggctagtccttcagattactgaaaatatagttaagaacatttgtattttgctatttcgatttccaacagtacaactattggggatgattgcttttctttataaaagcaatcaagtaatttcttagctaagttctagctataagttctgcatgacatgctattgcccatgataattctgacaggattgcttcaactctttcaggttgatcagttttgcctagtcccagtaccatacaaagatgttcagctggatataaacatttctccacgtctctcttctgaatacataagttatctggaaaatcctgtttgagttgctcaatgaagtggcaaaagctgcagagaaagatctatggaaaatcctgttgagttgctcaatgaaggcttttgcgaatcacttgaagcgttagtacttttgtgaatgattttgtaaagtgtttgcaaatatgtgcaaaacataataacatgtgtaggttttgtgaatgattttgttgtggtgcttgttgatggtttatgtgatgtggatctatcattgtgcaatactaattaaatttgtatatctatgtgattatgtgtataaaaattggtgatttgtgatgcttttgtat

SEQ ID NO: 93418 - DNA, 1070 bp, Zea Mays
agttacatttgcatcaggctttgatgattgctgtacaaggatgatatggactcccgcccaaagctgtttggtattcagaagcaggttttggcgctgtacaggggattccttcggacagcacgccttaaggcccctgaagaacgccgcaggatcgagtctgttatcttggcagagttccgtgacaacgcaaggagtgttgaccgtaggaactttgtacacatagagtacttgttgaggagagggaagaagcagcttgagcagctcaagaatcctgatattactagactcgctacccttgtagtaaagaatgaggatcacttggatgtggtaaatgctatactggacactgatgatagctgcataaggattgtgcggaaaaacgggaagacatccctacatactgctgcaaggattggataccatcgtattgtcaaggcactcatagagagggatccaggaattgttccgatcaaggataggaagggacaaactgcacttcacatggctgtgaaaggcaagaacacagatgtagtggaagagttactgatggctgatgtttccattctcaatgtgcgggacaagaagggaaatactgctttgcacatagctacacggaaatggaggccccaggggtctggaataacaggagcctgatggttgcatcagtagagttgaccacttctcagtattgcgagatgcatcttacatggttgatcagttttgcctagtcccagtaccatacaaagatgttcagctggatataaacatttctccacgtctctcttctgaatacataagttatctggaaaatcctgtttgagttgctcaatgaagtggcaaaagctgcagagaaagatctatggaaaatcctgttgagttgctcaatgaaggcttttgcgaatcacttgaagcgttagtacttttgtgaatgattttgtaaagtgtttgcaaatatgtgcaaaacataataacatgtgtaggttttgtgaatgattttgttgtggtgcttgttgatggtttatgtgatgtggatctatcattgtgcaatactaattaaatttgtatatcta

SEQ ID NO: 93419 - DNA, 838 bp, Zea Mays
ctctgctcaagcacggcagccagtccagccaccatttgggtgctcatctccctctgctcggcacccagccccagctctcccgagctccctgcgccgacctcatcctccccatggtgcgtcaccttctactcctctccttcccacggcacagcagcgcccctgcagctccccttctccagatccatggcgcccaacaccttgagcgcccctgccgctgctcctccaccgggatctcctcctccactaggcgtccaggcttgtcccaccatggctgcccctcctccatctcctccctccccaccaggttacccagattccatggccgccgccgtcccagccatctccctggtggccgacctcgcccctgccccagccacagctcccccttcggccctgctgctgcaagcactcagcctctcccatggcacacggtactcgtccagcccctttctactggtggctgacccatctctctggtgctcgacgaaatgaccatgaggagttttgtgttgtgtgcagccccatctgcaacaccgtcgacccccgacgaggtcctgttctcgccctgtcgttttagtactcggcgtcgattaagtagatgctaactgtgtgtatattcgtgtgttcttgtgaggagaaatcccatgatttgggggaagacgaagtccaagcacaacccctgccaatcgctcgatgaaaaatctaaaccaaaaccctcagcgttttcatgggttccggtgggattttatgttggtaaggtaatttgtgtcctaattagttcactcagttattgagttgaagagattgttagctgtatgagttgaaccagttattgtat

SEQ ID NO: 93420 - DNA, 390 bp, Zea Mays
aggtgccgcgtccgattggtgggatgccttcatcgcggcacatgccaatgctgatgccataacctggcaggaattccaagtgaacttccatgctcaccatattccctcgggaataatgaagctcaagaaggagttcctttccctcacataagggaacatgactgttagtgagtaccgtgatcgcttcacccagctttcatgttacgccctagaggaagtggacactaacgagaagcgtcaagaacatttcttggaaggattgattggacccttgaactaccaattacagagccacaactttcccatctttcagactttgctgaacaaggcaattggagcgtgagcaagagctcaaggtagaagaagcacattttgcattttagtccctgc

SEQ ID NO: 93421 - DNA, 123 bp, Zea Mays
atttcaattatgtattgagtttgcaaacttaagttcaaatgcatagatcaaaacaaataagacatgagatgcaactaaattttatttctatactagttactttatctatttatttatgaaaat

SEQ ID NO: 93422 - DNA, 143 bp, Zea Mays
tttctttttttattttcttatcaattccttttggatttcaatcacaaatttcaattatgtattgagtttgctaacttaaggtcaaatgcatagatcaatacaaataagccatgagatgcaactaaattttatttctatactag

SEQ ID NO: 93423 - DNA, 821 bp, Zea Mays
cccggataggagcgactagcgagaagccaagcggcttggcacctcagcctgctgcctctgctcgctctcttcgccctctttctgcactaatcctcggctcaggcagccaatattctgtctagcgttgagatggcggacaacgtcctcatcgaccgatcagccagcggctttgagttccggcgctgggcggccggcgacgagttccagagcctcgccaccatgagcgtgctgcagcctgacgctcgcggtatctacagttccttaccatacgtttcgccgctgcctccgttccagtacgcggcgtacctgcactcttcgctctccctcccaccgctgaatcctcgccgccacccgcctctcctcccgctcccgccggcagctgctgctaaagggatgaagcaggcggcgcagaggaggacggggccgagagagtgcaagaggaagaagccgccgcggacgccgaggctgggggaagagcctccgagcgcgcagcgcaggaagccgctggagcgtgccacgccgctgccgcccgcgcccgcggtgcacgaggcgctggacgaccttgagcgccaggtgaccatggggttcgtcgaggacctcaagcacgcgctcgcgctcgctccgccgccaagcagcctaccgctgcccaccttctcacttgtcagagctgcggctgccgcagccaaggccgtgccatcctgtactgtgtaaccactgcacagtgcggcgagccaacccccgtaccggcgacggtatccagcaccgccagtcgtcttcctttctccaagactttttctttggatggatcggaagaaaaatgc

SEQ ID NO: 93424 - DNA, 1256 bp, Zea Mays
atggcatcaaaaatgaggatgcctgcacccttgaccatcccgacgaactccatgtcatcggtggtgcggaggtggcctcaggcgacgatggctacaatcatcccagcctcagagggcaaggaagatcatggcccggcaccttgctcacgtgggttcaggctgaggccgccgagtgcttctgcaacgacgtccgggtcctcaggtagagaaggccgggctgatgacgaagtcgatactcttgaaacgggcgatcgctccggatgtgagaacgacacggggacaaccgttagaaactatagggaagattgggatcttgaagtgacagaaccagttgcaggaaattactacccggtcaatctaggcgtgtatgtagccgatggaaaatatgagctgtcagtacttgtggaccgtgctgttggagcatcaagtattcaggatggtcagctagagattatgctacacaggcgtgtaatcagagatgacgacaaaggtgttgatgaaccacttggtgaagttgtttgtttggatggaagttgcaaggggctcacagtgaggggaacatactatgtcaaagttgacaagatagggcatggagctcactggcgaagaacatatggccaacaagtctattcaccctatcttcttgcttttactcatgaggatgagacaagttggaaatcctacaatgttgccaaacaaagcacgatggatgagaattacagtcttcctgataatgttgccattattaccttgcagaatctagatgatgacaccacattactccgcttggcccatctatttcaggatctagaggacgctcagtattcagtgatagcaaaagttgaactaagaagggtgttcggaaagagaaccatcaaggaattagctgagactaacctttctgccaatcaaaagaagtcagagatgaaaaagctcaactggagagtattggggaacgataaaagtgatcccatcccactgaaaggtggtcccgttgatagtcaagctcttgtcgttgaactcggacccatggagatacgcacattcttgctgaagttctagattgcatacacttagtaattgcctagtttttaaaggggaaaaagaaacatcagaatctaggacccatttggctatcattggttttcaattgactgggtaagaggacatcaataccaattctacattctattctcgctgctttcatgtatatatctctcaatcacccactagctagttggactctcatcagactt

SEQ ID NO: 93425 - DNA, 2316 bp, Zea Mays
accgatcgatgcgctcgtcggggccggcgggcaaagccaccagtggtcagagatctagctatggcgccggcgcttctgctgctgcgacttctggcattgattgcgacggcaagggaggcctgcgcggcgagggcgttcgccgcggcgtccaacgcgacggcgcatggggcgacggtggtggccgggaagctgaacgtgcacctggtgccgcactcgcatgacgacgtcgggtggctcaagaccgtcgaccagtactatgtcggatctaacaacagcatccagggcgcgtgcgtgatgaacaccctcgactccgtggtcgacgcgctcgccagggaccccgcccgcaagttcgtcgtcgtcgagcaggcttttttccaaaggtggtgggcagagaaaatcccaaacattcaggcagtagtccgcaagctcgtggattcgggtcagctagagttcataaatggtggatggtgcatgcatgatgaagctgctgtccattatattgacatgattgatcagaccacgcttggtcaccggatgatcaagaaacaattcaacaagactccaagagctggctggcaaatcgatccttttggacattctgcagttcaagcttatttgcttggagcagagcttggcttcgattctttgcattttgcaagaatcgattaccaagataaggaaaagcgtaaagctggcaaaggcttagaggttatatggcgcggctcaagaactttcggttcatcttcacagatatttacaaatgtatttcctgtcgattatagccctccagatggctttggctttgaagttttagatgaaaatatcttgcctgtccaggatgacatgctgatgtttgactataatgttgaagaacgagttaatgattttgttgttgcagccatagaacaggcaaattttacgcgtacaaaccacataatgtggaccatgggagatgattttagttatcagtatgcagaatcttggttccggaatatggacaaacttatctatcacgtgaacaaggatggccgagtgcatgcgctgtattctaccccatccatttacacagatgcaaaacatttttcaaatatatcttggccagtaaaatatgacgatgatttcccctatgctgattcgaaaaattcatattggactgggtactatacaagccgtccaactttcaagcgatatgttcgagtgcttagtggttattacctggctgcacgtcaaatagaatttttagtgggtaggagtttcttagggatgttcacgaccagcttggaagacccaatggcaattgcccagcatcatgatgcagtctcaggtacagcaaaacaacacacgacagatgactactcgaaacgccttgctcttggagcatctaaggttgagaaaggagtcaatgttgctctgacctgtttactaagttccaacggaacatgtgcgccttcagtacaaaaatttagtcagtgcccacttctcaatataagctactgcccttcaactgaggaaacagtttcaggggcaaagaatttagttgtagttgtttacaatcctcttggaagggaacgtagtgacttcatacagattcctgtcaatgatgaaaaccttgttgtaaaaagctctgatgggactattattgagtcacaactagttgaggttgataatgtgacaagaaatttaaggaaagtttatgtaaaagcgtatcttggaatcacaacaaacaaaccaccaatgtattggttactttttcaagcttctgtgccgccaatggggtggaattcttactacatttcgagatccacaggatccaacagcattaggtatgttgcaaccatggtttctccaaggaatgacacggttgaagttggaccagggtctctaaaactttccttctcatcagcatctggacaactggagagaatattcaattctgtctcaggagtggatctaccaattcaacaaagctttttttggtatagttcaaatcaaggtgatatcgtggatgcacagggatctggagcatatgtatttagacccaatggtactacaccaactattgtatcatcatcggtgctgctcagcgttatccatggacctttggttcatgaagtgcatcaacaattcggcccatggattaatcaaattactcgactctacaagaacaaggagcatgcagaagttgaatacacgattgggccaatccctattgatgatgatgttgggaaggaggtcattacccgattgacaacaaacatggttacaaatagtacattttataccgactctaatggaagagatttcctcaaaagggta

SEQ ID NO: 93426 - DNA, 174 bp, Zea Mays
atggccgagcagcagctctgctcgcccccctccttctttttccccttgtgcagcagcaagaagcccctgctcgcagccttggcgtccaacttcgctgcgcagcggtgccgatccaaagcagcagccccggcgtctccgcgctctgcgggctcgctgttttataaagcgcagtga

SEQ ID NO: 93427 - DNA, 105 bp, Zea Mays
cgtaatttgttaaatgagagaaggaacctgaaatatgggggcatcaacatctttattaaccttcgagtctcattcgatcattcctgccaagtgctgtatcgctcc

SEQ ID NO: 93428 - DNA, 158 bp, Zea Mays
ttcagcaataaactgacaatttcagattgcagttcacacatatcacagatacatagttctgtgactcagttccagttcacacacagaaaccacacatacatagtttcagttcccagatttcagtacacagacacaaaccacagatacatagttcccag

SEQ ID NO: 93429 - DNA, 324 bp, Zea Mays
atggcgattgatatttcagatgatgaatctgatgaggaggttccacaggctattccattattcccaaacgcagatgaccaccctttctaccttcttcaggccaatcaccaatattccaaaggttccttcttcagctacaaaaaaacaatgaaagcagcagataacttcagcacagttattgggaagggtggttttggaactgcctgtaaagctcaattcagtgatggatccatagctgcggtgaaaaggatgaacaaggtttcaaagcaagctgaagaagagttagaatgcctacaaaaagggaaaacatcagcaacaaattaa

SEQ ID NO: 93430 - DNA, 114 bp, Zea Mays
tgtttttttcatcaagagttttcacacaaccttaagattcataagatattggggaaagcgacatatggggtttactcgaatgtatgattctcttctgatttttcttgttgcagg

SEQ ID NO: 93431 - DNA, 282 bp, Zea Mays
atggcgcgcctcgagcttctccctgcgcgctgctctctgcctctcttctggccacgctcgcccagcccagccgtgcttctctccctctctgctcgccgcgcgcgctgctccctggggctcgccggacgtcgctttctggatgggttcccctacatcgcgcccagctcggatcttgctctggccgcggcgcttctctgcgggccagcgtttctccctgccatggagcgcctagcgccgcgccctgctccctggcatcgcaggctcgccggcgtttctccctga

SEQ ID NO: 93432 - DNA, 433 bp, Zea Mays
tttctcgttttgtttataaacacaaaagcaccacaattatatattcacaaaagcatcacaattataatatcatttacaactagatcatttacagatcgctagctagatcattcacaaaagctccaaagatgatcagtcacaaaagcaccacatcgacatcactccagcttgaagcagttcaaaagcccacaactacatcactaatgtttcatatcactccagctattgttcaaaagcccacaactacatcactctagctgctccagagttgatcagacacaaaagcaccaaagctacactaatgcttcaagcagttcaaaagccttcagacaaccactctagcttcttgtatcctcctgttttaaggtacaagctttctttgtccagaacaccctccactagatggtgttgcagccttatgcaccaacttcag

SEQ ID NO: 93433 - DNA, 1177 bp, Zea Mays
gacaatgaactgattcaaatttgttccttttaggtgactcttaaagttatccgtggacctctatttgatgaagtccatcaacaattcagctcgtggatttatcagattacacgactctacaagaacaaggagcatgctgaagttgaatacacgattgggccaatccctgttgacgatgacgtaggaaaggaggttatcacacagttgacagcaaatatgagtacaaacagtacattttatacagattccaatggaagggatttcctcaaaagggtgagaaactacagggaggattggaaccttcaagtgactcaaccagttgcaggaaattactacccggttaatctcggagtgtacatagtagatgagaaatatgaactatctgtccttgtggaccgtgctgccggagcatccagcattcaggatggtcagctagagattatgctacacaggcgtttgcttaaagatgatggcagaggtgtcgcggagccacttgatgaagtggtttgtgtggatcaagattgccaagggctaacggccaggggcacttactatatcaatgtcgagaagctaggccatggagctcattggcgccgtacatatggccagcaagtctactctccctttctccttgcttttactcatgaggatgcgacaagctcaaaaccctacagtgtggccaaagatagtatgatggatgggaattacagccttcctgacaacgttgcgattgtcactttgcagaatcttgatgatggtaccacactactccgcttggcccatcttttccaagctggcgaggacccgagatattcagaggtagcagaggttgatctgaaaaaggtctttggaaagagaactatcaaggaactgaccgagactaacctctccgcaaatcaaaagaagtcagagatgaagcagctcaactggagagttattgaggacgctgaaagtggtcctgccccggtaaaaggtggcccagttgattgtcgtgctctggtcgttgcgctgggacccatggagatacgcaccttcttgctgaaattttaatcgcatttaccgtgcttgtaattgtaaagaaaaaacaatgataaatggagaacttgctatcgttatttccttttgtaaaaaaaagatgaaatacccaaatagaacgttaaatttgcgcaaggtatgt

SEQ ID NO: 93434 - DNA, 109 bp, Zea Mays
gttatttgattttaatagtttgatggccaaaagatattcaattttagagttctatggccaaaatcaacactcagttaacagtttgatgtccaatcaaactggagcaaat

SEQ ID NO: 93435 - DNA, 2053 bp, Zea Mays
gccatcatggcgccgacgcttctgctggtagcccttgtagcgctcgcggtggcagcagcaacgccgatggtgatggaggcatcggcgttcacggaggggtgcaacaataggagcacgccgggtggtggtggaggcaccgcggtggggaacaagctgaacgtgcacttggtgccgcactcgcacgacgacgtcgggtggctcatgaccatcgaccagtactacgtcggatccaacaactccatccagggcgcgtgtgtgatgaacacactcgactccgtggtggacgcgctcgccaaggatcctgctcgcaagttcatcgtcgtcgagcaggctttcttccaaaggtggtgggcacagaaaagcctgacagtccaggccacagtacacaaactggtcgattcgggtcagctagagttcataaatggtgggtggtgtatgcatgatgaagctgttgtgcattacattgacatgattgatcagaccacacttggccaccgggtgatcaagaaacaattcaaaaagattccgagagctggctggcaaatcgatcctttcggtcattctgcagttcaagcttatttgcttggagcagagcttggtttcgattccgtgcattttgcaagaatcgattaccaagatagggcaacccggaaagcaaataagggcctagaagttatatggcgtggctcaagacctgttggttcatcatcacagatcttcacgaatgtatttccagtccattatagcgcaccagttggcttcagcttcgaagttttggctgaaaatgtcatacccgttcaggatgacatgtcgctgtttgactacaatgtccaagaacgtgtagatgattttgttgctgcagccatagcacaggcaaacgttacacgtacaaaccacataatgtggaccatgggggatgattttaactaccagtatgctgaatcctggttccgaaatatggacaaacttatccagtatgtgaacaaggatggccgagtgcatgcattatattctactccgtccatctacacagatgctaaacatgcatcaaacgaatcttggccagtaaaatacgatgattatttcccctacgccgattcaacaaatgcatactggactgggtattttacaagccgtccaactttcaagcgatacattcgagtgtacagtggatactatctggctgcgcgtcaaatagaatttttgatgggtaggagctccttgggattgttcacttccagcttggaagatgcaatgggtattgcccagcatcatgatgcaatctcaggtactgcaaaacagcacacgactgatgactactcaaaacggattgctattggagcatcaaaggtcgaaaaaggtgtaaacgctgctctgacttgtctaaccaactctaacaaaacatgtgtatcctctgtaccaaaatttagtcagtgtccacttctcaatataagctactgcccttcgactgaggaagcaatttcagcaacaaagcatttagttgtagttgtttacaatcctcttggttggaaacgtagtgacttcataagggttcctgtcaatgatgaagacctggtggtcaaaagctctgatggaaatactgttgtgtcacaaatagttgtggttgataatgtgacaaacaacttaagaaagttatatgtgaaggcttatcttggagtcacagcaaacaaggcccctaagtattggctaacatttcaagcttctgtaccaccaatgggatggaattcttactttattttgaaatcaactggatctggatacaacaacactgaacatgtccccgtcgtggttcctccaagtaacaacacaattgaagctggacaagggcatttaaagatgtcattctcttcagcatctggacaactagagagaatattcaattctgcctcaggaggagacttaccaattcaacaaagctttctttggtatagatcaagtaaaggagatgccttggacccacaggcatctggagcttatatatttagaccagatggtaatacaccaactattgcctcatcatcggtaagacctt

SEQ ID NO: 93436 - DNA, 231 bp, Zea Mays
atgatatcccaccagacctcattaaaattgggcaacatatactccacgaccctggtggccaatcctactaaaatgcatccacagaaaagaaatcgttgtcacttgaatcagtgtgcaatgacagatagctacaaaccactacaattaaaacacatgcccaattttagtaaacaatctagattcagtctagtcaagcataacagagtttcaaccgatcatttgaaaatgtga

SEQ ID NO: 93437 - DNA, 85 bp, Zea Mays
ggacttaggcacttaagttggaataattcgaatggttctgccacagctggtatcggagcttgtaccactacagagaaatcaataa

SEQ ID NO: 93438 - DNA, 1090 bp, Zea Mays
ttgggccgatccctgtcgatgatgatgtagggaaggaggtcatcacacggctgacagcaaatatggtcacaaacagtacgttttatacagactccaatggaagggatttcctcaaaagggtgagaaactacagggaggactggaatcttcaagtaactcaaccagttgcaggaaattactatccggtgaacctaggagtgtatgtagcagatgaaaaatatgagctatctgtgcttgtggaccgtgctgtcggagcatcaagcattcaggatggtcagctagagattatgctacacaggcgtttacttaaggatgatggcaggggtgtcggagagccacttgacgaggtggtttgcgtggatcaagattgccaagggcttacggccaggggcaattactacgtcaatgtcgagaagctagggcatggagctcactggcgacgtacatatggccagcaagtctactcaccctttctccttgctttcactcatgaggatgagaccagctcgaaatcctacagcgtggccaaagctggtatgatgaatgccaactacagccttcctgataatgtcgccattgttactttgcagaatctagatgatggtaccacactactccgcttggcccatctctttcaagctgctgaggacccgagatattccaaggtggcaaaggttgatctgaaaaaggtgttcggaaagagaactatcaaggaattgacggagactagcctctccgcgaaccaaaagaagtcagacatgaagaagctcagctggagggtcattgggaacactgaaactggtcctgccgcagtaaaaggtggcccagttgacagtagggctctagtcgttgaactaggacccatggagatacgcaccttcttgctgaaattttagtggcagttgttcttttgtttgtaaacaaacaatagtccatagagtaatttctaccttttcattaacgtgcccaaatcttagttcaaataggatcaaatacttgggcaatggaggtgcacacccacaccaagtttgttcatgtaataatagctacatgtcgggaaaaaaaaaaggaacggttgtggtgcttttca

SEQ ID NO: 93439 - DNA, 402 bp, Zea Mays
ttttttgttccagtttaccgccaacaaaataagagatgtagtatattggaacagtacagtgtaattctcaaacaaccttttgatctgtttcatgaacagaatagtagatgacagggcggctatttttgtttggtacttttatgttttaatgtctggcggatgtagttttattttctacctcatatctttacaatactagaagtcaattggaaataactagtaacttcaatgaaaactctggtgattacgttttattactcaaattttgaatgttttatttgataccctagtatttataggtgtctttttttgaaacaacagaggatacaagtaatctaagcacatatattaaccagagtgaacaattttctctttgccggcctcggatatctcttgttaatc

SEQ ID NO: 93440 - DNA, 409 bp, Zea Mays
cgtccgcattgtcggccagccagctcccactccactgcccgttccgttctgcgctcgtcatcgtcggggccggccgggcaagccatcagcggccgtgatggtgatggcgccggcgattctgctggcagtgctagtgctcgcggcggtggcagcggcgacggcgtcggcgttcgccgtggcgtccaacaacgcgacggtggtggccgggaagctgaacgtgcacctggtgcctcactcccacgacgacgtcgggtggctcaagaccgtcgaccagtactatgtcggctccaacaacagcatccagggcgcgtgcgtgatgaacaccctcgactccgtggtggacgcgctcgccagggatcccgcccgcaagttcgtcgtcgtcgagcagaccaatcgaatttttttttga

SEQ ID NO: 93441 - DNA, 2158 bp, Zea Mays
acctggcgttcatgggccacgaccctctgcaaagatccgcctgaacactgcagcggagcacgttcaaaaatcaaaaccatgtgtcggtgctctcggtctcggcaacctccccattccacaaccgtccccgagaacgacctcacatagtcacgtttccgtcttccgaagcagcacgtccgctcgcctccgagaacccaccacctcgccgcccgccaccagcccaccaccatggtgctcgaggcgaccatgatctgcgtggacaactcggagtggatgaggaatggggactatcccccatcgcggttcgcggcgcaggcccacgccttcgccgtcctctccggcgccaagacggaggcgaacctggagagcacggtggggctggtggccatggcgggcaagggcgtcagcgtgctcgtcccgccaaccaacgacttcggcaaggtcctgtcaggcatgaacgggctggaaattggtggtgaagcaaacttgactgctgcgatccaggtcgctcaatttgcactcaagaatcggcagaacaagcagctgcggcagagaataattgtttttgttggcagcccagtaatagatgagaagaactggctagaagtgatagggaaaaatctgaagaagaacaacgttgctcttgatgttgttaacttcggtgaatctgataacgaaaagcctgagaaactagaagctcttgttgctgcagtcaatagtggtggcaacagtcatataattcatatccctgcaggacgtgacctttctgatgccctattcagttcaccaataatattatcggaagaccgaggaagtgattctgctgctgctgctcgtggagcatcgggttttgaatttgacgtggacccaaacgtggacccagagctggcgctagtacttctgatctctatggaagaagagagattaaggcaagaagctgctgcaaaaaaggccagggaagaatcgtcgaaaactgagaatgaaggccaatcttcaacctccaatggtgacattgttatggctgacgcagaacctgaaccaaattcatatactgaagataaaggacttcattgtaaggatgagggccagctattggaaaaagctcgtaaaatccgtatagaagattatattagctttgaagaactgtttgatggtgtcacaagtgatacgatgtcagcttttcaggaagaagaaacttgcactcagtctgatgcgggtaaagattttggccatcaaccatttgagccatcactttctgatgttgaattacttaacgatctatctaacaaggttgcgttagagtgggaggaactattcattgacccaagcaaggtgtgctttattattcttagaaggggctctgcttgttggcaaccttgatggaaaacaagtgatatcatgctcttctatttcatctgcacatcaattctctgaaaatatgtttatggatctcgaatttctttttggctgcactcgtagaattagctcactaaatcacctatactttgcatgcttcttagtagcagtaagtaattcattgtagtgatctttacgtggtcatgaaattttagctaattcactaaggtttttgagtaacactagtgcatggctgaagggccacaaggtttttattttgcctcgctcgatgaaaaaggatatttgttctcttgctgaagtctattaaatttggactggttcgtgtctttttcctttttctcaactaaaaatatatgcctctgtacaatttgcatgctccatggagcgataacactgctgcatcgactagtgcagccaaagaagcgacacaagaagtataaaaggcgtcatcatcagaagaaaccaaaaaagaagcgtgagaagaaggaagacgaggctgagggggacaaactgtaagtacccgacgtccgacgatcgcctggacttctccattcttggtatattgtgaaatggaagtgagaaaaagtggtggtagctttagtggtagctttagtgtcagcttagacttgatattctcaaaaattggtcaaaagggatattgtgtttgtgaatctgagtgtttgttgagggactaagagtttcagtatagccaatgattgggaggagatggtggtctctgtttgcaccgaagcgattatattacattgttgtacaccatgta

SEQ ID NO: 93442 - DNA, 647 bp, Zea Mays
ataatgattagtttgtgctttctcatgttctatgccatgcagcttttcaggaagaagaaacttgcactcagtctgatgcgggtaaagattttggccatcaaccatttgagccatcagtgaggcctggaacttgatattatttaagtaaccattaggattatcctaaattcatataaaaattaatatttcaaatattttttccagctttctgatgttgaattacttaacgatctatctaacaaggttgcgttagagtgggaggaactattcattgacccaagcaagccaaagaagcgacacaagaagtataaaaggcgtcatcatcagaagaaaccaaaaaagaagcgtgagaagaaggaagacgaggctgagggggacaaactgtaagtacccgacgtccgacgatcgcctggacttctccattcttggtatattgtgaaatggaagtgagaaaaagtggtggtagctttagtggtagctttagtgtcagcttagacttgatattctcaaaaattggtcaaaagggatattgtgtttgtgaatctgagtgtttgttgagggactaagagtttcagtatagccaatgattgggaggagatggtggtctctgtttgcaccgaagcgattatattacattgttgtacacc

SEQ ID NO: 93443 - DNA, 116 bp, Zea Mays
gctacattcacttttaaatttttggatttcaaagctgaatttaaatctcaaacaaaactagatgcacattcaaaaattcattgttttactatttctatatcccaagtattttctaa

SEQ ID NO: 93444 - DNA, 1208 bp, Zea Mays
ttcctaaagtcgttcctgatcagcctccatctccagttcgcctctctccctgaactccctcccgccgcgcgctctccctgctgccgctcttccccggcgcgtccctgctccagctccggcgccgcggagctcctgcgcgcgcaagttgctctggtggccgtcgcgctggtcgcgtcccctccggtctcctccctcaagcgcagcttcttcgtgcccgtgatgggagatcctcgcccatggcgctcggctgcccagctccgagctcctcccagcttctctgctccagcccggccaccctcacctcatccccttcctgacgctcgtcctcggctccctctctcgtctggtggctggtgcgcgcaggcgtcgggctcagggagtccctgcgtgagctggcgctgtggtgggccggcggcggcgatggaggtgctggctgccgctcctcgtaggcgttgccttcagccttcctcgccgagatcgccttcctcggccgcctcgacatggcgaagaacgtcgaggtggtcgagagctgcaccacctccttttaccgctgctcctcccattggggtgaagccgtgggtcgaggcgcggtcccgtggtcaggcggcgacggcgagggtgaagagacccggcggtgcgagcagcggttcgagagggaggacgccgtgccctacgaccgcgacgttgacagggatcccgggcttgtcggtggcgcagccaaggactggagtaaatgctacataggttatgaatttggttttcttttctgccagtaagagacctgatgctacttttggaattgcaccagatccttctgtagagggtatcctcagatcgatggagtcatctcaatattattcaaagaatagtattgatgtggctcgagggagagggtacaagattgtgattacaatcagcctttcttcagacgtcccagttggctactcttcatgggctgaatatgatgttgtggcacctgtgcctccaaagactgaagaagctcttgctgcagactttatttctaaccgtggtacacggaactttcgtatgcaagccctcgagatgcttgaaaatttggatgtcaaaatagattcgtatggtggttgtcatcgcaaccgtggtgacaaagtggacaccttgaagcggtacagattcagcttggcatttgagaattctaatgaggaggattacgtaacagaaaagttttt

SEQ ID NO: 93445 - DNA, 108 bp, Zea Mays
gctgatagagtgcttgtaaaggttaactctttcgaggagaagacaactggtggaattttgctccctacaacttctcagtccagacctcagggtggagaggtagttgtt

SEQ ID NO: 93446 - DNA, 1909 bp, Zea Mays
gccccctctcctccgcgatcctccccaatcgcgcagatcccgtctctgcgccgccatccgcgccgctcgcggagccgcccctccccgcaccgcgcattgcccggcgcgacagacaccgcacgacccccaactcggcgccccacgctccgcgccccctctccccccggcatgagacaccgtccctctcgccatgtgcccccacgcccagcggcatatgaaattagcgaggggcgtacaggtcgctctcgtctgctcggggctgggtccgctgccgtggtggccgtccactgggcgagtcgtcgaggtacccaatttctgccatggcgatccgcccggaccaatggtcgattctccatctgaccatcctcagtaagcctcctgccccactactgccctccaaagcggcgcgcgcgccaccgccatctccacccacgcccaccttgctgccgtggccgccccataccgcgccctcgatctgaccccacggggcaggatggacaaagggaaatcggtggtggccgagctggcggcgtcgttcagcgatgtccttgtcacaccgcgcgagccgccagaaccccaagccaagagcttcctaccatcgccctccttctttactaagtttgccagggagacaggagacacccaaacgctttcagatgttgatataaatattattgctttggcttacatgttagaagctgagatccatgggactagccatttgcgagagcaccctcctcctctgaaaattctcgaatacttcctctgaagaatattgagagtcaagatatcttcatgtgtgataccaacagtctttgtggggcacaagaggatatagagctctagccatcaaagaaggatgcacctgttgcatgggaggacgatgagaacgatgtaggttggatgcatgctattagccatagcatgcacagaagatatttgcagaggaaggcaaggcgtgatgccctcaaggaatctggacaaagttttgagacaagttctgttgttccatcaattgatgatgataaagttctctctgaaaatagtggattggagcatggtctgacttcaactgatggcctttcttctgtctctgagataattagtgcacgttctgatgattttgaacatcaagcagagaatgacactgaaattcctggagaacatttgcattctgatcagcgagcttacggtgatgatgctgatgcgtgcaccaaagaattggaaaacctagatatagaaggtgaggatgagggaggtggtgatgcacatttcattgttgatgagagcaacgagcagagttggaccctgaggtccttatctgaatcgagcattccacgttattcactatgcaaagaaagagacgtgaacttgaagtatgagaaacataaaaggtttaatgctactctttgcacttattgcaactatatttatttgcttttgttcatggaaggcttcaacgtgtggttctttttaagaagtccatggtcaatgggtcagtatactgtcacagaaaccgacaacacacatcgcaaaatcttgggcgtagagtttttttttctagactctagtaataagctgcaagaaaatctaaagatgcgtaatcatgtaatttgggggtcacttctttcagcttgtaattaaattagctcctatgatgtgggagcacgtgtgctgatctcaaacttacatgctgaaggtggtcagtgggatgacacagaaaataagagggcagatgggaagagcatgggtatagagaagtctcctgaccatagcttcatccaagtagaaacattcataatttagtttagcatgaatatgatatttgcctgcaatagacgactaacaagagtgatgccaaccaatgtagtttctgatttactgggcatgagccctcatatttcaattt

SEQ ID NO: 93447 - DNA, 95 bp, Zea Mays
gtgatttatgaacactgaactggtcactgtctatgttgttgtcttgctgaaattattgaaactatgtattattgaaagtatgcaccttgctattg

SEQ ID NO: 93448 - DNA, 640 bp, Zea Mays
aaactccacgactcagcctcctcttcctaacaccatccggtccatctagccgtcgccgcctcgcatcctccacctccccggatcccaccgcgatggagaaagacgatgagttcggcgacctctacacggacatcctcatccccactcataccccccaatccacctcttcctagcaccatctggtccatccagccgccgctgcctcgcatccttcacctccccagatcccgccgcgatggaggaagacgatgagttcggcgacctctacacggacatcctcatccccactcataccccccaatccacctccgcgctatccaaccctgttctagtcaaaaccctacaccgcccgcctccacaccctaatcctacccccgtggcagcggcagcagaggaggtcgacgatgactggctcctaggagggagcgaatccatacctggggtcgaaccgaccggcgattgggccgacgaggacgacgatggaggggagcccgcacctcccgcttgtgaggatggtgtcaccaccgccgttggggcccgaggggagcgaccaaacagagctagggttaggagtgtagcgggctgcagctttgaggcggagcgagagaacatgggcccgatgttgcgtaggcgtcaatga

SEQ ID NO: 93449 - DNA, 1087 bp, Zea Mays
cgcctcccaaaagattccttctcgtccccgctccagtggatgccccatccctccattcaaggttggtggcgggtgcgccggtgtctctctcagcccctcgtcaaccggatggtcacactgccacgccatcgctacacgcagtagtaactgcactggcatagcgacacggcaggcacacgcttcttccccgtgcttgcagtcgcagtgcagctgttcccacactacaccccgtcagtctcggccactgcatagtctcaagaagcagaaatggagttgccaagatccatggccgttcttgtgctcgtgttcgtcgtcttgtgccgagccagaagtcgacgaccatgccgagcgcgacgccgacgatggtgccgggggggacaacgacgacagtgccaggggcgacgcccacgacggtgccggggacgatgccaatgccgggcgcgaccccagcgttgccgacagggaccatgatgccgggcactacgttcacggacgccaccccggacagcgggatgccgatgggtggtggtggtggcctgggcatcgagggcggggaacaaggcagcgtgctactcggagccagcagcggcgaaggcggcgtctcttggctcgccaacatggccaccggcgacgcgtccgccgcgggcgccccgctggtggcttcggctcggttcgtggtggcgacattgctctgcggcctccatttgcggcggcttctgctgtagtggtgatggagagggtagaggaaacccactcgtacgtagtagcactgtactgtaccttaccttacattgtagcagtgtctgtagatgattactatcaattgatgatgttgagttagtcgcaggattagacacttgtgtctgctagtactggttctggttctagttctagttctagagaagaaattaatgcatgcttgcgggtgggcattgattgattaagttaatcgccgtcgtgctatgttgtttgttgccactgtttgttcatgcgtggctcgaggttggcggggaacacgggcctggcatggtctcagagaagactgcctggaataaaaaacatactggtgtcctgtgttcactctacc

SEQ ID NO: 93450 - DNA, 1784 bp, Zea Mays
cgcctcccaaaagattccttctcgtccccgctccagtggatgccccatccctccattcaaggttggtggcgggtgcgccggtgtctctctcagcccctcgtcaaccggatggtcacactgccacgccatcgctacacgcagtagtaactgcactggcatagcgacacggcaggcacacgcttcttccccgtgcttgcagtcgcagtgcagctgttcccacactacaccccgtcagtctcggccactgcatagtctcaagaagcagaaatggagttgccaagatccatggccgttcttgtgctcgtgttcgtcgtcttgtgccgagtgggggaggcggcgacgttcacgttcgtgaaccggtgcacggacacggtgtggccgggcgtcctgtccaacgccgggagcccaaggctggagcccacggggttcgagctcccgccgggcgcggcgcgcgcggtgccggcgccggcgggctggtcaggccgaatgtgggcgcgcacgggctgctcccaggatggcggcacggggcggctcgtctgtgccacgggcgactgcggctccggctcagccgagtgctcgggcgcgggcgcggcgccgccggccacactggccgagttcacgctcgacggcagtggcgggctggacttctacgacgtcagcctcgtggacggctacaacctccccgtgctggtggagacctccggcggcggaggctccacggggccagcctcgtgcgccgcggccgggtgcgcggcggacctgaacgcgatgtgccccgccgagctccgagccgggggcggcggcgcgtgccggagcgcgtgcgacgcgtttgcgcggcccgagtactgctgcagcggcgccttcgcgtccccggcggcgtgccggccgacggcctactcgcaggtgttcaagaccgcgtgcccgcgctcttacagctacgcattcgacgatcccacctccacattcacctgcggcggcggcccggactacaccgtgacattctgccccggcgccaccccaagccagaagtcgacgaccatgccgagcgcgacgccgacgatggtgccgggggggacaacgacgacagtgccaggggcgacgcccacgacggtgccggggacgatgccaatgccgggcgcgaccccagcgttgccgacagggaccatgatgccgggcactacgttcacggacgccaccccggacagcgggatgccgatgggtggtggtggtggcctgggcatcgagggcggggaacaaggcagcgtgctactcggagccagcagcggcgaaggcggcgtctcttggctcgccaacatggccaccggcgacgcgtccgccgcgggcgccccgctggtggcttcggctcggttcgtggtggcgacattgctctgcggcctccatttgcggcggcttctgctgtagtggtgatggagagggtagaggaaacccactcgtacgtagtagcactgtactgtaccttaccttacattgtagcagtgtctgtagatgattactatcaattgatgatgttgagttagtcgcaggattagacacttgtgtctgctagtactggttctggttctagttctagttctagagaagaaattaatgcatgcttgcgggtgggcattgattgattaagttaatcgccgtcgtgctatgttgtttgttgccactgtttgttcatgcgtggctcgaggttggcggggaacacgggcctggcatggtctcagagaagactgcctggaataaaaaacatactggtgtcctgtgttcactctacc

SEQ ID NO: 93451 - DNA, 1826 bp, Zea Mays
cgcctcccaaaagattccttctcgtccccgctccagtggatgccccatccctccattcaaggttggtggcgggtgcgccggtgtctctctcagcccctcgtcaaccggatggtcacactgccacgccatcgctacacgcagtagtaactgcactggcatagcgacacggcaggcacacgcttcttccccgtgcttgcagtcgcagtgcagctgttcccacactacaccccgtcagtctcggccactgcatagtctcaagaagcagaaatggagttgccaagatccatggccgttcttgtgctcgtgttcgtcgtcttgtgccgagcaatggcgggtgaccaagctgaagcattctcgtttgtcgcagtgggggaggcggcgacgttcacgttcgtgaaccggtgcacggacacggtgtggccgggcgtcctgtccaacgccgggagcccaaggctggagcccacggggttcgagctcccgccgggcgcggcgcgcgcggtgccggcgccggcgggctggtcaggccgaatgtgggcgcgcacgggctgctcccaggatggcggcacggggcggctcgtctgtgccacgggcgactgcggctccggctcagccgagtgctcgggcgcgggcgcggcgccgccggccacactggccgagttcacgctcgacggcagtggcgggctggacttctacgacgtcagcctcgtggacggctacaacctccccgtgctggtggagacctccggcggcggaggctccacggggccagcctcgtgcgccgcggccgggtgcgcggcggacctgaacgcgatgtgccccgccgagctccgagccgggggcggcggcgcgtgccggagcgcgtgcgacgcgtttgcgcggcccgagtactgctgcagcggcgccttcgcgtccccggcggcgtgccggccgacggcctactcgcaggtgttcaagaccgcgtgcccgcgctcttacagctacgcattcgacgatcccacctccacattcacctgcggcggcggcccggactacaccgtgacattctgccccggcgccaccccaagccagaagtcgacgaccatgccgagcgcgacgccgacgatggtgccgggggggacaacgacgacagtgccaggggcgacgcccacgacggtgccggggacgatgccaatgccgggcgcgaccccagcgttgccgacagggaccatgatgccgggcactacgttcacggacgccaccccggacagcgggatgccgatgggtggtggtggtggcctgggcatcgagggcggggaacaaggcagcgtgctactcggagccagcagcggcgaaggcggcgtctcttggctcgccaacatggccaccggcgacgcgtccgccgcgggcgccccgctggtggcttcggctcggttcgtggtggcgacattgctctgcggcctccatttgcggcggcttctgctgtagtggtgatggagagggtagaggaaacccactcgtacgtagtagcactgtactgtaccttaccttacattgtagcagtgtctgtagatgattactatcaattgatgatgttgagttagtcgcaggattagacacttgtgtctgctagtactggttctggttctagttctagttctagagaagaaattaatgcatgcttgcgggtgggcattgattgattaagttaatcgccgtcgtgctatgttgtttgttgccactgtttgttcatgcgtggctcgaggttggcggggaacacgggcctggcatggtctcagagaagactgcctggaataaaaaacatactggtgtcctgtgttcactctacc

SEQ ID NO: 93452 - DNA, 1891 bp, Zea Mays
cgcctcccaaaagattccttctcgtccccgctccagtggatgccccatccctccattcaaggttggtggcgggtgcgccggtgtctctctcagcccctcgtcaaccggatggtcacactgccacgccatcgctacacgcagtagtaactgcactggcatagcgacacggcaggcacacgcttcttccccgtgcttgcagtcgcagtgcagctgttcccacactacaccccgtcagtctcggccactgcatagtctcaagaagcagaaatggagttgccaagatccatggccgttcttgtgctcgtgttcgtcgtcttgtgccgaggtaatgatctctcggcaaatcgaccgaatgtttccttctttaacgagatcttgcgtggtcaccagcaatggcgggtgaccaagctgaagcattctcgtttgtcgcagtgggggaggcggcgacgttcacgttcgtgaaccggtgcacggacacggtgtggccgggcgtcctgtccaacgccgggagcccaaggctggagcccacggggttcgagctcccgccgggcgcggcgcgcgcggtgccggcgccggcgggctggtcaggccgaatgtgggcgcgcacgggctgctcccaggatggcggcacggggcggctcgtctgtgccacgggcgactgcggctccggctcagccgagtgctcgggcgcgggcgcggcgccgccggccacactggccgagttcacgctcgacggcagtggcgggctggacttctacgacgtcagcctcgtggacggctacaacctccccgtgctggtggagacctccggcggcggaggctccacggggccagcctcgtgcgccgcggccgggtgcgcggcggacctgaacgcgatgtgccccgccgagctccgagccgggggcggcggcgcgtgccggagcgcgtgcgacgcgtttgcgcggcccgagtactgctgcagcggcgccttcgcgtccccggcggcgtgccggccgacggcctactcgcaggtgttcaagaccgcgtgcccgcgctcttacagctacgcattcgacgatcccacctccacattcacctgcggcggcggcccggactacaccgtgacattctgccccggcgccaccccaagccagaagtcgacgaccatgccgagcgcgacgccgacgatggtgccgggggggacaacgacgacagtgccaggggcgacgcccacgacggtgccggggacgatgccaatgccgggcgcgaccccagcgttgccgacagggaccatgatgccgggcactacgttcacggacgccaccccggacagcgggatgccgatgggtggtggtggtggcctgggcatcgagggcggggaacaaggcagcgtgctactcggagccagcagcggcgaaggcggcgtctcttggctcgccaacatggccaccggcgacgcgtccgccgcgggcgccccgctggtggcttcggctcggttcgtggtggcgacattgctctgcggcctccatttgcggcggcttctgctgtagtggtgatggagagggtagaggaaacccactcgtacgtagtagcactgtactgtaccttaccttacattgtagcagtgtctgtagatgattactatcaattgatgatgttgagttagtcgcaggattagacacttgtgtctgctagtactggttctggttctagttctagttctagagaagaaattaatgcatgcttgcgggtgggcattgattgattaagttaatcgccgtcgtgctatgttgtttgttgccactgtttgttcatgcgtggctcgaggttggcggggaacacgggcctggcatggtctcagagaagactgcctggaataaaaaacatactggtgtcctgtgttcactctacc

SEQ ID NO: 93453 - DNA, 1155 bp, Zea Mays
cttttatcagtcatttctaactactgtattatactgataatggtacgtactaatgaaggatgaaagtgcgtgtggtggtactacctggtgggcacggcggggcagaaggtgatggtgtagtcggtgctgccggcggcgcaggtgaatgtggaggtggcgtcgtcgtacgcgtagctgtaggcgcgcgggcacgcggtcttgaagaactcggagtaggccgacgggcggcacgcggtgggggtgccgtacgcgccgctgcagcagtactgcgcgtccccgaaggcgtcgcacgcgctccggcacgccacgggcccgtccgccgcggcctccacccgcaggcccgccgggcacgcggagttcagctccgcggcgcaccccgtcggcgcgcacttgccgccggctgccgtggtggaggcgctgctgggcgcgacgatcatgggcaggttgtacccgtccacgaggctgacgtcgtagaagtccagcccgccgctgccgtccagcgtgaactccgccagcgtcgcgggcggggcggcgccgccgccgctgcactgcacgtcgccggacccgcagtcccccgtggcgcacgcgaaccgccccgtggcggcgtcggcggcgcagagcgtgcggccccagaggcggcccgaccaccccgcgggcgccgccacggcacgggactccgaaggcgccagcgcgaaccccgtggtgggcagcggcgcggagcccgcgctggacagcagccccggccacaccgtgtagccgcagttgttcgcgatggtgaacgtcgccgaccgcgcgccgcgcagctgcaggaccagcaagagcgccgcgaatgcccggcgccaagaaggcacggctgccgtcgccgccatttcgcttgtggaatgctgatgcgtgcttgcagctggagaccctggcagcagcgtgcttgggaaatccagccgatggatggatgacggtgctaggatggatgacggtgctaacagccaatccatggatggggtatttataatgtaactagccggtggaggatggcgacaattgaagcgcaggtgaagcaggggaggaggagctggctgcgaagcggagcagagctggagtctggagaggtgcatcggtgcgttgtgtcttacgtggacgcggacttttgtctttgac

SEQ ID NO: 93454 - DNA, 758 bp, Zea Mays
taagcaagcaccgccagcacgcacaagcaggcaaagctctcgaccatcgctctgagggattaatggcggcgggaggaggaggcggcggcatcgccgacgagaaggcccctgctgctgaggcgcatctcactgctgccccgccggcggccttcatgccgccgccgccaccaatggccgcggcgccctccatgccaccggcggcgacggcgttcaatgccaccggcctcttcttccctccgctgccagccccggctccggctccgtcgccgatgatcaacttcttcctccgccaccaccaccgtgggcaccacggccgccacggcctgtgacgtcgtcgtcgacgcgctgtgcattgcatgcatggtcgctagcgctgcgcctctgtcacgtacggccgattactccctgtcgagtttgctccacagtagttttagctagttatatatcttggtcatcagcacgcagcaaaggtgcaagttaattagctactagcctgattagtaaaagttgtgtgtcgtcaaatgccctgttgtacgttcatcagataaaagagatcgaggtacacgtggatgagagtctggacgtacgtacggtcataaggctaggtaactctgcctacatgatcgtcaggatacgtttggagtcccttgtcctgtaccgtgtccttgtgtgtagctgctttcgagaaagaagctgagcagaaaaagaaaaaaaaaagagaatggaatgttgttacgttttcctctcacgcagtcata

SEQ ID NO: 93455 - DNA, 877 bp, Zea Mays
aaatgaattgatcacgtgttgtcgtctcgctcaggtcttcaggtggcgatcaagtgcaagaacagcaacggcgagtacgagacaaaggccgtgagtgagatccaaagctccggagccttcagcgtcccactcgccgccgacctccacggcgccgactgccacgcgcagctccacagcgccgccaataacgcgccttgccctgggcaggagccgtccaggatcgcgcccatgtcaggcggcaccttcgtcgccgtgcctggcaagatgcactacccgtccgcggagtgcgcgtccgcgtttctctgctccccgatcaagaagcacttgttagatcacttccacaaggcacccctgccggtgccggagtaccacccggtgcctgaccacagcaagccgccggtgccggagtaccacccggtgcctgagcacagcaagccggcgccggagtaccaccctcccacgccggaataccaccctcccactccagtgtacgggcagccaaagccaactccgatctaccatcctcccgctgagcactgagttcgatcaacaacgaacgccagagctagaagaacggcaggcttctgttagttattaattcagtactgcacgtgttactagtgcgcctcatgcatggagaataaaatggtgtgaaatatagctgggagcttgtactttattagttatcgattgttgtttatctttaacttgcttaccgaaatcgtgttgtgcatcttgtctttttgtcaatgtaagcagagcctgttctcagtcctactctcccctttcacgaaggtattactaactcaatttttttcaactttgacggttaacaacaaaatatttataaatatttactaaataaagataaaaaata

SEQ ID NO: 93456 - DNA, 1169 bp, Zea Mays
atccgtctagacggacagcgtggattcgagtaatttcccatctacaaaaccggcgcccgagcatctcctttgtgaccaatgaataactcatgcgcggttcctgttcgttcgcgcctataaaagccatggcgcagcagggtcgatctcctccactacacacaaacacacaatggcaccagaaacgatgctcctcggcgtctgtgccgtgctgatggtggtcggcgtcacgaacgcggcggagggccaggtggcgtcggtcgtcgtgggcctggcgaggtgcgccgacagcacgaggaagaacatgaaggctgaggccggtttcaagggtcttcaggtggcgatcaagtgcaagaacagcaacggcgagtacgagacaaaggccgtgagtgagatccaaagctccggagccttcagcgtcccactcgccgccgacctccacggcgccgactgccacgcgcagctccacagcgccgccaataacgcgccttgccctgggcaggagccgtccaggatcgcgcccatgtcaggcggcaccttcgtcgccgtgcctggcaagatgcactacccgtccgcggagtgcgcgtccgcgtttctctgctccccgatcaagaagcacttgttagatcacttccacaaggcacccctgccggtgccggagtaccacccggtgcctgaccacagcaagccgccggtgccggagtaccacccggtgcctgagcacagcaagccggcgccggagtaccaccctcccacgccggaataccaccctcccactccagtgtacgggcagccaaagccaactccgatctaccatcctcccgctgagcactgagttcgatcaacaacgaacgccagagctagaagaacggcaggcttctgttagttattaattcagtactgcacgtgttactagtgcgcctcatgcatggagaataaaatggtgtgaaatatagctgggagcttgtactttattagttatcgattgttgtttatctttaacttgcttaccgaaatcgtgttgtgcatcttgtctttttgtcaatgtaagcagagcctgttctcagtcctactctcccctttcacgaaggtattactaactcaatttttttcaactttgacggttaacaacaaaatatttataaatatttactaaataaagataaaaaata

SEQ ID NO: 93457 - DNA, 1493 bp, Zea Mays
atccgtctagacggacagcgtggattcgagtaatttcccatctacaaaaccggcgcccgagcatctcctttgtgaccaatgaataactcatgcgcggttcctgttcgttcgcgcctataaaagccatggcgcagcagggtcgatctcctccactacacacaaacacacaatggcaccagaaacgatgctcctcggcgtctgtgccgtgctgatggtggtcggcgtcacgaacgcggcggagggccaggtggcgtcggtcgtcgtgggcctggcgaggtgcgccgacagcacgaggaagaacatgaaggctgaggccggtttcaagggtaagcacgccgcatgcgtcgttactttacgcgcgcggtgtgctttctgctttgcatgcatgcaacacgcaatgcgatacattttcatgcatgccacggtttcgtctacctatgactgaaaagacacactagctagctagctagtatatgtactagctaggaccaaaattcgcaacacaccaatctcgatttaatatgaaaaaagagacgaggtaaaatgaattgatcacgtgttgtcgtctcgctcaggtggatcactagaagtagtataatagtaacaaggcatctggagtgtttttaattttatttatttatggtcctcaggtcttcaggtggcgatcaagtgcaagaacagcaacggcgagtacgagacaaaggccgtgagtgagatccaaagctccggagccttcagcgtcccactcgccgccgacctccacggcgccgactgccacgcgcagctccacagcgccgccaataacgcgccttgccctgggcaggagccgtccaggatcgcgcccatgtcaggcggcaccttcgtcgccgtgcctggcaagatgcactacccgtccgcggagtgcgcgtccgcgtttctctgctccccgatcaagaagcacttgttagatcacttccacaaggcacccctgccggtgccggagtaccacccggtgcctgaccacagcaagccgccggtgccggagtaccacccggtgcctgagcacagcaagccggcgccggagtaccaccctcccacgccggaataccaccctcccactccagtgtacgggcagccaaagccaactccgatctaccatcctcccgctgagcactgagttcgatcaacaacgaacgccagagctagaagaacggcaggcttctgttagttattaattcagtactgcacgtgttactagtgcgcctcatgcatggagaataaaatggtgtgaaatatagctgggagcttgtactttattagttatcgattgttgtttatctttaacttgcttaccgaaatcgtgttgtgcatcttgtctttttgtcaatgtaagcagagcctgttctcagtcctactctcccctttcacgaaggtattactaactcaatttttttcaactttgacggttaacaacaaaatatttataaatatttactaaataaagataaaaaata

SEQ ID NO: 93458 - DNA, 537 bp, Zea Mays
ccaccttggccatacctgttccgtctcgttgaaccccgtgtgcattagatggagagaatcggagcgtatgaacgccgcctggaggagctgttgacgcgccgcgcctagatcctcgaattcgcccacaccggtcgtcgtggtgcttcacttggacacgccaaaaaggtttggggcatcttcgggtgggacttgcgatcggggcgccaggaatttctcgtcgtggtcactgctccgtcatagaaccacgccaccgtgtgggcagtgccgccaccatcccaaaccgaggctttacatctccaggacacttttgctattactatataaagttttaaacttagaagcctttggcccaacttgatggtaggttgtaaccatgcctagaactgtgaaccatgagtgatgtctgcattttgttggattgaaccttggtctacgagtgggacaaaatgactgcaagcaccaactctactttgttctttgtttttatctatttaaattatgtgcaaactacgaccaacatattgtctgtttgctagg

SEQ ID NO: 93459 - DNA, 572 bp, Zea Mays
ccgccgaccgagccaggcagcataggccacacacggcggcgccatggccgaaggatgcctactccgtgcactagggctctatcctgtgatctaaatggatctacacctatatgagagtcctacaaattcaaagggattaccaaccagcgacgaaagctaatggtacgcaacgaccacgatgagcagtacacccgtgacaacgtctcactacaacgttgaattcccggtccgaaggcgaactatatcctactatgcaaagtgctctatgttggaccgattaaggcgaaacctcaagaagggggtctcaccggtaacgatgttgacatgttgtggtcgagccgattcacgacatgacacagcgcggctccgccgtgtaggggatactccggtgatgaattccttgtatccgatacatcctttcccctgccaagacctcacatacgttatacgtggcctatctaacctcctggagtgtttgcaaggggatagaactttgcaattgatgtggttccacggctgtggctcaatttgctcaatcccactcgcatcggaggtgctttgccttccccgcc

SEQ ID NO: 93460 - DNA, 695 bp, Zea Mays
attagcgctgccgcctccgcctgggagcttcatgtgtcggtcgcctcccccgtctcccaccccagcggagtgggacttcaactccgctgagccatccctttgccttcctgtctcttccccttctctacaaatggagaatgaagtcgctgccatctcttccgtttctccctctctccccactcctctctagtgggagacagcagcaccattattgacgctaatggcactgacaactccattcctctccccggcgctccctctgctcttccccctctctataaatcgcgagctcatgacccgtggagcctgttcctggctgcccaacctctccacgcgctctgttttctctctcgtcgtggaactcgccgccgccgcccctattcgtcatcgtcggagtcaccgaacacctcctgtcgccagcacgtgggttcccgagcgcctcgtcgatcccgccgccggtgtcccgctgtctcgactgccggttggagttcctgcctcatcgttgaccatcaccagctcgcctgtcgcgctgtgcgtagaaacagagaagagaaggttaaaggtagaagaaagagatatttttgcgaaactgatcttgtagtctacgcataaatctagcccttaccaatgtattattgttgattttctaattaatatttgggttccaatttaagttgattacgattctgtaaaca

SEQ ID NO: 93461 - DNA, 950 bp, Zea Mays
aatccaacctatatatcacatttagcacacagaatacgtctctaatataaatttttgacgtgtagaggacacccaggagacaggctacctaaacctcgctatataagctgaggtacacagagataagagacggttgcattgcatctgagaaattagctactcgatcactgtagtggtattattaccgaactccaaataagcaatgtcgacaacttcgacatccctcggcctgctaatccgtccgccaagatcagctggtacgccgtcctttgggtctctcaaaccagtagtggtgactctcccttgtgctcctgctgagaagaagcggcctcgatccatctgttactctgtggatgccaaggctaccgaccatgccttcaacatctctcccgttgcccttgtgcatcccaacatgccgccaacgtcgacgccgcgatgggagatcaaggaagatggcaaggaagtcaggctgacattcttcaacttgtcggagggtgctacaacgggcgacttccaggttgccgtggaggacgatgtgctcatcatcaagagcacgaagcccaagccccctgcagccgaggaacagaggcaaaaggaagccccagccgacagcgtctcgttccacgtccggctactggtgcccaagggatacgacaaagagaacgtgcgtgcccaactgcagctccgggctctggttgtcaccatccccaaggttaatccttcattcaccaaggaggttgacatcgacgacggaaaataggaacgaacacttcagtttctgtattttgtgtttaccatgggtcatatcgttgtatcccagctgtggtagtaattatgtggacgcattttgcgtcaaaataactatggcttagcagcgaaatatctattgcgggcaccacagcaaaataaaaacttttcgtgagtcaaaatatataatttctgtatttttt

SEQ ID NO: 93462 - DNA, 2079 bp, Zea Mays
gcgggcgggagaggaagaaaagcgaagctgctgcgccctcccctcccccatctgcgccctccgctccccccatcccggtcatggtatggagccgtcccgtggcgccgctggcggcgcgcggcggtggggggaggcggagaccgagggcgatgcggcggaggaagggagacgagcggaggacggcggcgaggtgagcctacgggagtggctggaccgaccaggccgggcggtggaggcggcggagtgcttgcacgtgttcaggcaggtggcggaggcggtggccgtcgcgcacgcaccgggggtggtcgtgggcagcgcgcggccgtcgtgcttcgtcgtgtcgccgcccttcgcgcgcgtcgccttcatcgagtccgccttcggctccgatgcctcgggttcgtgctcgggctccgacgccgacccagatgcctcgcctccgcggcgaggggacggcgccggacgcggcgaggagcgcgcggggaagtccttcccgctcaagagcgtgctggccatggagctcaactggtacaccagtcccgaggaggcggacgacagcgccgctaccttcgcctctgatgtctatagactgggtgtgctcttgttcgagctgttctgcacattcgaaacgatggaggacaagatgcgggcaatggcgaccgcgaatctgaggcaccgggtgttgccgccacagttgctgctcaaatggcccaaggaagcatctttctgccagttgctaatgcaccctgtgccagaaaccagaccgaagatgaggtgcgtcgtgtgctgtgtactatttttgtttctgccagttgctaatgcgtctcctcaaagctgggaactgatttgtttgttagtatatgtgttgtggtcgtacactccataagacagaacgtggattgacagacacgagcatgcagttgtttgaagatcaagctagcctgggaaattggctgaatcttgcagataggaaaaccaatattcatggggcagtaagaaacactagaattaaaacaaacacttagtatgctccgtagggtttgaccgagatagagagtttttttgcaactgctggtgtaaataagaagataaaagtgtttgagtataatatgattgtaaatgaacaccgtgatattcactatcctgtggtagagatgtctaatagatcaaaactgagttgtatttcctggaacagttatatgaagagccatatagcatctagagattttgagggtatagtgcaggtttgggatgttactaggagtcaagtttttgttgagatgagggagcatgagtgacgtgtgtggtcggtggacttctcaattgtggacccaacaaaattggtcagtgggagtgatgatggatctgtgaagctatgggatatgaatcaggctgggagtattggcactattaaaacaagggaaaatgtgtgttctgtgcaatttcaacctgatactgctcgctccattgccatcggctctgctgaccacaaaatttactgctatgatctacgtcacatacgagctccttattgtacactagttgggcacacaaagactgtaagctatgttaagtatctggatgcatcgacaatagtatctgcatctactgacaactcattgaagctttgggacttatcgatgagtccaggaaggataattgacagtccagttcaaacatttaaggggcatacaaatacaaagcaaggtcactggagttgacgaagctaaagctgaacttgaggaaattgttcactacctacgagatcctaaggccgcacttgaagaaatcttatatcagtttgaggaaaaactccaagctgaaagagaggaagctgctaggaagcaggaagagttgcaagcacaagtacaagctcaacaggccgcatttgaagaaaaccaaagtttgctgcgccaggccaagcacaactaccttgctagaacatatctgtggttagaactttgtcagaactacgtgcaatctgtttgaatgcttcaaacctttgtggtggaacctttgtatgtttgaacctctgttgtggaagaactagtgtgctggaattgtgtatgacttgtgatg

SEQ ID NO: 93463 - DNA, 1719 bp, Zea Mays
gcagccagcagatgcaacaaacaacccaagtctggttttttttttacccctggtgcagggctctctgggctcgagtgtagtcatctcctctgcacgctgtttcaacacaatgatcatggcatcagccttttacaagtttgggtaccagtcgtgtaaactgagtggtcctggtgcatgcaaacaacctacagccaccgccgctgctagcggcggcaacggtgtccatgccctagcgacaatcacgcgcaggaactggtgccggaatatggctaccacagcaagtggaacgacgactatggccgtggccggacgtcggcgagagaagaaggacgacgtggtcgagggggaggacgaatggcgcagctacctggctccggagaggctggaaatgctgagacagatggagccgtgggtggaagagcacgtgctaccgttgctcaagccggtggaggcgtcgtggcagccgtccgacctgctaccggacccggcgaatctgggcagcgacggcttccacgccgcgtgcctcgagctccgagcggccgcggcgggggtgccggacgacctcctcgtctgcctcgtcgccaacatgatcacggaggaggcgctgccctcgtacccgagcgggctgaaccgcctcgaggtcgtgcgggacgccacgggagccgacgccacggcgtgggcgcgctggatccgcggctggtccgccgaggagaaccgccacggcgacgtgctcaaccgctacatgcacctctcgggccgcttccacatgcgcgaggtggagcgcaccgtgcagcgcctcatccgcgacggggtgatagtgcacgcgccggcgagcccgttccacggcttcgtctacgtcgccttccaggagcgcgccaccgccatcgcgcacggcaacacggcgcgcctcgtgggcgcgcgcggggccggggacgccgctctcgcgcgcatctgcggcaccgtcgccgccgacgagaagcggcacgaggcggcgtacacccgcgtcgtgggcaagttcttcgaggccgacccggacgccgccgtgcgcgccatggcgtacatgatgcggcgccggatcgacatgcccactgtgctcatcaacgacggccgccacagcagcggcgacttctacgctcgcttcgtcgccatcgcgcagcaggccggcacgtacacggtttccgactaccgcgccattctcgagcacttcatacggcagtggggcgtcgaggaacttgcggcggggctcaccggcgaggggaggcgcgcgcgggactacctgtgcgcgctgccgcacaagataaagaggatggaagagaaggcccacgatagagcggtcaaagcacaaaagaaacccacacccatccccatcaactggatcttcgataggaccattcctgtcattctaccttagtgtttatctttttcgatctttgtttgggtatctatgctgttattgtaagctaattccatggaccttgatagcgtcgttcatgcctacgtgtcgatagcatcattagtgtcgttctacccttaatcctgttatgccacgttaggtaccatttttttccataagagaatatttacaaatttataatttgttggatcgaggtgatacagggaacttaaaatgctctcagcctctgcattacggtcttacgagctttttacatggttgagacacactaataatatttaatttatagacaaaattctttatta

SEQ ID NO: 93464 - DNA, 1631 bp, Zea Mays
gcagccagcagatgcaacaaacaacccaagtctggttttttttttacccctggtgcagggctctctgggctcgagtgtagtcatctcctctgcacgctgtttcaacacaatgatcatggcatcagccttttacaagtttgggtaccagtcgtgtaaactgagtggtcctggtgcatgcaaacaacctacagccaccgccgctgctagcggcggcaacggtgtccatgccctagcgacaatcacgcgcaggaactggaggtgccggaatatggctaccacagcaagtggaacgacgactatggccgtggccggacgtcggcgagagaagaaggacgacgtggtcgagggggaggacgaatggcgcagctacctggctccggagaggctggaaatgctgagacagatggagccgtgggtggaagagcacgtgctaccgttgctcaagccggtggaggcgtcgtggcagccgtccgacctgctaccggacccggcgaatctgggcagcgacggcttccacgccgcgtgcctcgagctccgagcggccgcggcgggggtgccggacgacctcctcgtctgcctcgtcgccaacatgatcacggaggaggcgctgccctcgtacccgagcgggctgaaccgcctcgaggtcgtgcgggacgccacgggagccgacgccacggcgtgggcgcgctggatccgcggctggtccgccgaggagaaccgccacggcgacgtgctcaaccgctacatgcacctctcgggccgcttccacatgcgcgaggtggagcgcaccgtgcagcgcctcatccgcgacggggtgatagtgcacgcgccggcgagcccgttccacggcttcgtctacgtcgccttccaggagcgcgccaccgccatcgcgcacggcaacacggcgcgcctcgtgggcgcgcgcggggccggggacgccgctctcgcgcgcatctgcggcaccgtcgccgccgacgagaagcggcacgaggcggcgtacacccgcgtcgtgggcaagttcttcgaggccgacccggacgccgccgtgcgcgccatggcgtacatgatgcggcgccggatcgacatgcccactgtgctcatcaacgacggccgccacagcagcggcgacttctacgctcgcttcgtcgccatcgcgcagcaggccggcacgtacacggtttccgactaccgcgccattctcgagcacttcatacggcagtggggcgtcgaggaacttgcggcggggctcaccggcgaggggaggcgcgcgcgggactacctgtgcgcgctgccgcacaagataaagaggatggaagagaaggcccacgatagagcggtcaaagcacaaaagaaacccacacccatccccatcaactggatcttcgataggaccattcctgtcattctaccttagtgtttatctttttcgatctttgtttgggtatctatgctgttattgtaagctaattccatggaccttgatagcgtcgttcatgcctacgtgtcgatagcatcattagtgtcgttctacccttaatcctgttatgccacgttaggtaccatttttttccataagagaatatttacaaatttataatttgttggatcgaggtgatacagggaacttaaaa

SEQ ID NO: 93465 - DNA, 855 bp, Zea Mays
aaacagcggccgcccggagccgtccatttgtgagcccgatcagccgtgtgcgttccaccccgtgcgcgcaaagacgcaacggaacggagtaattgcgcgtgcccgccgcctcaggtcccggacaggataaccccgcctcacggcataaatgtgcgtgcccccggcagcgccgccgcctgctggatcgtgcctcgcaagaaaggaacttgcagcaaacggcggcggagagaaacatggcgtcgacttctcgacatacggcggaagagggcgacgtggtgcttcggtgctttgacggcgtgaaggtcgccgtgccggtggcgcttgcgcggcagcggtcggggctggtcgctgcgtcgcccgcggacactgtggtccacgtgccgggatacgtgcacgggaccgtggtcgccaaggtggtcgcgtactggtacgcggcggacaaggctggggcaccgttcgacgcagcgttcatggcggggctgaagcacgacgctttggtggacctcatccacgccgcgcatcacctgggcgacgccgcgctcttcgacctcttcaggttccggccatgacgaccgggcgagctcccaccttcggatcaagatcccgtcctctgtttcaaccatatggatctcttatttctatatcttgtcgagtgcagtagtacttttcagtgggtaagttttgattcaagttaggccccatttggatgcttacaattgaatttcgttctgataattataatttagatatagatgaataaattaataatattttaggtggaatatatttatatgttatggttcagccgtcgaaaataacaaaaattctctatagtgctgttgtgtatggaaaaca

SEQ ID NO: 93466 - DNA, 411 bp, Zea Mays
atggaggtgatgatcactttcgtttggcaaaacaaatgtgtttgtcaaatgtacatacaggaagctagcactggtgcaatgcccagtgatgttcaaatataccttagggggcaaagaggaccagatcctgcaaatccagatgtgttgtgcagcccaaaggcaacagatcgtgtggcgatgtctagtcagcacggaccagactatgactggaggacctcacctattgatcctcaggatgtgtatgcaagtggtggaaaagctcatggaaggtacacaatgtttgctaacgtcatcgactcaagccaggtgagggttcagcgtggaggttcattgaggtctgctgctcgtagctcccatcgctccactcaagatccagtagaagtggagcaactacgagaagaacttaggtga

SEQ ID NO: 93467 - DNA, 534 bp, Zea Mays
tttttcgctgggaagaaggttatgcagatagggttggggcgtccgcctgctgatgaagctaagacaggcctccacaaactttccaagttccttcaaggtaactctggtctgttcttcaccaatcttccaagggatgatgttgagaggatgtttcgagaatttgaggagcatgattttgcaaggacaggatgtactgcggtagatacggttgagcttaaggaaggccctctggaacagttcacacatgagatggagccctttctacgcaagcaaggacttccagttcgcttgaacaaaggtgtcgtagagttagttgcagaccatgtagtttgtgaggaagggaagcccctttcgcccagtttacgtgaaaaccgacggctgcatgggatacagatggcgacattccatctataccttgtgtgtcgctggtcgagcgatgaatttgaagcttacaaagaaggcttgatgcacctaggagctgatgattcctcttaagcttgtgtttcgtgtatacacaacacaaagggcacttgc

SEQ ID NO: 93468 - DNA, 1504 bp, Zea Mays
gtctcacccaatcccctatcgatgccgtattggacataaagatggagcaggtattccgtgatccaattccaaccactccccaatccccattgaccttgttaaatcaaatcctaataatccatcattctgcactctccaactccaccgtctccattctccgatcggaggctatatatatgcatgcatccacacgcacttatacatacacagcccaattagcaaggaacacactatctagctaaacaagcacacaacagaagcagcagggtaccaagctagcaacctggtcttcatggagctcctcccatgcatcgccacgctcctcatcctcctgatctccagctccctggcagcagcgacgtcgcctgtggggacaatcgagcgcgtaactaagcaacagatcctggcaagcattccgccgggcgggggcccgcccgtgctcttcctcacgtcgccttccggcaagtacgcggcctacttcgtgcggacgcacaccgtgccgggcgccggcgggcttggcgccgacttctgctacgtcgagatcatcgacaccacgacggccgccggcgcacatggcggcaccgtcgagggcgagggcgagggcgagggcgagggcgagagcgaggccggggctgctggtgcagccgccggaggaacgagcgtgtgggaatcggagtgccgtcccatcagcaccgtcaacacatgcgcgctgctcctgtcgtggcatgggctggaggtgttcgacggcagcgaggaggtgtggcacggcgagaccaacacagacggcaccaacttcctcgagacgctagagctcgtggacgacggcgacatgcgcatccgcgacaaggacggcgagctcgcgtggcgcgccagcgacgagccgcggcacgcgcagcactgcggcgcgccgggatcgccggggctcgccaccgcgctcccgccattcgccgagccgctcggcgcgcacagcagcaacctcccctttgggcaggaacctgacggcaacggccactcggccgagctgccccaggcggcagatgtcggcagcggagaagcggccttcggtgccgccgctggtgtggctgggcctgagctcgggcagggagagcacgactcggcatccgtgttcggtgcccagccgttagtggataacagtccctatgacagcagggcctggaaggagggccgtggggcccatatcatcgccgtatgggtcgctctttgcgtatccgctgtgcttggagggggtctctaaatttggcgtccctactgctgcaattggttggccgtgttgtttgcgtggggtgggtgatgtttggtgtttgcaatgggtgatggttaagtatgtgtttcttttctttttttagttattcgcttggatcaaatatatattgtgtgacaggggatgtttggctaattggaatcaattgctattatatgtaaggggtgtttgtactgcattgctttcaagaaattgaatatagtagcaacttaaatttggctt

SEQ ID NO: 93469 - DNA, 3851 bp, Zea Mays
ttatgcctgtatcttagcaatgtatttattgttgagactgaggatcctcatttgtttctcaagggtatgcaagtagctgccgctagagcattctcagcattgtgtttcattgcatataaggcccaacctcagttgatggaaaatgccagctttacaagtgatgtttctgagatacggagattggaatcaaatatatcctgcattctagatgaggatgataaaaataatgattgtttggttgtggctgtattcaaccttttgacatctgctgctcgttatcagcctgcttttcttatttccttgatagagcagagtacgaagtcaactgatcataatgcttccaccaatgatcgtgacaatagagttttggttacttcaaaaagtaatgctagacttgttgaccaaatcttggactatattgataggtccattgagctcatgaatagatctcccttggtgttactcagtattctggacttgttgaaggcactatgggaaagtggtatacgatttttgtttattttagagaagctaagaagctctgtaacattctgggataacttatcacggtgtattcgtgctacacttgatatctcccctattgacaatattgatgccattgacgagaaattttcgttaaggtaccattgtcagggtaaaatatttgagatcatgtcacacgagttatttttgcaaggaaaattgcttacagagacttctaatactgtccaagatgatccaaaggggcaaaaagagcataaaagtgggccttgtcgtatcagtgtagtcttgaaatggttcgataatgctattttggccgatctggtcagtaatttgtcaagtaatgcatacaaaaaggaacttcatcatgcaaaggtagctgcctgcctatgtatcatccatttaataacaaagttgtcaaccggtgatactgggagcttgtctttctcattcatgaagaaaattcagatcatatcaacaaaattgttgcagcaccatgcatttttagctctcctgtcacagtattccctgcatggatacagcggtgaacaagaacttaataatttggttctcaatgatctttattaccttatacgtggagaactcgaaggacgtcagattagctctggcccttttcaggagttgctcagttttcttcttgggtttagaatttttgaacacaatcccttggagcaactacaaaacacatacctgatggcaaatgacaaatttttatttgatgtggagcacatacatgacgagcttggagttgatctctggactgattcagacaagaggtctaaagaagtagctaaaaaaatgctggatattatgagtaaagcaaatttaatgaagtattatgctgatgcaaaactttctgcattgatgtccttcttgaaatttttatctgtctacaaaggagcgatttctaacaaaaacttggacttacctgatggaggcatatcagtagcggccacacaatcagcaattaaatgtgcatgtaaatcatttgagtcaactgttgattcactgctgcctcaagctcatacagatgaggttttgtttcccctcttgtccgggcaagtggaattattgcttactttggcccgaatattgtttcatcaagcaaagaacaagaaatcaagccatctctgtccagatattgtacttctaatgaaaacttcaggtgccagcacttgtttgtttgttgatctcatgccatctgctcatgctcttaagcaaccagtgaagacacttcttgttctgcttttgtcgtcatatgagttcatgtacagcaaggttgacataaaagacctaccaaatgatattaacatttttggcgaattagcccttttaagtgtgagcttgctacctatactgtgcaaattggcagagaatagggaatgctctgatcttgctgttgcatcaatggacctaatattgaagggatctgtaccttctaatttatggatgcctattctgcaaaagcattttcatctccagactatactgcataaatgccagaatggtgatttattatctactcaagttatacttaatttcctcttgaccttggggcgaacaaaggatggtgctaaagttcttcagtctgccaatatttttgcattcttaaagttacttttgagtcagttgtctctggatgactcctgtttgagaaattccttgagcgcccaagtgaaggatgtgaacctatggggcttgggtctcggtattgttgcgtccctgaaccattgtttggatgatgacatttctcataacaatgtcgtgagcaacactatcagcttcctttcaggacatgtgcctttggtgtcatcatatctgtctacacagagtgctactactcatcagagcaagaaacgggcattgtcgcagaagtcacagacatcgctttcagcccttagtcttactgagaatattctcatacttctatgcatcttggcaaaataccattttccacgggacactggaaagaaggaagtagattcagaactaagagagattattatccacctgctagcatttataagcaaaggaagtgtaaagactggcaatgcctctaaatggaactcatcgtttttctgccctgctgttatcaaagaggaagtagcgcttaatgagaaaccaccactcatttgtagcaagtatgggtggttcagatttgcagcaagttgtactttgtcaactgcaggtgtttcagtttctcccagtgcagctttatcagtggtgagacgggacaagacttcaggagattctgattctataaggcagactcgttttactgagatattagctgttcagatatacaggattgcttttcttatcatgaagtttctctgtagtcaagcaaaagaagcagtaaaaagggcagaagaactggagtttcttgacctcgcccattttcctgagcttcccatgccagatattcttcatggtttacaggatcaagtggtttgtattgtcactgaaatattcgaggcaaatgggtcaagcactctaaatcccgagacagagaaggtatgccagctcctattggtgacacttgaaacgtcactttacatggaactatgtgtatcccaatcatgtggcatcaggccagtacttggtcggcttgaagatttctgcaaaggaattaaggctatgcttcaagctatagagaagcactccagttttgaaccttttgtcaggtcgctaactgaaattacttctcttttgtatcccgggcttttgcataataaccttctcatgtgactcttgtaaattgtcactgttaaagagatgtgttgttggctaactttgaattgagccacatatggacttgcatactcagttgacgtcacccgaggaagcttcgttttcgcacgttactgtcaccaaagtaaagtgggttccagcggctacgaagcaaattcgcagagccagggcaccaaatcaaactgaaggcgacgacgcccgaggaagcttcgttttcgcatcacctttgttcggtttcacagccgaggctcccaaagtggccagagaatcttggtggacttgcctttccgggactccacactgccgaccacgcttattcacccgtgtaaattatgctgggattctcctttgctggctcgtctggccgatgtgcgtcccatcatcacagagaactagaaacaaatgatacatatgtagatgctatgcgttcttgatcaatcagacacgcatttttttttctgtagaggaatacatgttcggcgcgttgcatctttacactaccatttgtttgccttctccatcctgtttaagccctgtttcaaaacgctaccatgcaaattaaccctaagggataattt

SEQ ID NO: 93470 - DNA, 1014 bp, Zea Mays
atatatatagccatcgtcagctagctggctcaagtcaagctgagcacaagtgatcgaacaactacagtacatacactctatcgatctctgtgaattaatttagttattaactcgatcatggcgcgcccccaaaacaaccagaaccccagggtgttcctggtcctcaacatcggcggcgtgacggttggccgcgtcgtcatcgagctgttcgccgacaaggtgcccaagacggcggagaacttccggctgctgtgcaccggagagcgcagcgtggggaagtggtccggcaagcgcctgcactacaagggcgcggcgttccaccgcgtggtgcccgggttcatgtgccagggcggcgacatcacggcgggcaacggcacgggcggcgagtctgcgatcggtgacgcccggtacttcgccgacgaggcgttcggagccgtccggcacgatggcgccggcgtggtgtccatggccaacgccgggcccaacaccaacggatctcagttcttcatcaccttcgccgacgcgccgtggctggacggccgccacgtcgcgttcggccgcgtcgtggatggcatggacgctctgcgtgccatcgaaaaggccgggtccatcagtggcaggactatgaggcatgtcgtcatcgccgactgcggcgagctcaagcactaagccgccatgtcctaattattcaggatcatacttactctctaccaaatctgacactatctagtaggtatacgtatacttatatattattatgattgttgtttgttgctgctgctgttacaagatgcgtttgagactaggtagatgatgagcatatatgcgtgattattttcgggtcttgatataaattctcaagtgtgagacaggttaattctgtgtaattgtaataccatggttaatgaagttgctcgctgttattgcatttgttgccaataagtcaagtgatcttgttctttcctctgcttgtactggttccagaaactgtcattacacccaactgggcatgga

SEQ ID NO: 93471 - DNA, 481 bp, Zea Mays
gcttgactttaccactcaggttcttcggaaaggagcagatgctgatgatataatatcacctttaattgttttctcaattaaatacatcatgattaatcatgtgaactggaaacacaaggaatgtagtcgttggaagacaaccctacgggtgtttgaattggtgaaaagctgtcttcaagtaaaaccattctcatcaaagcttggtggcatcatttgggaaattctactatatgattcatctgtccacggtgtactctggagcatattatctgtactaacacgattactgcatgtaaggatattcttcctgttagtattaatgatcattagctttgtgacctttacatgataatctgtaaaatttttttcaggactcatataggagcaattatcatggtcttaaggatattgaagatatccagcttgtcctttgcaatggacttgatattatatatcacatcctgtccaatttaccagaggt

SEQ ID NO: 93472 - DNA, 267 bp, Zea Mays
gacctgtgcttcgctttgatgcatgttgacaagtcactggctgttcaaacatcaaataacttaggacaaattgaaaagcatgtcaggattgatattgctaaggtattttgcaattccattttcaaatatgtgcgagatgttaataatgctgacatattgtccaaaacctttggtctactagcagaaatgatgaaatgcgctccatatcacgtgtttgatgcggcgttcgagtgcaacatcttcacttcacaattaagtagtccatca

SEQ ID NO: 93473 - DNA, 476 bp, Zea Mays
ctcgaaagcgcaggagagctgcgcgaaaatatattaagaaggggaaaaaaggtccaagaaggaccccaagatacagataaggccgccctatggcggccaaaaacaagcaaaaatgaaaccatccatgacaaaaacactgctaccaaaacagcactacaactatctagctaacaggtagacctgggatgggggcagtaagcaaggacaacttctttgcaccagccataacccaaagatcaatctccaaaccaatgcttctaatagcagcagccacactaggactcttattgtcaaaaacgcagccattgcgatgtttccaaagggtccaaacaccaagaatgacaagagaattaagaccatttcttgcaaccccaggaatcttggtgctcaagtcttgccaccaatccataaaaaccccttcacaggactgatgggccaagtgttgtagatttacaagaagaagcagcttgaaccaa

SEQ ID NO: 93474 - DNA, 264 bp, Zea Mays
atggccgcggctgcagaaggccgccgcgtgctggaggctggagcaaaggtgccgcacactggaggctcgaggagagggcctctgcagcagccacacgatgaaggggggcagtcacgcgatggagcaacggacgcacaacaagacgaagggagaggagggcggcggcactggagaagggggcaatggagcaaaggcggtggcgctgagcagggagcacaccgcacaggtggcagcgactacagtgctgcgtatctaggactctag

SEQ ID NO: 93475 - DNA, 960 bp, Zea Mays
gatcccattcgagatgaggcttcattattgattagtgaagagatagacagaaaactgatatctatcattgaagattctttttcaactgcatcttctgtaaaagcggaagcggaatttacaatttctagtctggaagaaactttgattgaagttaacttgattcttgacatattgtttcttactttttatgataacttctcaagatgtaatggtagacagtggataactttgtgttcaatttttaaggacattctatgtggttcttatggtgtcgggaaatttgttgcatctgttgaggcaaagaattcatttcattatgctaaagctcagctacttctcatccttattgaaactttggactttgagaatctcctccggatgattcatgatgaagttcctctgagtggagggtgttctgcattttctgtcggtgatattctggagatggatgttgaaatatcaaaattgcctgaattttcattggtagaatcaggaccacttatactggcttgggcagttttcctttgcctagttctgtctcttccagaaagtaacaccaacttgggtcctgtttctggttatcggggtatattgcggacattcatttcagcattcatcgcttcatatgaggtatcttatcagaaagaacacagttcctttgacatgatttcgagtattttatgtgaagtttatgatggagaggaatctctctgtatgcaattttgggataaagatagctttgttgatggtcctatcagatataattatcttgagaggatgaatggagttacaacaatctataccatcccttgtgttgctgatggtgttggttatggccatcaaattgaaagtcatcatccagtcagcattcctagtattgaaggcattacaattccacaaggaacccatggctacattttgaaagttcttcaagaggataccacattagttcgctgggag

SEQ ID NO: 93476 - DNA, 351 bp, Zea Mays
atggctgggaagggggaatggcgagctggagacgaccgagaaggaggaatccgagcagggccagggcgcgcgcagggaggagctgaggagatgggcgcgcgagatccggcaagtcagggaacagggatgaccgacgagctgaagccgggcgcgagggacggtgcggcatggaagcagtcgcgccatgggagcagcgatcgagctaggtatcagagagagagagagagagagcactggcagaggaagagggaggagctggaggcgcggcgtgctgggagatggagagaaggagatgagctcggctggagagggcaccgcaaggaagataaggatggcgtgcgtagaagataa

SEQ ID NO: 93477 - DNA, 681 bp, Zea Mays
ctcctttcccagaaaaaccctcgttcagctgctacactcaccgcggtctctctctgtccatttcccgcctcctcgccgcaactagggtttcttaagccctcaccgcccatggcgagcggcagggcggctacatccagttccatcctcgtcaacgccgccggcaccagcaagaccctgtccgcatcgctatggtgggactccttcgtcgtcctctccgacgacctcgaccgagccactgctggcccctctgtcccggatgccctcgctaagcggatcaaaagccaccacgcgtggctccgagggtcggtctctatgttcgggaagccgaacgacgcgtccaggagcgcactggaagttggcgaggttgccgtcggggagcgtcgcctcactgtcaagccagagctcaaggaggccgcgcttcgtgcaagcaaatgcctgaacctggatgaagtgcaatcatacattctggtcaagagatcttcagaagtctctccaacaatccgtgatgctgatgctgaggagtttcttcatctggtataattctgaaaagatgttgattgtagaaactgcaatgtcaatgctgtagtgtagttgtcatttgattctatgcaattgcactctatccttccatgttgttttaagaaaattgcaataaaaagaaaagacatacttcaggcacaa

SEQ ID NO: 93478 - DNA, 547 bp, Zea Mays
tacagacttaattaatatcacaatacatatgttgggtagggaacaaacagagtacgaacaacggctctcactggcggcggtcgatggcgagcacaccgaagcagagaagtttgtcccagcaactacaaacaaccgcgcaggggacatgccgagaagcacacaaatggcacgaacgtgccaagcgtagcaaactgaacaaaagtacggggcaccgagcggacggaacggggcgagatcgatgacgcacgtacgcgatgagggggggtctgtagagatatacgcaagggaagatgagctcccggtgccgagagtcgacggcggagcagagcttgacgaccgatgcctcgacatcttcagtgaacgcgagggagaggcgagcggctccggcaacgcacgcgagctgggtgcgatgaacgggaaggagcgcgacgtcatcttgaaagaaatacgagcaggggcgagcttcgaccgagtcctccgtgagctcgcaaatggacgagcagtgacgggtgcctgcatggggaccgaacaagacgacaacgtgtag

SEQ ID NO: 93479 - DNA, 76 bp, Zea Mays
gctaatgctacttgattccaatttatttagaaacgacgcacactcattcatgactattatcgtaaatgaacaacat

SEQ ID NO: 93480 - DNA, 2013 bp, Zea Mays
acccaactccaaccagcacaacgaagtcccgcgcacgcaaagaagtcacgtccaaactgaaggtgacaacatggagtccgcgccgtcaacggcggcggtcatggagcgcgagcgcctcacggccgagctggccttcgcggaggccgacgcagagcctagcagcttcgtcgtcaagatccggcgtcggctgccggacttcgcgcgcagcgtcaacctcaagtacgtccgcctcggcctgcgctctggcgccatccctgcgccctcctcatgggtcccgctcgcgctcgcgccgtcgctcctcgtcgcggcggcatactcgctcgttggcgcggacaagttctactcactcgacctgctcacctgcatcgcgtggctcgccgcggcggtgctgctgctcaccgtgtatttcctcatgcgcccaaggccggtgtacctcgtggacttcgcgtgctacaggccgggcaacgagcacgccatctccaaggagggcttcctggacatgacagagagcacgggctgcttcaacgcggaggcactcgagttccagaccaagatcaccaagcgctccggactcggcgatcggacgtacctcccgccgggcatccaggcacggccgccgcggctgtctatggaggaggcgcgcgcggaggccgaggccgtcatgttcggctgcctcgactcgctattctcggccacgggcatcgacccacgccgcgatgtgcgcgtgctcatcgtcaactgcagcctcttcaacccgacgccgtcgctggcgtccatggtagtgcaccgctacaagatgcgggaggacgtcaagtcgttcaaccttggaggcatggggtgcagcgcagggctcatcgccgtggacctcgccagggacatgctgcaggcgaaccccgggtgctacgccgtcgtggtgagcaccgagaacatcacgctgaactggtacttcggcaacgaccgctccatgctgctgtccaactgcatcttccgcatgggcggcgctgccgcgctgctgtccaaccgccgcgccgacgccgggcgcgccaagtacaggctgctacacacggtacgcacccacaagggcgccgcggacgagtgctacggctgcgtgtaccagcgcgaggacggcaccggccgcgtcggcgtgtcgctggcgcgcgagctcatggccgtcgccggggacgcgctcaagacgaacatcaccaccctgggcccgctggtgctcccgatatcggagcagctcaagttcctcaagtccctcgtgctccgccgcgccctccgctcccgcggtgtccgtccgtacatcccggacttccggcgcgcgtttgaacacttctgcgtgcacgccggcgggcgcgccgtgctggaggaggtgcagcgcagcctggggctcagggacgcggacatggagcccagcaggtgcaccctgcaccgcttcggcaacaccagcagcagctcgctctggtacgagctcgcctacgccgaggccaagggccgcgtccgccgcggccaccgcgtgtggcagatcggattcggatccggattcaagtgcaacagtgctgtctggcgcgcgctccgcgacgtgccgcccgtgcacgccgacggcgccggcggtggcagcaactgcaacccgtgggtggacagcattcagagctacccgccaaaagagtacatctgatcgccatcttctttgtggtgaattaatcacgtcctgttggatcagttgtactagccgcgacgcagtagtgcacgagaactgtatgtatggtgattttttttttgtttcttcatcaggtaggagctgaatcttctttcttctacctttacatacagtagtgcatgcgagaacaaggcgttgccacgcattggattaccgagtgctgtggcttcttaatgattgcggaccggtagacgtatttaaattgagattatggtaagtatggtagatgaacaacaaaaaggagcagttgtagaatgtgaatgcgtgtaaattattccaccaaagattgtact

SEQ ID NO: 93481 - DNA, 681 bp, Zea Mays
atgtgcatacacatacacgcatatctacttgacttgaatggggacgtcgatcttcctgcgcgctcgctccgtgaccttgacgacagtgaccctgagcacgccggacttgagctcggcctgcacgccatccctgctgtaccccgccgggaggagcatccgggcatagaccacctcgccggcctggccctgctgtgccgccggcagctccttgccatctgcggtgcccctcctgctctgctgctgggactgcgagccgtactctgcgacgccaccgccagcagggctccgctggcccaccagctccttcctcttcttgatgacgagcacgtcttcgtcgatctccacggtgaggtcatccttggactgcccaggcacctcgaaccacaggttcaccttgtcggcgtcctcctccagctgccaccgttcctcacgtggtgccaccgggtgcaccagaacgaaggcagggatgttaaatggatgcagatccgtctttgggttgtgatcccctttccggccggcctcgcagcacacagaaagggaccggggcctccgtcgggaagccaccgccgccgccgccggtctcgcggaggagactgccggccgcactggggacccgaggctcagaaaggtgcaagaagtgaccgtcgacattgtcgatcgtactcgtacgtactgccttga

SEQ ID NO: 93482 - DNA, 660 bp, Zea Mays
gatctatgcaccagtttcaactagttggaccttacatgattgaacatggtgcatgtaccatttatcatcctctacctgaaaaaacttgtgacatttctgtctcagaaaagcgcttatgcgactcgaattatggacctctttgagcgggcacgacgccacgctgctcctattgaggaattccaatggcttggcttggtggcggtgctgtttattgtcgttccattcctaggtacaagagcgtggacaggggccatcattgtatcagtattaagcatgtcattttggccaagtttttagtacaactattgtctgaatctggcaaccctgggtcctgcatgggctgggtgacgatgcagatgtcatttgggatgattccactgaccctggccttgggttcaagagagactggtacatccagcttcagccattctgggtgtacccgagcatgttctactcagatggacagtgatccgtgcccgtcctgtgttccagaaatttttgccttggagttgtttggttagggaagacttctatatttgagtagatgatggcactatggtactgtatttgagatttcatttgtgtgtaatcgttaagtgatgtgtctgttttgaggaaaatgttgatgtatgcttttgaaatttatatgaagatcagttt

SEQ ID NO: 93483 - DNA, 1233 bp, Zea Mays
gctgtatctggtggacatgagaatggttttttctcccttaacagctaactcctagtgacttttgcacttgcagagtggtagagagcgtgggcgaaggagtagaaggcctcgccccaggagaccacgtcgttccgatcttcaccggggagtgcgagaaatgcgtgtactgcaagtccgacaagacaaacctgtgtggaacctaccgtgtggatcctttgaagagcagcatggtctacgacgacggcacgaggttctccgtggtggaccaggcgtcaggccagcggcggccggtgtaccacttcctcaacacctccaccttcaccgagtacaccgtgcttgacgcggcatgtgccgtcaaaatcaaccctgaggccccgctgcagaggatgtgcctcctcagctgcggcatctccacaggagtgggagctgcgtggaacactgcaaacgtttctgctcggtccaccgttgcagtgtttggactcggcgctgttggtcttgctgtagctgaaggtgccaggctacgaggggcaactcggatcatcggcgtggacgtaaacccttcaaagttcaccaaaggtaaagagatggggataacagacttcatcgaccctaacgacatctgtgacaaaccggtccatgaggtgatcagggagatgactgacggaggtgtcgactacagcttcgagtgtaccgggataaatgatgtgctgagagaggccttcttgtccacgcatgatggttggggcctgacggtggtgctagggatccattcaacgcccaagatggtgccgctgcacccgatggagctctacggccgtaggatcaccggctgcgtctttggcgacttcaagggcaagtcccagctgcccgacctcgtcgataagtgcgtcaacggggaggtcaatataaacttcgatggcttcataacacacaagatgccattctcgtacatcaacaaggctttccggttactcgaggaaggcaagtcgctgaggtgcctgctcagtctctgatcgacaatacttcatcagcgaggacagttttggattattgagtagcaaaataaatgtacaaggaaagtttttccctagtacattcgcttcttataaaacgaatgcatgcaacttctttcgttctttgaagaagacaaaagggcacaattattctggagcaggtattgctaatcattttatcgctggttcactgccgaccaggacaacattcaggcagctt

SEQ ID NO: 93484 - DNA, 1528 bp, Zea Mays
tccttgtgtagctcgccacctcattagagccaagaagccaatttcctttcccaaaaacaaaaagaggcaccaagggagaatcagcaagacgacaccatggcagcggcccactacggcaacggcagctcgacgagcggcggcggcggcggccgtggccgcgggaagcccatcacatgcaaagcggcggtggcgtggggtcccggagtgccgctgtcgctggaggaggtcgaggtggcgccgcctagccccatggaggtccgcgtcaaggtgcttttcacctccatctgccacaccgacctcagcgcctggaagggagagtgcgaggcgcagcgcaaataccctcgcatcttgggccatgaggcagccggagtggtagagagcgtgggcgaaggagtagaaggcctcgccccaggagaccacgtcgttccgatcttcaccggggagtgcgagaaatgcgtgtactgcaagtccgacaagacaaacctgtgtggaacctaccgtgtggatcctttgaagagcagcatggtctacgacgacggcacgaggttctccgtggtggaccaggcgtcaggccagcggcggccggtgtaccacttcctcaacacctccaccttcaccgagtacaccgtgcttgacgcggcatgtgccgtcaaaatcaaccctgaggccccgctgcagaggatgtgcctcctcagctgcggcatctccacaggagtgggagctgcgtggaacactgcaaacgtttctgctcggtccaccgttgcagtgtttggactcggcgctgttggtcttgctgtagctgaaggtgccaggctacgaggggcaactcggatcatcggcgtggacgtaaacccttcaaagttcaccaaaggtaaagagatggggataacagacttcatcgaccctaacgacatctgtgacaaaccggtccatgaggtgatcagggagatgactgacggaggtgtcgactacagcttcgagtgtaccgggataaatgatgtgctgagagaggccttcttgtccacgcatgatggttggggcctgacggtggtgctagggatccattcaacgcccaagatggtgccgctgcacccgatggagctctacggccgtaggatcaccggctgcgtctttggcgacttcaagggcaagtcccagctgcccgacctcgtcgataagtgcgtcaacggggaggtcaatataaacttcgatggcttcataacacacaagatgccattctcgtacatcaacaaggctttccggttactcgaggaaggcaagtcgctgaggtgcctgctcagtctctgatcgacaatacttcatcagcgaggacagttttggattattgagtagcaaaataaatgtacaaggaaagtttttccctagtacattcgcttcttataaaacgaatgcatgcaacttctttcgttctttgaagaagacaaaagggcacaattattctggagcaggtattgctaatcattttatcgctggttcactgccgaccaggacaacattcaggcagctt

SEQ ID NO: 93485 - DNA, 692 bp, Zea Mays
gtttttacgaaattagcgtacactgacttgaaatgaaatgtgtccaggtaaagagatggggataacagacttcatcgaccctaacgacatctgtgacaaaccggtccatgaggtgatcagggagatgactgacggaggtgtcgactacagcttcgagtgtaccgggataaatgatgtgctgagagaggccttcttgtccacgcatgatggttggggcctgacggtggtgctagggatccattcaacgcccaagatggtgccgctgcacccgatggagctctacggccgtaggatcaccggctgcgtctttggcgacttcaagggcaagtcccagctgcccgacctcgtcgataagtgcgtcaacggggaggtcaatataaacttcgatggcttcataacacacaagatgccattctcgtacatcaacaaggctttccggttactcgaggaaggcaagtcgctgaggtgcctgctcagtctctgatcgacaatacttcatcagcgaggacagttttggattattgagtagcaaaataaatgtacaaggaaagtttttccctagtacattcgcttcttataaaacgaatgcatgcaacttctttcgttctttgaagaagacaaaagggcacaattattctggagcaggtattgctaatcattttatcgctggttcactgccgaccaggacaaca

SEQ ID NO: 93486 - DNA, 1849 bp, Zea Mays
tttgtattagtggtgttttagaattcgcagcttttactaagtatctagatataaatctagaaatattaaacgcatctgcctctaaatactgtataattaaaaaacaaaattgaagaaaccgtcggccaacgcaaggaaacgaagaagagaaaaatgaacaccattatgctttggttcctctgcctccacctgtctcgcccatcactatataaacagtccaaccggctagcctccacttgtctcgctcactagagccaagagctccatccatttcatttcctccactctctaaaaagtagaccagccaggggagagaagtgaggcatcgaaggaagcccccaccatggcggccaacggcaagagcagcttggcgaacggcgcctccaccgggggaaagcccatcaaatgcaaagcggcggtggcgtgggggcccggcgagccgcttgtgatggaggaggtggaggtggcgccgccggggcgcctggaggtgcgcgtgaagctgctcttcacctccatctgccacaccgatctcagtttcttgaagggagagaacgagctgcaccgcaagttcccccgcatcctgggccatgaggcagccggagtggtggagagcgtgggggacggggtggaggatctggccgccggcgaccatgtgatccccatcttcaacggcgagtgcggggcgtgcgcctactgcgagtccgatcggacaaacctgtgcgggacctaccgcgtggacgcttccaagagcaccatggtctctgacggcggcaccaggttctccgtagcggaccgcgtgtccggccgcaccgtgccggtctaccacttcctcaacacctcaaccttcaccgagtacaccgtgctggacgcggcctgcgccgccaaggtcaaccccgaggcaccactgcaaaagatgtgcctcctcagctgtggcatctccacaggagttggggctgtatggaacacagccaacgtttccgcgggctccaccgttgcgattttcggccttggcgctgtcgggctcgcggttgctgagggtgccaggctacgaggggcagctcggatcatcggtgttgacataaaccctgaaaagttcaccaaagggagagagatgggcgtcactgactttgtcgactccagggcctctgacaaaccggtgcacgaggtgatcagggagatgacccatggaggtgtcgactacagctttgagtgtaccgggatcaacggcgtgctgcgagaggccttcgtgtccacgcatgacggttggggcctgacggtggtgctggggatccatgcgacgcccaagatgctgccgctgcacccgatggagctcttcgacggccgtcggatcaccgcctgcgtcttcggtgacgtcaaggggaagtcccagctgccggccatcgtcgacaagtgcgtcaacggggacctggatataaaccttgacgggttcataacacacaggatgcccttctcggacatcaacaaagccatccagttgctggaggaaggcaagtcccttagatgcgtgctcaacctctgatggacatggaccgaccaccacacatgcatgcgtgggagattattgtccttggttagtttggttactacagaaataatcaaataaatatagaatccgcagtgtgtgtcgagttgtacaattcacgtgtgcaccagtgctactttattgtaaaggagggtgtgattgaagccaactagtagcagcagggcacaagtgttgtttctatcgtacatgtgctgtgatgtctcaaagttatctcggttctcacaacacaacttattgtcataaaatatgctgatctttgattttacataacaaacttgtttcgct

SEQ ID NO: 93487 - DNA, 101 bp, Zea Mays
ccgtcctgggatgccaggggcagatgagctcgcgaccgttgatttgaactgggcggtgttggggacttgttctcaaatgctatgaatcaagaacaaggcaa

SEQ ID NO: 93488 - DNA, 775 bp, Zea Mays
acatctattcacccatccattcgttccttcgtctctacgcacaaatgagagaaggctaggtcgtcgtcgttgtcattgtcgtcgtgacgcggagagatctgggaggaggagcgatggacgggaagttgccgccgccgaacccgaacctggcgtactgggaggactgttggagcgagggcgagaaggtcgcgcttgtcgacgcctggggctcgcgctacctcgacctcaaccgtgggagcctccgccagccgcagtggcgggaggtcgccgacgccgtcaactctcgccccggggcctccgcgcgccgctgcctgccgcgcaccgacatccagtgcaagaaccgcgttgacacgctcaagaagaagtacaaggtcgagtgcgcgcggcgggccatcgtcgtggaacttctacagccagttcgacctcctcgtcgggcccacgctcaccggcatcaagaagttgtccccaccgcgcgccgcgctgcctgtgttctggagggggcactagtacaaagaagttctatagtggcggttgtaaacctatttatagtggcgtttttcgtaaccgccagtgctaggggccagtagaaatcatcatttgtacaggcgggtaactgaggaccgccagtgaaaatcgattttcactggcggtcggcgtaataaaaccgccagtgaaaatcgattttcactggcggtcgacgtaataaaccgccagtgcaaatcgtttccaggaaacataaaacatattttaaaaatagttaaaaaatttattttta

SEQ ID NO: 93489 - DNA, 345 bp, Zea Mays
atggcagcgacaacgaagagcatgtgcctccagggacctttccgcgtgacaccgctggtggacgccggcgcctgtggcatggagccgggcacccggcggaagcgggtggagggggagaatagtggcagccgtggggacggggagcaggaggaggcgaggacgaggctctccatgccgttgggccaaaccgcgctacatgacgcactaaggtctctacatcccatgcttgctcacgctaggtatttgctcgcgtggtgccgtggcggccaggagataacgacggtgttgagcagcgagaaaaataagagggagagagagagcgacgtgaggatagggatgggctag

SEQ ID NO: 93490 - DNA, 669 bp, Zea Mays
atgtttacacaggaaaatgctgaagaaataaaggcgactttaggagttcctcatatgaagcctgagattggtacccaatcagcaccaatttttgctgagaatgttcctgatgcatctatgagatttcggaaattgaacttgttaaacagaactgttcactcctacaaactcccaacgccagctgatgacaagaaccctgcttcagtaattcccaacaaatcgcctcattcagatcaacccgagagtaaatctcacgtggcagtaaatttgtggcattcctctccactgggtaaagattttatgtcgaattccatgcatagtggacctgttaagatgtcatcaagtaacgaagggatatcactagcttattcctactccacgacatattttaagaaagtgaagagggaagctttttctggcccaatcccaagcaaggtaggattgagcaaccccctgttttctgcaactgatcgcaaaccgccagggaagcgcccttcctatgtgttgccaacaaggcctcctggcccaggttggcagtcatctgtgcctccaaaagctacgcccaggtgggggaagcggatctcaagccatttatatttacatgtaatgcacagaaaaagttgcgcgatttgcaacagaaattctccgttgtctggttcccagttttag

SEQ ID NO: 93491 - DNA, 447 bp, Zea Mays
atgggaaccaaggcgaggtcgcggctaacagaggagcacggtgtggaggtgagctgcagtgggcgtggggctggagacgaccgagagagctccacggcgatgggggcgctaccgaggtcggcctccgtgagctgcgaggggaacgacgacgcgcaggaagacggagccaagccatggagctggaagccaagcgagcagataggggcgaccatggctgggaggagttgggaggtggaagataacggttgggcggcggaaggcaaggcacgactagggatggagcttggcacggatgaaatccgagcagggaagcaggcgggcgtgggaggaagacgatggagcgtggccagggataaggccgacggccaacacagtgaaaaaaaatcagaggagaacggtgagcggtggaagaaggaaaaagatctctacgatggcggtagtggatag

SEQ ID NO: 93492 - DNA, 734 bp, Zea Mays
agtactgtgctaccgggtagcgcggaccggttcacgttgtggaggatctgtgggaatggttgacatatgcaagggttaagtgctacatatgtcgtgtggttagaaatcctcagctgagtaaatcgattcggatcgccgttatatccccagagagaggagacttgatcactgacctgcaacctaagtcaggatgtaaacattatgagtaaaaatgatgttgtattgatgagatggtgaaattattctaggtgcaaccagagtctattaatatttaatctggcgttaaaatattgaaagtaaggactcactttagtaagctatttctgcaaaagtatctaagttgattcttgctaagagcctctccttgattcctaaatccagcatatccttaagagtcttttttcttagtcgggtaagacttgagaaagtacacttcgtactcagggctttgtcccatgttgttttaggtgaagagcctacggagctttgctacttttgtgcaaaggtggttcccaagcagaaggaagaaccaaaaatagaagtgtgttgctgtggatggtgctaagtatcggtgggctcggccttcttataagtctaagtacctcttctatacttcttattgaggatggtcacttaagctagcatatatttcaaacttacaagtattttataacattttaaagtttatttctttgaatcactttgtaatcactctgataaacataatgtaaatt

SEQ ID NO: 93493 - DNA, 103 bp, Zea Mays
tgtacctgccaagcgctcgacaaattgtctagaccggaaaatcattaccgatctcgcggattcgagtcagatattggaacggtgagctgctttgctattttta

SEQ ID NO: 93494 - DNA, 825 bp, Zea Mays
ttcctgtgcgctccctctgcccatctcaatggccgaccgcacggcttccatggcgcacgctcagctccagctcggcctccttcccctaatctctcatcaccgcgcgccctctgctcctccctactggccagcgcccagcgctgcgcctagctccctcctctcaagctcccatgccgcgcgctgtgcttcttgctcgccatggcctcgccaaaaccccagccgatctcctgtttctctctcccgcggtccctgacttcccatcgccggagctccctgtctcgtctttggtactcgcctggccgcgcccttgcttcccagtcccagctcggagctcctagcgccggctcggagctcctagcgccgcggcttcctccttcagctcggcgctcatctccctctctgctcggaccgcgcccagccccagcgccctcgtcctcttttctgcgcgcgcccggccggagctctgctctctctcgtggcacccagaatttcccccgcacggatctctctcacagccgcgcccgctgcttgctccccatggcgctcggtctctaccgcgcgcccagctcctgtgcaccgcagttcgccccagctcggcgtctgcttctctgctccctattctgcgcgtcggtcgcttcgcttctgcgcgtagctccctggccgtcgcgcccatgccggccagagctcgctcggtcgcggtctcgtcccggctccctgctgcgctcgcccagatcgccgctgtcgagttccatcgccgagtgtagctcctgttgctgcgtcctcgtcgcgttcgtgaaactgccgtggaattgcattcgtttttca

SEQ ID NO: 93495 - DNA, 104 bp, Zea Mays
caatttgatttgaaatcaaataatttcatctgcagtcaacacccgattccacgtcaacagataatttacgtggagaatcgaatctcaattataaattctcagac

SEQ ID NO: 93496 - DNA, 3548 bp, Zea Mays
aaataaattaccgtatttttttcgtctcatcccctctccatttctttcttggtttcctcctctatctctcgtctccctccgaccgaattaaaacgctcgacctgccaagccggactgaaccctaggccccgatccggcgtctcgccgtgctgcttggatttgatcgggcggggttggggtcgtatcggcggcgggatgaccatcccgagcgcggaggggttcctccaggcgtcgagctgcctcccgtgcacggcgacggaggagcgggaggtcgttgacgcgcttaccaaggaggccgagaagaatgtcaagcacggcgatctccgctatctcgtctcgcagagctggtggatggagtggcaaggatatgtgggtctagtcaattatggagaaagtggcaccgagcagtttcctcaggccacaaatagacctggagagattgataactcgaagcttgttttggcagaaaggatcaatggtagtgaggagccagagcttcaaaggaccttgagagaaggggagcactatactttggtgccgcaagaagtttggcaaaggctatatgaatggtataaaggtggaccagaaatccctagaaaagttatttttgacaatccaactgacaagacttacgtagtggatgtctaccctctctgtctaaaactaattgatgcaagggacgactctgagaaagtttttaggataagtagaaaggccaaagttcatgagctttactcaatggtttgctcgctcatgtcagtagagcagtctgagattgtcatctgggattattatcggaggacaaagggcaaggagttgactaatcaaaatgatacactagaagaagctcaacttagtatggaccaggagatcctcttggagatgaagctaggcgggggcagttcaggtttcagtgcaagatccacaaatgatgaattggcattaattccattagaaccctcaacatcatcattttctattgctggagggcctacattttcaaatggtttttcatctgggattggttctagtttttcgcaagataatagctttagtcctttattaagggatggagaagatggttacaatagtctcagcaatggaactaaagatgacactcacggattgagtggattacataacttgggtaatacatgcttcatgaatagtgccatacaatccttggttcatacacctccattggtacagtactttttggaggactatacttgtgaaataaacaaggaaaatccactaggcctccagggggaacttgcaatagcatttggagagctacttagaaaactttggtcgtctggtcgaacttctattgctccacgggcatttaaatcgaaactttctcgatttgccccccagttcagtggatataatcagcatgattctcaggagctacttgcgtttctgttggatggtctgcatgaagatctgaaccgtgtaaaagagaaaccatatattgaggcaaaagatgcagatggccgcccagatgatgaatttgctgaagaatgctggaattaccataaagctcgaaatgactccataattgttgataagtttcaaggtcaatacaagtccacattggtgtgcccagtttgtaacaaaatctctgttacctttgatccatttatgtatttgtcgctaccattgccatcaacagtttactcggatgattactgtaactgtattcagtggtacgggagatgttcttccaatgccttacactgtgactgtacagaaaaatggaaactgccgtgatcttactaaagcccttgctgatgtctgctgcttaaaaaattctgagacattgttgcttgcagaggtatacgaacgtcggatctaccgctacctaacaaatccaattgagggacttcatatcataaaagatgaagatatacttgttgcatacaggctccctgttggtcatgaaaaacttttgaggttggagattctgcattcgagggcagacagatttcttgtggagcctcagtttaatatcaataggaagctcattgggtgccccattgtgacttgtattccaaatgactctactgcaaaatctgatatttatgcggctgtatcttctgtcttggttccatttgtaagagcaaaagcacatagccctgatgtgtctgctgtcaagttaaatggcaatgggccaagtttggacggtattgtcctgaccgataatggcaccaccagtgaggagggtctctctacatcaagatcaagggaggacgataatgcagctgacaatgagcttttaccgtttcagctttcattgactgatgaaaaaggtagtacaagaaatgctatagacatggattctaatcgtgttctaggactagttattagggttttgatggattggggtgagaaagagcatgggatgtacaatattgatcacatggatgtacttcctgaagtcttcaagcctggttttatgtcaaagaagacccgtcaagaagcagtcaatttattttcatgcttggatgcttttctgaaggaggagcctctagggccagatgatatgtggtactgtcctgggtgcaaggaacacaggcaagctagcaagaaactggacttgtggaggttgcctgagatattggtagttcatttgaaaaggttctcgtacagccggtatatgaagaataagcttgatacatttgtgaactttccgatccatgacctcaatatgagcaagtatgtgaagcctacatcaagaggtgaccagcaccccgtgtatgaactctatgcagtgataaatcattatggcggtctcggtggtggacactactctgcatatgcgaagctagttgaagaggacaattggtatcattttgatgacagtcatgtttcctctgttaatgaggatgagatcaggcgatctgcagcatatgttcttttctaccgacgagttggaggttcaagtacagcggcaaacggtggtccagttgacattgaaatggttgattcgctagagacatagttccccagatcaaagcctgagtataacatgtggatcgagatatggagatcagaagagttatggaatttgcatgtctgctccggaatggaatatttgtgtatgaagcctttgacattttgaggcatggcagacaactgaggtcgaaatagcgtggtagcttggatctgcacatctatatgattgagggcctggtgtttaggattataatctgcccagattatataacctatcttattttgaactaagtgttagttcaaaataagttagattatataatatggacaaattatattcccaatcaaacaggctatgattggacttactgatacccatttgagtagaactgatcttgacaggtatccgagaaaacgatgaccttaattgaaaattttgctgatacgctgatgcagcacttagggtctactattgttattggtgtagccaagggattgcaactgggaaaaatggtgtaaaaacgctgcatatttttttttgcctaagctacagctgtgctacagcaaattttgattacggttgttttttt

SEQ ID NO: 93497 - DNA, 813 bp, Zea Mays
gggcatcagcccccacgccagaagctagggcaccgtccccttgatgtttcccatggtgcctctcctgtatttctctggccgtcagctacggcgctcgtcgtaggcgctgcctgccgtgcccctgtccagttctccacgtcgtcactgagctcgcccctgcccaagtccggtcgcctctgttccctcctctctgtgcgtctggtggcaagtcaccgtcgaccctgccatggtgctggttgccgcagcacctgcgtccttgcttcgccagtccgcctaggtccgaccatggagctcgcccaactccctagtcacctctgctcgccactctctatctcagtttgagcagcagcacgctagggcagacctatgttcgcgacgctcgccaagtgctcgatgaaataccgtagcgagctccacctcgatctgcgcagccccaactcgcgacgtcacaatacccttgccctccatcgatgttgcgcctcgcgcatcgcatgctcgacaaaaatcccaagcccgtggacagcacacacgcgacccgagtttgattctgccaggttgtttaatgtgattttctatccatgcgatttgtcgatgttgtgtatatgtgtggttgaacggagtacgcgaaggatgaattagtagaatctgtcggtgtcacttgtaaatttgaaatacaagcgagtacatatgcgtgttacatgtgtgtttataattctagtgctccaaataatttgaatgtaattagtaaatcaaatgttggttctcatttggttgtttgaactctaatgaattataaaatgatgaagtatttct

SEQ ID NO: 93498 - DNA, 642 bp, Zea Mays
agctcagctcaccaccaccaaccaaccacaccttcttcccatataaccatccatcgatcagcagcggcaactcaaggccggccgctggggagtttggagcagacctctagcagccttgcctctgtagctaggaattgtagtagagggggtgaaaaagaagactagaagaagagggccatggcgacctccttccagggaaccaccaccaagtgcaccgccgacaaccgcgtctaccacaaggcctgcttccgctgccaccactgcaagggcacactcaagcatgtgcctgtccataccataccaaatgttcccaagtacaggtacttgttcccaaagactcgcccaatccgtgcctcccacctccagttgccgggttctgagaccggacaaggaaacccacagatggacatacagtggtctatgccccctagaggacagattcttcctcctccacaaccaggtatgggatattggccgccaccaccatggggatatcctacacatccaattgggccttggggacgccccccatggccaacacagccacttccgtcaccagtggataagacagctagtatggccaaagacttgtgtcgttgtgctttcaatctgttgactggtgcctttgtcatattgagctag

SEQ ID NO: 93499 - DNA, 1231 bp, Zea Mays
acgaggagttctattttttgttggattgatattattaccagtgcacaatttacaattttgtaggtttcggcggtcccttagagttccaccgacacaacccttggaccaacgtagggtcataaaccctacaggagagaggagctgggtggaggtggcatggagtggcacaggtcaccgaacaccggttaacacagtgctgggatctatagctcgttttcactatccaggggtggtacaactcaacggggcaaagataggggcgtatcactgggctcactggggcctcaaaccatatggacccgaccgtactcaccaagacgcggtgtggtcatcgttttgggaacaatttagattggacgaaacagcaaacgaagaacatgcaaaacgtgtattccacaatgctgctagaaaagttataaatggttcaatgtcagatgcacgggtcaaagctgttaccatgtacttcaagaaagtgaagggtcaaagaatgaccaacaagcaggcatgtgaaatccacttgacagctgaggagtacaaacaaagtgaagtggactggctcactgctcatcctgaagcttgggtcaagctctgcgagtactgggcctcagatgcgtacaaagtgatttcagatagaaatcgtttgaaccggaagagcaaaccgggcctccatcgatttggagcagatggatttattgggaaatcacaacgaatggaggctcgtgatggtgttgaaccccgattcattgacgtttacatggagggacaccgaggtccagatccagagcatccagaagttttatgtgacgacagcgcgacagaaaagctgactcgttatgccgaggaggttaggaggaaagcaggagacgatgatctagattggagggaggcacctttcgatccggatgcatcatatgttgctggtggtgggctaccacgtgggaggttggggatcggtgatggggttgtgagtcgcgatagctttggtcgtcggtctgtttcctcggtggggagtagatctcgaacttcaacttcgagggaatcagagcttgatgagcaactaaggcagcaacaacaacaagttcaacaactatctcaacaagttcagatgatgcaaggaatgctgatgcagaagactatattagaagaggaaaaaccagaaaaggctagcccaacggataacttcacttttctcatgtccgttggggtggccttgtcttctgttcttttttaa

SEQ ID NO: 93500 - DNA, 957 bp, Zea Mays
gttctaatcagtgtaaacagatcgatgcgacctttgcttgttgaagaggcttgtatggactttagtgagatggtagaatttttctcgtacgaattattcccttgcccagctgtatacgtagagaggcacagctgtaccattttgttttcttattgattgcatctccgtcgacctaccagctgctagataggcatgtactattctgactgaccgccccgttcgtctctcaatctctcctcatggctcgctccaagctctccgtagaattgttgctggcattgctcgtggtcctcgccgccggcccggcgatgcgactggtcgaggcggcttcggcgcacctgcacttttacatgcacgacgtgacgggcggcccgtccccaacggcggtgcaagtggttagcgggccgcggggcaacttcggcaacaccatggtgatcgacgacaagctaaccgaggggacgtcagagtcgtccacgacggtgggacgcgcgcagggttactacatggtggcgtcggtggcgaacctcgagctcctcgtcaacatgaatgtcgttcttacttcgggcccatacgccggcagctcgctcacggtggtgggccgtgacgacgtcagcgtcccggtgagggagctctcagtggtcggcggcacggggcagttcaggatggcgcgcggctatgtgctgtggaagaccgtcacccccgcgattctcgacctggagatcttggtcaacccttcttgagcctaccaggcaataatggtatgattcctgcatacatgtgaaaaattgattgggtgaactgtcaagtgtgtgtaatccttttcttttcattcggtctgggagcaactacctgcactttatgatttgttgagcacatatgtaagtgaatgagctatggttctgttggttaattggctggtttatttgaggacctatatatacattctatcgacgtagt

SEQ ID NO: 93501 - DNA, 2508 bp, Zea Mays
atggcgcttcccctcccgcctcttggccaccctcctccaccccttcgcctccctcctctggccggcgcctcagccccttcatcccacagcctcacgccggttcttattccaaggccggcggccactacccttccctccccggcgtcggccgcttcccctatcccctcccgctccccaggttccttgcccggtggacgttcgaaagctcagcggtggagagaggaaggcggttcgtcttctgctgttgcgcaggatcgcagtgaggtccagcgctccttcaaggatgtgctgttggccgtgaagcctcctgcccctggtggtgctggcggtgttgatgctgatgatggctgggtgagagttgaaggtcgtcaggctcgacgtcgagcttctaaccattcgaagcccctccccaggcctgtccctgtcgatttgcgcggggaagtgctcaattgtttctcgccttcccatcgtgcagctgtgtcggaacctggttcgttgcttcttctgccggcggcctggggcaccgagcgatcgtggtgccctgccggcggaacggccttgccccctccgcggcgtgctctggtgtggcgcccggtctccaggaagcccccttcaacagattctcctgccggtgacatggagggatgctcgttggccggcatggctggcccttctggaggcttgaagaaacgcactcgtcgtggtcagagaaggaggaagactggtcctgagggagggcatcctgttctggtggcgcctccacccacgcctgtgagccccgctcgacatgtaaggatcatcgggcgctccagggaggttgatcgggccgaggctgaccttcgtcgggcgctgatcgtcacagttcttggccacatgagttctgatagcgccgctattgttctggatgcgctcgcctcaaggttttcttttgaagctgatgcgctccatcttcggcgtgctgcgtcgaactcttttctggtcttcttcccctcagaggatcatgctactcgtgtcttcaatggtgggcagtcgcttttcattcctcctgtcaggttgcacctcaagcgttggtctcgtcaggccttggcctctagtggaagcgccctgcctctgctgctggatatcgagctgagggggattcctgcccacctctgggagcttggtactgctgaagttcttttgaatgggttttgtctgattcaggaactgcacccagaatcagtggagggcattgatatgtccgttctcaagctaagggcgtggagttttaatccggattgtttgccccctgttttggatcttcatgttcaagagcctcttgttgagggggaggatggtgccattttccctcgctctttggtatatcctattatagtgaaggttacccgctccggtgtttggccggaggggagcttgcctccgcctccgccatcacctccaggtgatgtcgacgaagaccatgatcaagatcatcagaggcggcggctgcttcagcatggcccctcggcttcctcgtttcggacctcggtacactcgcggctgggcccgcgtgccccttcgtcttcggtggctggtggaccagttgatgccgcaattctcccgtctgcttcgggtgaagagttgacggcgcctgtgtcttccagtccgcttgtttcctcggttcagatgttgggagcaccagttgaggccgctactctcccgatcacctcggtcgtagagttggcggcgcctgggccacccccaccttgcttggacgcttctccggcggttcctccccatgtggtggaggcatcgcgtgctgttggctctcacgcccaggatgttcctgtcagtttggatgaaaggagtttggtgtctacctcgctgccctctgctggcttggaagaccacaggatgttggcgtctttttttgaatctcgcttttcttctgaagggtttgtccccagtttgaatgggctccccgctgctggctctcagttatcttctgcgggctcaagggctgttgatgttgaattgggttttcagggtgattgcagtttagaggcattgagttctatcatcgatctgcctatggggccagctatgcctttggcatgcaggttgaatgccaagccaccttgtttcaaagtatattctagaaggaagaaggctattgtggttgaggagctgatgctgtctaccccattgcaagaattcaaagatggtcttacaaagccgactgatgagctgttgccccctcctgctctgattgtcaagcgaagaaagatgatgcctagcaatttcaagcctaggcgtagcaggagggtggcaaagtttccccctgaattgggatctgacgctgctgctaaagtatgcaggcatttgggtttctgtgatgagcatgaaaatatttctttccgagatgctagtaattatgctaggctgtttcattcaacactgtccagggatcatgttgctgccctagcggctctgtttggctgggaggtgccccatgtggagcagatctga

SEQ ID NO: 93502 - DNA, 1241 bp, Zea Mays
gttcgatttgttattcatcacagccttagcaagtctatggagacatactaccaggagagtggtcgggccggacgggatggattaccttcagaatgtattttgtattatcggcctggtgatgttccacggcaggcaagtctatatttattgcttctcttttaatgtaattttttttctgtttttttaccactatatatgtcatatatatttttggaacagagttcaatggtgttctatgaaaactgtggcctgcaaaatctttatgacatcgtgcggtattgtcagtctaagaggagttgtcgtcatggtgcattctttcgccattttggagaggtccctcaggactgcaacggaatgtgcgacaattgtgcttccactattgagcagaaggatattgatgtcacctaccatacaaaaattatagtttcacttcttcacgatatgcaactttaatgatcaaagagctacactactacagctggtggataagttcaagtcaaagtggaaaggtttaggtagtttcaatgaagctgttgatcttagaaaagaagaagttgagcagttgatagttaaccttatactcgacaatgttttgaaagaagaatttcagcacacagcatattcaaccaacgcttatgttaccttaggagcattgtggaagccagcactacaaggaaacagagtagtcaagcttgagattgctattgcttctaaagatagagatgttagatccaagggcgcaaaacgaggtcgcatgagtgatttggaagccaaactagatgaactgcgtagggatctgtcatccacgggtagcgatgccatatttccccatgcagttcttactgcgcaacaaatttcactactgagcagccagaagccaaccactccagctgagctagaaaaggttatagggaaggtgaagacaaggaagtacggcagcaagatcattgagctgatgaggtcacatgacaattcaggaagtggccgaggcaaggaggctggcgatgaacacagagctaagaagatcaaaacgaaggatgaggatgttgtttgtgttgagagtagcgaggaagaatagaatatgcccttcacatacttggctttttagtctatcatctcatggttaattattttgccaatcatttcctccgacgtcatctttctgtaatttagactttcacggattaatgcacagtcatatttcttacagagaaagcctcgagcatccttttgaccggttc

SEQ ID NO: 93503 - DNA, 735 bp, Zea Mays
gtttcttctctcaatctttccacgtatatgttgtgttggggattactagataatatgcagtgacttagtagttcctattgctgacagttcaataagcagaatttatgcacctatctcaaccattttctgtaccatgctaatgctttagtttgcaattaattggattatggaatgtggtgatgagtatgttgcctactacacaggaaacagagtagtcaagcttgagattgctattgcttctaaagatagagatgttagatccaagggcgcaaaacgaggtcgcatgagtgatttggaagccaaactagatgaactgcgtagggatctgtcatccacgggtagcgatgccatatttccccatgcagttcttactgcgcaacaaatttcactactgagcagccagaagccaaccactccagctgagctagaaaaggttatagggaaggtgaagacaaggaagtacggcagcaagatcattgagctgatgaggtcacatgacaattcaggaagtggccgaggcaaggaggctggcgatgaacacagagctaagaagatcaaaacgaaggatgaggatgttgtttgtgttgagagtagcgaggaagaatagaatatgcccttcacatacttggctttttagtctatcatctcatggttaattattttgccaatcatttcctccgacgtcatctttctgtaatttagactttcacggattaatgcacagtcatatttctt

SEQ ID NO: 93504 - DNA, 907 bp, Zea Mays
agtcaggggaaccaaacacccccttcgtattgtacagtttcctcttgtacagtttcctctcattttgcacccattaaacatattctgcttatagataattaatgcagtcatgagtggaagagatgttctggtcataatggcagctggtggagggaagagtctatgttaccagctcccagctgtacttcgtgatggaattgcactggttgtcagtcctttactttcccttattcaggaccaggtcatgggactgtcagctttaggtataccagcatacatgctaacttcaactaccaacaaggaagttgagaagttcatctataagacacttgataaaggagaaggagaactaaagatattatatgtgacacctgaaaagatctcaaaaagtaaaaggttcatgtctaagctcgagaaatgccatcatgccggtcgtctttctctgattgcaatagatgaggctcactgctgtagccaatggggtcatgattttcgtcctgactacaagaatcttggcattttgaaaattcaatttcccagtgttccaatgatagctttaactgcaactgcaacaagtaaggtccaaatggatttaatggagatgctccacatcccgagatgcatcaagtttgtcagcacagttaacaggcccaaccttttttataaggtgtctgagaaatcgccagttggaaaggttgtcattgatgagatcacaaagtttataagtgaatcatacccaaataatgagtctggaattatatactgcttttcaaggaaggaatgtgaacaggttgcaaaagaactgcgcgaaaggggtatttcagcagattattatcatgcagacatggatatcgttaatcgtgagaaaattcatatgcgacagtggtataatgactcaacatgttga

SEQ ID NO: 93505 - DNA, 1298 bp, Zea Mays
cgacgcaaggcaagctttccgcttcctatttcggattgggatcatcagcggctgtagcgtggacccgacgggggtgtccggaccacatccctatttcatcttggtaccccgtccgtctccgatttcagaagcacggcgggctccccggcagcctctaccgagcagaaagctgagttctaccccagaaccgaggcatggaggacgaagaaaacatcgagggagaactgttgctcgtggagtcacaactccacgacatccaaggacaaattaaaacattactcgatcgccaagaggagttgtatgaacgccaggcacagttgaaggctttgctcgaagcatctaaattgaccagaaatacaacaattaacacatcttcagttgctccggaagattggtctgggagcttcccatgggatctggaggctgacgataccaggttcaatatatttggcatttcctcctaccgatcaaatcaacgagaaataattaatgcagtcatgagtggaagagatgttctggtcataatggcagctggtggagggaagagtctatgttaccagctcccagctgtacttcgtgatggaattgcactggttgtcagtcctttactttcccttattcaggaccaggtcatgggactgtcagctttaggtataccagcatacatgctaacttcaactaccaacaaggaagttgagaagttcatctataagacacttgataaaggagaaggagaactaaagatattatatgtgacacctgaaaagatctcaaaaagtaaaaggttcatgtctaagctcgagaaatgccatcatgccggtcgtctttctctgattgcaatagatgaggctcactgctgtagccaatggggtcatgattttcgtcctgactacaagaatcttggcattttgaaaattcaatttcccagtgttccaatgatagctttaactgcaactgcaacaagtaaggtccaaatggatttaatggagatgctccacatcccgagatgcatcaagtttgtcagcacagttaacaggcccaaccttttttataaggtgtctgagaaatcgccagttggaaaggttgtcattgatgagatcacaaagtttataagtgaatcatacccaaataatgagtctggaattatatactgcttttcaaggaaggaatgtgaacaggttgcaaaagaactgcgcgaaaggggtatttcagcagattattatcatgcagacatggatatcgttaatcgtgagaaaattcatatgcggtatgcacataattttctttccctttccatt

SEQ ID NO: 93506 - DNA, 2126 bp, Zea Mays
ccatcggatcggaccactacgcgatatcagcaccgcccgttgccgaggccgccatcaacgccatcctcctgcaatccccgccctcgccacctccatttcctcataggaaacgccctgcacagcacgactcctccccatctactgctacctttctacctacccatctagcacccctcgctcgcaaatcgcaatggcgctggccaccaactccgccgcagccaccacggccgtgtccggtggcgcggcatcgtagccgcgccgcgcggccgcgttcctcccgctgaagaggcgtaccatctccaccatccacgtagctgacccgtccaagaacaacgggcccgtggtccccgcggccgcaggcgccaagtcgtcctcctcggcggtggccacaccggagaagaagccggcggcgcccgggaagtgggtggttgacagctggaggtcgaagaaggcgttgcagctcccgagtacccgaacgcggaggagctggacgcggtgctgaagaccatcgagacgttcccgccggtggtgctcgccggagaggcgcgccacctcgaggagcgaatggccgaggccgccatgggccgcgcctttgtcctccagagcgacaactgcgccgagagtttcaaggagttccacgccaacaacattcgtgacaccttccgcaggagttccatgccaacaacatccgtgacaccttccgcatcctgctccagatgggcgtcgtgctcatgttcggtggccaggtgctggtcgtcaaggtacccaccgacacatcaaatccaccacctaattccggtcaccaggtggggaggatggctggccagttcgccaagccaaggtccgagccgttcgaggagaaggacggcgttaagctaccgagctacaggggcgacaacgtcaacggcgacgacttcaccgagaagagccgcgtgccggacccgcagaggatgatccgcgcctatgcacagtcggtggcgacactcaacctgctccgcgcgttcgccaccggagggtacgctgccatgcagcgcgtcactcagtggaacctcgatttcatggatcaccacgagcaaggtgatagggtggatgaggctcttgggttcatgactgcagcagggcttacagtcgaccacccgataatgacgactactgacttctggacctcgcatgagtgccttctcttaccctacgagcaggctcttacccgtgaggattccaccagtggccttttctatgattgttcgacccacatgttgtgggtgagcgacaaaatgaacctcagtgagttggtgaagctgattaagattatgaacccttcaaacaaacctagaaggatcaccataattacaaggatgggggcagagaacatgagggtgaaatacatcatggtgatcaaggtctccgatcccactggtgaggcttgggtgtccgtgttcaacgagcatgcagagaagatcattggatgtagcgccgacgagcttgatcggatcaggaaagaggttcacgatgtttcccatcctctgctcaaaagtcttggcgtgaagaatctcccaactgtaattggccgaaccgtgaatggtgaggagctccttctgaaggatggcatttcggtgaaagatctcagatctggtgtcaaggaattgaagacactgctagatagttttgagaagaagaataagaagttattatcgaatctagctaataagaaaccttccggtcaatgggaagaaatcaagaagattcctctgctcacagcttccaactttgaggaaatctgtggagagaagactccagtatacatcattggtgttttcgggtcaaacaaagccaaggggcagcttgaagcagtcctgtctgagataccccggcccccgtgccactggccttcgtgctcctttaaaggatgtgaaaaacacactttctgtgaggtgcatgttcaatcagatcctgctggacgtctggttatcacaggggatccagagcagcctaataatccttgggggatcactccgttcaagaaggtggtggtcaacttgccatcaagaatcaatcctcaccaaacatccgctgttgtcacgcttcatggtcagctgtttgtgcgtgcaccatttgggtcatcctga

SEQ ID NO: 93507 - DNA, 1608 bp, Zea Mays
tctcccaaagccatcttccttccgcggactagttttttctgaagattcggcgatggcggcgacgatccaatccgtgaaggcgcgccagatctttgacagccgcggcaaccctacagtcgaggtcgacgtgttttgctcagatggaacctttgcaagggcagctgttcccagtggagcatcaactggtgtatatgaagctctggagttgagggatggtggctctgactatttggggaagggtgtctccaaggctgtgaacaatgtgaattctgttattggacctgctctgattggcaaggaccctacagcacagactgagattgataacttcatggttcaacaacttgatgggaccaaaaatgagtggggatggtgcaagcaaaagcttggtgctaatgcgattctggctgtgtcattagctgtttgcaaagctggggctagcatcaagaggattcctttataccagcacattgccaacctagctgggaacaagcagttagtgttgcctgtccctgcattcaatgtcatcaacggtggttcccatgctggaaacaagcttgctatgcaggagtttatgatccttcctactggagctgcctcatttaaggaggctatgaagatgggtgttgaagtttatcaccacctgaagtccgttatcaaaaagaagtatgggcaagatgccacgaatgttggtgacgaaggtggttttgctccgaacatccaggagaacaaggaaggacttgagctcttgaaaactgcaattgagaaggctggatacactggcaaggttgtcatcggaatggatgttgctgcttcggagttttacagtgacaaggaccaaacctatgacctcaactttaaggaggagaataatgatggttcacagaagatatctggcgatagcttaaagaatgtatacaaatcttttgtgagcgaataccccattgtttcgattgaagatccttttgaccaggatgactgggttcactatgctaagatgactgaagaaattggagagcaagtgcagattgttggtgatgaccttctcgtcaccaaccccactagggttgctaaggctatcaaggagaaatcatgcaatgcccttctgctcaaggttaaccaaatcggatctgtgactgagagtattgaggctgtgaagatgtcaaagcgtgcgggctggggtgtgatgactagtcataggagtggtgagactgaggacactttcattgctgatctggcagttggtttgtccacgggtcagattaagactggagcaccctgcagatcagagcgtcttgccaaatacaaccagcttcttaggattgaagaagagcttggcgctattgctgtctacgcaggtgccaaattccgtgcacctgtggagccctactaaacgggcgggatgcaagtgcttttatgtctgcacaagtcctgtgaaactgtttactgcgacctgcagattttactcttggagtgccctgagtagattttagcaataatatccaacatgtaacatgttacggacatgtacccaaacgtgatccagttttagttaatgtgctccatgcttgacgtttttaaaaaataagaatcccttagaaaaataaa

SEQ ID NO: 93508 - DNA, 1839 bp, Zea Mays
ataagtagtacatatgttggactaaaggccccaagagtaacagagcgttaggtcccactttagggcgccagtctataaaaaacggcggtctgccctaaagccctctctcccaaagccatcttccttccgcggactagttttttctgaagattcggcgatggcggcgacgatccaatccgtgaaggcgcgccagatctttgacagccgcggcaaccctacagtcgaggtcgacgtgttttgctcagatggaacctttgcaagggcagctgttcccagtggagcatcaactggtgtatatgaagctctggagttgagggatggtggctctgactatttggggaagggtgtctccaaggctgtgaacaatgtgaattctgttattggacctgctctgattggcaaggaccctacagcacagactgagattgataacttcatggttcaacaacttgatgggaccaaaaatgagtggggatggtgcaagcaaaagcttggtgctaatgcgattctggctgtgtcattagctgtttgcaaagctggggctagcatcaagaggattcctttataccagcacattgccaacctagctgggaacaagcagttagtgttgcctgtccctgcattcaatgtcatcaacggtggttcccatgctggaaacaagcttgctatgcaggagtttatgatccttcctactggagctgcctcatttaaggaggctatgaagatgggtgttgaagtttatcaccacctgaagtccgttatcaaaaagaagtatgggcaagatgccacgaatgttggtgacgaaggtggttttgctccgaacatccaggagaacaaggaaggacttgagctcttgaaaactgcaattgagaaggctggatacactggcaaggttgtcatcggaatggatgttgctgcttcggagttttacagtgacaaggaccaaacctatgacctcaactttaaggaggagaataatgatggttcacagaagatatctggcgatagcttaaagaatgtatacaaatcttttgtgagcgaataccccattgtttcgattgaagatccttttgaccaggatgactgggttcactatgctaagatgactgaagaaattggagagcaagtgcagattgttggtgatgaccttctcgtcaccaaccccactagggttgctaaggctatcaaggagaaatcatgcaatgcccttctgctcaaggttaaccaaatcggatctgtgactgagagtattgaggctgtgaagatgtcaaagcgtgcgggctggggtgtgatgactagtcataggagtggtgagactgaggacactttcattgctgatctggcagttggtttgtccacgggtcagattaagactggagcaccctgcagatcagagcgtcttgccaaatacaaccagcttcttaggattgaagaagagcttggcgctattgctgtctacgcaggtgccaaattccgtgcacctgtggagccctactaaacgggcgggatgcaagtgcttttatgtctgcacaagtcctgtgaaactgtttactgcgacctgcagattttactcttggagtgccctgagtagattttagcaataatatccaacatgtaacatgttacggacatgtacccaaacgtgatccagttttagttaatgtgctccatgcttgacgttttgtgctgctgtggttacatcgttgcccttctaccttacatagttgtgacggcaattgtttcattttggttgaaggtgaaagaatcgagtgggaagggtgaactgtggtaatctaaatcttttctcgcaacaattaaaattcactgcttagtctattt

SEQ ID NO: 93509 - DNA, 343 bp, Zea Mays
ataagtagtacatatgttggactaaaggccccaagagtaacagagcgttaggtcccactttagggcgccagtctataaaaaacggcggtctgccctaaagccctctctcccaaagccatcttccttccgcggactagttttttctgaagattcggcgatggcggcgacgatccaatccgtgaaggcgcgccagatctttgacagccgcggcaaccctacagtcgaggtcgacgtgttttgctcagatggaacctttgcaagggcagctgttcccagtggagcatcaactggtgtatatgaagctctggagttgagattccgtgcacctgtggagccctactaa

SEQ ID NO: 93510 - DNA, 306 bp, Zea Mays
atgcggacacatgacggggtacctttcagacagaaacggcggggatatagccagccgcgggaaggtgtggatggtggaatacgcccgattaccggcgacgaactccaagggtactacgaacccgcgcacaccacaattcttctggcatgcaccacacgcccggccaagcacccacgaatgatcaccggtgtcccaatgtcggtggacgagcaggcccacgatggcggaccttcgcccacccccatggtccctgcagcggcgtcccttatgcttatgtgcctgcagtggcgcaagaagatgagatga

SEQ ID NO: 93511 - DNA, 213 bp, Zea Mays
atggagaacccccatctaatccccgccgggtgtaacccatttaacgcgtcagcgatcgtcttcctcctaccgcccaggtctagaacgaccgcgcgccacacaggcattcgtatcgcccccgatgaaccgcatggtcgtgcaagcgagggccgccgggacaacaccgagggggggctcggccacggttccgcccccactagagttaggcgatga

SEQ ID NO: 93512 - DNA, 2014 bp, Zea Mays
ccaccaacccgggctcctccattgaaccgccgtctcctccattcctggcttcccctccattgaaccgccaccagtctcttccattgaaccgcggtcgtaagacgcctcacccaacaccgcgcccaccaccccaaacgacgcctacattcctgacttcccctcctacgcgcagacgccgtcccaccgccgggatgccgccggcgatcccaagcctggtccacccgtcccgtgtgcggattctccacccgggcggaagccatattcacgggccggtggtgtactggatgctgcgggaccaacgtctcgcggacaactgggccctcctccacgcggccgaactcgccgctgcgtccacccccgcggcgccgctcgccatcgctttcacgctattcccacggcctttcctcctaggcgcgcacctccgccagctaggtttcctcctccgcgggctccgccgccttgccgccgatgcgcacgcccgcggcctcccgttctttctactcgagggcggacctgcggagctgccgtcgttggtgcggcggctcggggcttcggcgctcgtcgccgacttctctccgctgcggccggtgcgggaggcattggatgctgtcgtccaggagcttctgcgtgacgccgccaacatggccgtgcaccaggtggacgcacacaatgtagtgcctgtctggacggcgtcagggaagctcgagtactcggccaaaacctttagaagtaaggtgaacaaggtgataaacgagtatctggtggagtaccctgaggttccgcagtgggcgccttggtgcatggagcagccgaagagtgttgactgggatgcactgatcaatagcatcttcagtgaggctgagaatgtgccggagattaactggtgcgagcctggggagtcctcagcgatggaggtccttcttgggagtaaggatgggttcttgacgaagaggattaagaactatgacactggccggaatgatcctacaaagccacatgcattgtcgtgcctttcaccgtacttacattttgggcacatttctgcacaaaggtgtgctcttgaagcaaaaaaacgccgtcatcttagtccaaagtcagtggacacgttcttggaggagctgataataaggagggaactagctgacaatttctgctattaccagcctcaatatgattcactggctggtgcatgggagtgggctagaaagacgttaacggatcacactggtgataaaagagagcatatctatacgagggagcagctcgaaaatgccaaaacatctgatccagtttgtattagcatattccttgtactctactgaagttcttgaattcatttttatctagttcctgactggactatctgtccctcatttcccaaactttatcagctttggaatgcatctcaattggagatggtgcaccatgggaaaatgcatggatttatgcgaatgtattgggccaaaaagattctagaatggaccagtcaacctgaagaagcactttccatagcaatatatttgaacgacaagtatcatatcgatggcagggatcccaatggctatgttggttgcatgtggtctatttgtggcctccatgaccagggttggaaggaacgtccggtatttggaaagatacgttatatgaattatgctggttgcaagagaaaatttgacgttgatgcttatatttcgtacgttaaaagattggttcctagggccaagaagaggaaaactgaggaaggtgaatccacggtcaaagaatccaatgtctgagttggctcagcagttcaacattgtctaaaacattggtataatttaaatttggcgcagtcaagtgacatacttttcttttgctggtagatgtttatacggctaactgaagagttgctaagtagagatagacattatacaaggttgtgctgagatcagtttgcctcgctgatattataggaaaaacatattaacatatatgttttataatagttttaaaaatactaatgttattctgtcga

SEQ ID NO: 93513 - DNA, 1912 bp, Zea Mays
ccaccaacccgggctcctccattgaaccgccgtctcctccattcctggcttcccctccattgaaccgccaccagtctcttccattgaaccgcggtcgtaagacgcctcacccaacaccgcgcccaccaccccaaacgacgcctacattcctgacttcccctcctacgcgcagacgccgtcccaccgccgggatgccgccggcgatcccaagcctggtccacccgtcccgtgtgcggattctccacccgggcggaagccatattcacgggccggtggtgtactggatgctgcgggaccaacgtctcgcggacaactgggccctcctccacgcggccgaactcgccgctgcgtccacccccgcggcgccgctcgccatcgctttcacgctattcccacggcctttcctcctaggcgcgcacctccgccagctaggtttcctcctccgcgggctccgccgccttgccgccgatgcgcacgcccgcggcctcccgttctttctactcgagggcggacctgcggagctgccgtcgttggtgcggcggctcggggcttcggcgctcgtcgccgacttctctccgctgcggccggtgcgggaggcattggatgctgtcgtccaggagcttctgcgtgacgccgccaacatggccgtgcaccaggtggacgcacacaatgtagtgcctgtctggacggcgtcagggaagctcgagtactcggccaaaacctttagaagtaaggtgaacaaggtgataaacgagtatctggtggagtaccctgaggttccgcagtgggcgccttggtgcatggagcagccgaagagtgttgactgggatgcactgatcaatagcatcttcagtgaggctgagaatgtgccggagattaactggtgcgagcctggggagtcctcagcgatggaggtccttcttgggagtaaggatgggttcttgacgaagaggattaagaactatgacactggccggaatgatcctacaaagccacatgcattgtcgtgcctttcaccgtacttacattttgggcacatttctgcacaaaggtgtgctcttgaagcaaaaaaacgccgtcatcttagtccaaagtcagtggacacgttcttggaggagctgataataaggagggaactagctgacaatttctgctattaccagcctcaatatgattcactggctggtgcatgggagtgggctagaaagacgttaacggatcacactggtgataaaagagagcatatctatacgagggagcagctcgaaaatgccaaaacatctgatccactttggaatgcatctcaattggagatggtgcaccatgggaaaatgcatggatttatgcgaatgtattgggccaaaaagattctagaatggaccagtcaacctgaagaagcactttccatagcaatatatttgaacgacaagtatcatatcgatggcagggatcccaatggctatgttggttgcatgtggtctatttgtggcctccatgaccagggttggaaggaacgtccggtatttggaaagatacgttatatgaattatgctggttgcaagagaaaatttgacgttgatgcttatatttcgtacgttaaaagattggttcctagggccaagaagaggaaaactgaggaaggtgaatccacggtcaaagaatccaatgtctgagttggctcagcagttcaacattgtctaaaacattggtataatttaaatttggcgcagtcaagtgacatacttttcttttgctggtagatgtttatacggctaactgaagagttgctaagtagagatagacattatacaaggttgtgctgagatcagtttgcctcgctgatattataggaaaaacatattaacatatatgttttataatagttttaaaaatactaatgttattctgtcga

SEQ ID NO: 93514 - DNA, 376 bp, Zea Mays
tgccgtacaagggccctggttatgtaggaaatcatggaagcgtgtattgcagcacattggggccactgttgtaagtgggaaagccaaaagagcatctcaaatgatgggagaggcgcttctgtatgtttgtataataataatgtatgcttgtcttatatttatttatttacccagtttagggggtgtttggagcaaagtatttttagagttttgaggtaaaaccatgatattgaagaatactatagtatttctcattgttttgctaagaggtgtttggttacattgtaaaaaactctgttttgaataccatggttttgcagataccatggtatttttgaacatttgaaactctactccaacctaaagtttttatcta

SEQ ID NO: 93515 - DNA, 940 bp, Zea Mays
caaatttccataccaaaccagcccgtaggctctagggcgcagtcaggtggagggatttttccccttttgcggcttcctgaactccatcttgccactgccacgagcccacgacgcccgcagccgcagcgaaccagagaggagagcgggagatgaagggcgtcgggggcggcgcggcctccccgggggactatgtctacttcaaatctgtcgtcccgctccacaagatctccattgggtcaaaactgtggaggtactatgactttggacccaaggttgtgccacctcttgtttgtatcccaggaattgcaggaacggctgatgtatactataaacagattatgtccctttgtatgaagggttatcgagtaatatctattgacgttcctcaagtttggaatcaccatgaatggattcattcatttgaaaaatttttggactccatgaatatccatcatgttcacatttatggtacatctcttggtggattcctggcacaaatatttgctgaacaccgtccaaggagagtaaagtcattggtcctatcaaatacttttcttgagacgcacaagtttgctgctgccatgccttggtctccagttgttaattggaccccttcttttttgctgaagcggtacctcttgacaggaatccgagatggtccccatgaaccattcatcgcagactcagtagattttgttgtgggtcaggtggagacattgtcaagagatgatctttcatcaaggttgatgttaaatgttaatgttgcatccgttgggtcgttaatgttgcctgattcactcatcactataatggatgtaagttacctactctagcagtccccaggctgcacccctcaatgctggcgcacagggccaccttctctgctcctctgcgtcgccgcacccccagccgcgtgtgcagttctctccccctgctcgtc

SEQ ID NO: 93516 - DNA, 522 bp, Zea Mays
gctcccgtggattcactcaaatttccataccaaaccagcccgtaggctctagggcgcagtcaggtggagggatttttccccttttgcggcttcctgaactccatcttgccactgccacgagcccacgacgcccgcagccgcagcgaaccagagaggagagcgggagatgaagggcgtcgggggcggcgcggcctccccgggggactatgtctacttcaaatctgtcgtcccgctccacaagatctccgtgagttcgcgcgcgcctcgcctccctccctcccatctcactgcagtctcttccctgtaatccccttaggcggcagcgtctcgtcagaagtttgatcgttggagcggtttcgtcgttgcttcgtatgggatcatctgaattgggctggatatgaagcgaatttcgggcgaggagctttctgtggtcggcgatccgcaggaactcgttggttggtgtaatttggtgtggtaatattgaatccgaacagtatctttacctgaatctgatgatatctc

SEQ ID NO: 93517 - DNA, 141 bp, Zea Mays
atgactgcaagggaacctagaggatttgggttcatccaatactttgatcctaaggccgcgaaggacgccacgcgggggctgcggcatgagctcgacgccgagcgggcctccgcggagacagtagccagatctggccattga

SEQ ID NO: 93518 - DNA, 323 bp, Zea Mays
catttcatgtagagctcccaaaataaagagtgaagatttaagatgaagtggttgatgaagaggagtctactccagtgcttgttcatcaagtggatggagccatctaactaatcatcgtgttagaagtatctagaacctcttatctgcaacaaaggagaagttttattcccttatctttgggttagttacttcatgtggaggccttgaagcttagaaggtttttatatatctcttatggaaaggcttcacccttccaattattgtaataagttatgcactttgggtactatcaggactattaataacttcagttttatttagcc

SEQ ID NO: 93519 - DNA, 586 bp, Zea Mays
gtgtcaagcgccaaagcaaggccaccaagcaccatggcttcaaggaaggagagggcgcagtggatcttggcaccggtgagtgccggggcggactgtcgctgctgggcaaggccgacggcgaggccgagttggacgtcggctagagacttgccaagaagggaggtcgagggggaggggcatcagatgctcatggcgcagccatggccaagcagggaggtccgcaccaggggaaggagttgtgagggaggtcaccgactcattctggcttgaggccgaaccccccactcgaatcgaaggaatggtgccgaggaaatccatggccggccagaaaaaaagaaacacgccaggaccaggggcgcgcgctgtacaggaggcagagggaggcgccggacttcctgctggacagccgaggggtggcgcggcgcatggaggaagggcgctgggagggtagagacatggcgccgtgcaccaaggacagaggagcagggagaagcgacgaccgcttggaggagatcggatggcgtctagctgacgcgcgtagggggaagttgttggaggacgtcgtgggagtttcctgcgcgctggg

SEQ ID NO: 93520 - DNA, 885 bp, Zea Mays
cctcccacgttcagtcctccttatctaccatacgctgcaatctcttagcatcttctatccttgcgtgcacgcgtcagtctctagtgatcttcgacgccacctcctacttcctagccaaagcacgatcactcctttggaaacctccagtcctcacgctagctctctggaagtccaaaacgctcggctctcaatactccttcctccgcgtcatctccctctcctcctccccaacgctagagcagcacctgccaaacacccggtaaagtctagacatcgatcgagcccttctcttgctatgcgcttggtctcctcagtgcttgccttgccactcgcacgcctagctccttccatcaggcaagctcggtggctagttcctccatcagctcagcactgccctctggtgctcgcgatcaactccttcacgccgtggcggctccctgggcgtcgttccccagccacctcgccggtgttctcaccttggctgccctcgtcgagtcctttgccgatgttttcaatcagccacgccgacctccactccagcttagaccggtggcggacgcgtactttcctgtcctcgtgttcgaatcgacgtcactcagtgtcccatgccgtcgtgccatctcagtcgtccccagttcttcctcgcccgtaccgtgtgttgcaacaagctcttcgtcgatccaggtgctcgcctcctcgccatcgctttacggattcggcgtcgtgagtttcacctcgccgttacaatgtcttgatcttttgtaacttcggcaaatcgttgtctgcgttgtcatatggtgctccctactccctacctagtggtgagctgtcgtcgatcctgatctttattttactgtttcaaatcaatttagcacgtttgccata

SEQ ID NO: 93521 - DNA, 1347 bp, Zea Mays
cgcgctctctctctccagcgcccatctccctcctctactcggtcctcctctctgtgcgcaggagcttctcccatggccgcggcgccctggctcctgctctcctcgtcgcgcgcgcctgggcgctgccccaggtggttgtctgccctcctgcattgcgcccagccgcgcctgctccctgagctccttccctgccacgccggagctccctccatggcgcccgagcgccctgccctcggcttcctgcttgcatcacgcgccctcgtcttcagcccgacgctcatctctctgctcttcttcttcaatcgccgcgcgctctccctgacgcactcacccatgccgcggcatccctgctaggacagtgcccggccggatctccctggtgccgcacccctgctcctccctgttccagctcggtacccagagccccagcgtcggcgcccttctgctgttcgccatggcgcgcctcaagcttctccctgcgcgcgcgaagttctctgctcgcccagtctgcgcaccactgtatctctccccatggcgctcctccctgcccctgctcggatttcccttccgtaccgcgccccctcggctcactccctcaacctcgccgactcgccaagcttcctgctcgcctctgcgcagcgctcagctccctctgtccgttcccagccgtgatgctccctggcgcttggcctgctccggatccgaggctggtcgccctgtgtgctcgactgtgtcttgtcacaaaaccccgacgccgtcgtcccctgccgtgccccggatgtcgtgcttgttgtggtcggctctggtggtcggcatcgtcgactgtcgattccgtcagtagccacattaattcgttattgttccgtacgctgcgagaaagagatctagggaatctcggtaaagaaaaaacgaacgccctctgtcgcttccatgttgtgctgagaaatgctcccaccggacatcgtcgtcaatctcacggattcaaatcgggtttaggtaatgataagccagtttattgtttcagataatgtttgattgagggtttggatatattaattatgtcggtcctcttgctcatagcatatgtgttgtggttgtagatatagtatttattaggatacccgaatcgcttgcagcgatttggtcaaggtcgtgtagtgaatcgccagtttgagatgtagattatggaatagagtttcggtgggtatacttgtcgagtaggttgaaactagttaagttagttttgagaatggttatggccgattgtggttagcaccgtcgacctatatcttatgcatcttaatttataacatggaaacatatgtctagtgtaattggattgatctg

SEQ ID NO: 93522 - DNA, 1831 bp, Zea Mays
agtagaaggtgaagccagatcgagttgtcttcaattctttgatcagtgcatgcggtgaatctggagctctggctcgggcatttgatgttttatcagaaatgacagcagaatcctctgaatctaaaggatggaaaccaatcgttcctgatcatgttactgttggagcactgatgaaaacatgtattttggcgggccaggctgatagagctcgtgaggtgtacaaaatgcttcaggagtataatataaagggtaccccagaagtttacacaatcgcattaagaagctgtagcttgactggtgatttagggtttgcactgaagatatatgaagatatgaacaggattggagtaaaacctgatgagatgtttttgagtgctctagttgatgtagctggccatgctaggagggcagatgctgcctttgaaataatgaaagatgcaagagcaaaaggtttactcgttggaacaattgcatacagttcgttaatgggggcttgctgtaatgcggacgactggaagaaggcactgcagctatacgaggagatcaagtctatcaaattgaccccatcggtttcaatgatgaatgctttgatcacctctctgtgtgatggtgatcaggtcttaaaggctgttgatatccttaatgagatgaacatattaggggtccatccaaatgagataacatactcagtcttatttgttgcttgcgaaagaaatggtgaagcacaactaggtttggatttgtttgaacaattaaaaatggatggcattgacatcaatccgaccataattggttctcttactggtttgtgccttcaaatgttcaacattgatttttcgcttgggaatattattgtcaacttcagctcagggaaaccacagattgacaacaaatggacttcctcagcagttatggtgtatcgtgaggcagtttcagctgggctactaccctcaagtgatgttttatctcaagtgttgggatgtctgaggcttcctcatggcagttctctgaagagtactttcattgaaaacatgggagtaagttgtgacattccacaatacccaaatataaattcacttttcgaaggattcggtgaatatgacattcgagctttttctatattggaggaggctgcttcattaggagcagttgcaagcatttccataaaagaaacccggattgttattgatgctagaaagttaaagatcttcacagccgaggtatctcttcttagaaccttaagatctttgaagcatcgattggctgcaggttcaaggttaccaaacgtgacaatcttgttacctacagaaaagaaacaagttgacattgatgaaaaggagaaaacacttaaacttgctggaagaattggtcaagcagttggctctctcctgaggcgattaggaatttcataccagggggaggaatctcatgggaggatgaggatcaatggcctcacgataaggaggtggttcaatccaaaactgaatagcaaatcctctgctgccggcccagctgacttgcttccactaccttcgcggttagccaaagggattgctggtcagcaacgcgatattagaaacctttcactcgagtagtagactagtactacacggctatcctggaagcgatctcagtaacccgtgtgataagaagcgtagtatagtaagatgtgcaaacgtgtgaagagtttgttcggtagaaggaaatacataatccatcaatctgtaatgacagtagtcgaaggaaagatatgcacgatgcatcaaacttttgtaatcatgtcaggtaaagggattttcccctgaacataatatacatatagagttacata

SEQ ID NO: 93523 - DNA, 728 bp, Zea Mays
agtagaaggtgaagccagatcgagttgtcttcaattctttgatcagtgcatgcggtgaatctggagctctggctcgggcatttgatgttttatcagaaatgacagcagaatcctctgaatctaaaggatggaaaccaatcgttcctgatcatgttactgttggagcactgatgaaaacatgtattttggcgggccaggctgatagagctcgtgaggtgtacaaaatgcttcaggagtataatataaagggtaccccagaagtttacacaatcgcattaagaagctgtagcttgactggtgatttagggtttgcactgaagatatatgaagatatgaacaggattggagtaaaacctgatgagatgtttttgagtgctctagttgatgtagctggccatgctaggagggcagatgctgcctttgaaataatgaaagatgcaagagcaaaaggtttactcgttggaacaattgcatacagttcgttaatgggggcttgctgtaatgcggacgactggaagaaggcactgcagctatacgaggagatcaagtctatcaaattgaccccatcggtttcaatgatgaatgctttgatcacctctctgtgtatgtctactgaaaaaagataaaaaatgttttcatttgccacttacatatactataagagagtatgtctttaacgttgtcattgttacatctagtttgttaaataaattgatatgcagtatttc

SEQ ID NO: 93524 - DNA, 812 bp, Zea Mays
tcgtcatcatcctaaacctcactcgctcggccactcctccccaggcaatggaggcctccgcttcctcctacgcttccgctcctgcagcgctcctcccgctgctggctgccccgctgcgcttcctccacctccccctccgccgtccctctgctcgccgccacggcttcgcgattgggggtggaggtggccttctgctccagccgccgctgctgggctccggctcccgtgcccgctgtaggacgacctgctgcgtgtcaagccccgagcaggcggaagtgctgctgggcggggcctcgttcgttagcttggcggcggtcgctctcctcaccgctctgcagctgatatggttgcggtggcgcagtgcgaggcacggggatttcccggaggttttacatgaacatggcataatcattgtaaagacccttcgtacatcaaaagcaatgtatgacagtaatttggcaccacatctaactcagggtagtcactggctttcagagccttgtgtttctggaagaatgactgttgatgaaatgaatcacaaggctggtaactttccctgtgcacacactgtacatacagaaaaacaggcttattctgtaattactccttggatatctccagatataccgttatatgtttctagacctgaagaagttagttgcgcaactccaactgcaaatagttccataaaaaaggatacaagtcttcctgtgatgccacattctgtgtcacaagggcaagataactccaagtatttgtctaacagaacaggcagggtagctgggctaccatatcagtttttatccctttca

SEQ ID NO: 93525 - DNA, 611 bp, Zea Mays
ttgcaagcatcatccattgtaatctccaacggaagaaatatacatctagttgctgcgagtatacatgtaaatggaagatttttcgctgattcatcttctcttcgcttgaaatgggaagccactggatgtgaagggcttgcttacttgaagaaaccaaatctgttgaaatgcttgatgagttagcttgggagagatctcttgtcctacagaattctacaggagtggtcagtataagatctcttgtcctacagaattctacagatgttattcagttgcaggtaatttaactatttttgaatactttttatcaatttcgctaaagttcttgtctcactcagcttatgtttatacagattgtttcttccttaagagtcacccctgaatatgtcttgttagttttccatcctgaagcacaggaaaatctgattgtaagtggtggaacatgctccctagatgcttctaccaatgacacacatgtggtgcaaatagttacacatccaggaaaagccttatgttctcaattgattcttgcggctaaaggtttaggcgaagctataatcataatccaggatgttggcctttctccaagagcaactactcattctttggta

SEQ ID NO: 93526 - DNA, 489 bp, Zea Mays
atggcttcagggtcttctaggggcaagggtgcgggaaatgagagacgaaaggatggagggaagttaactccaatgtgtttcgatggccctcttggtccagatttttttgaagaggcggtttttaactttccagttcaaagtaaaaaagatttcaacaaagagcattcattggtcaaggagaattgtgggttcactcgttgggtagatcctcgtccgatttttcctcatgcggaatacatatcctacctacagaataggatatttgatctagagagggaagtaagcaacaaaaatgacgaggaagaaagagacaacaacaatggtggtgcttcacaggtgcaagtatgcccagatccatattgttgctgcccttgtcacaacaagaatgttggtcctccgtcgtctccaccgcacccacagcagacaacaacaatgggaggatactatggagaaggatccacacaatttggaatgtgggagcactactag

SEQ ID NO: 93527 - DNA, 1674 bp, Zea Mays
ttccaattttgtcttctcggcacccgcgggagctgcggcagcggcatgaaggcgcggccccgtgcgtgctagtgcctccgtcaagtgacaaggcgtggccgcaagtcgcgcacgagtcgtggcgacggcatccaagcaaggaaaagaaataaagcggaaaactttaaacgggtacgcaggagatccagcgaaatggcggcgccgccgccgtcatatccagcggccttgaagccggagatcggccctgacggcctcgctcgagattctcccgtaatcgcctacaccgagaaggtcattttggaggagcagctgcagctgaagaaatacattcaggagaactattccaaaattcgtgatgtagaaaaggagttagagagtcttactttagaaatgaaactgacagctggaccaaagaaagcagcactagagcatctgaggaagaagattgaaatatcaacagagaaaatacgtttagctaaggtgaaagaggaacatgcaaaaaagacttgggaagttgctgcacaagttgttaaagacgaagaggatgctaagcagaaattatgtgatgacctaaaccatctagtccaggagagtgctgcttcccaatatgcaagattggaggagctgaagaaacgtttagaatctctaaatcccataagggattctgttaatgtgtcagtaagtgaataaccccaaggccatagatctgatgtttcatctttgaaattatttatttctcactgtcagtatttctgctttagtattaacaggaacgagtcttattgattatatgtttcctgtttgctagtagacattagttcttttgttgttttctgagcagataatgttggttttggtctcaactagtatgtgtatgttccgtattattgtctcaccttttcttgtatcagggtgtttatactgcacagcatgctactctgaattcagtacctcagcaaccaactgcacaaaatcctgcagatgtaactggccgtcagaatattgccacaaagcctgcttctatgcaacagcagcctatacctgcggaggcagaaaagaagagaagaccctcgaattcggcaagagggaggggtggtgtcatgatccttccgaagggaagagagggttctgggtcaggatggacaggtgctgggtttgatgtagatagccgtacatgacgcccggtatttcaagttattcgtaccattgaaaccatgctctccaaaattcacaagaattagattggtcaccaaaaaaaaaaattcagagccattccagaattctaatgtgaggaaggtgtacgtttgatcatttgttcatccattgtatatgaatcatgcactaaattaatcaaagttttaacatatatattcaaaggctagaaatctgaacctaagtatgagcacccgatagggcatgttgtcgtagggtgtgtttgactatggtacatctggatgaacggatgtatgctaagttgaattgtattttaataaaaggtgtttgatgcggatgtatgagtggatgtaaaaaaatacagagattatttggttgtatgagtcaatgcaatttgttgggcttgtgagaccgagtgtgatcctataccacaacactgcatcaccagaactggctagcaattaaagctgaaatcgagtgcatgatcggatacagtgggcg

SEQ ID NO: 93528 - DNA, 1352 bp, Zea Mays
ttccaattttgtcttctcggcacccgcgggagctgcggcagcggcatgaaggcgcggccccgtgcgtgctagtgcctccgtcaagtgacaaggcgtggccgcaagtcgcgcacgagtcgtggcgacggcatccaagcaaggaaaagaaataaagcggaaaactttaaacgggtacgcaggagatccagcgaaatggcggcgccgccgccgtcatatccagcggccttgaagccggagatcggccctgacggcctcgctcgagattctcccgtaatcgcctacaccgagaaggtcattttggaggagcagctgcagctgaagaaatacattcaggagaactattccaaaattcgtgatgtagaaaaggagttagagagtcttactttagaaatgaaactgacagctggaccaaagaaagcagcactagagcatctgaggaagaagattgaaatatcaacagagaaaatacgtttagctaaggtgaaagaggaacatgcaaaaaagacttgggaagttgctgcacaagttgttaaagacgaagaggatgctaagcagaaattatgtgatgacctaaaccatctagtccaggagagtgctgcttcccaatatgcaagattggaggagctgaagaaacgtttagaatctctaaatcccataagggattctgttaatgtgtcaggtgtttatactgcacagcatgctactctgaattcagtacctcagcaaccaactgcacaaaatcctgcagatgtaactggccgtcagaatattgccacaaagcctgcttctatgcaacagcagcctatacctgcggaggcagaaaagaagagaagaccctcgaattcggcaagagggaggggtggtgtcatgatccttccgaagggaagagagggttctgggtcaggatggacaggtgctgggtttgatgtagatagccgtacatgacgcccggtatttcaagttattcgtaccattgaaaccatgctctccaaaattcacaagaattagattggtcaccaaaaaaaaaaattcagagccattccagaattctaatgtgaggaaggtgtacgtttgatcatttgttcatccattgtatatgaatcatgcactaaattaatcaaagttttaacatatatattcaaaggctagaaatctgaacctaagtatgagcacccgatagggcatgttgtcgtagggtgtgtttgactatggtacatctggatgaacggatgtatgctaagttgaattgtattttaataaaaggtgtttgatgcggatgtatgagtggatgtaaaaaaatacagagattatttggttgtatgagtcaatgcaatttgttgggcttgtgagac

SEQ ID NO: 93529 - DNA, 1552 bp, Zea Mays
gatcggatcagaatcatgttttatttttattcacttttgaactaaaattaattaaagggttcaaacaaattgtgaaaagacataatccattaccactcctaatcacatctcacgaaccatcaccattcaagtgcagaacgccaagatggcacttgaggagtgatgagatcacaacacgtgactccccgggcccaaaagcccaataaaaccttctcatcacaacaaatccccaaattgtctccaggaattcactagcaagggagattacaaaccaacacttggccacatgaatgaatgctctcaaggctctgtctgatgtagaggccaagcaaagcagataaaagtataaggccatgcattctagatacagctaggaagcaaggcactgagctgttagaattagaaaaaatatttaacagcaataagcacaacaaatgtaggcatcattttgcttttcagccgctcaccctcgactccctctccgcgctgctcttccactccctcgcgctctccgcctggaagtccgcgggcctctcaacctggtcgctccgcgttaaccccagcagcggcaacctgcaccccaccgaggcacacctggtcttcccgcatccgcgggaggtcgaccgcctcgccatcgcgcactacgcgccccgcgaccatctcctcgtggtccatgctaccgcaccaataagggattgttctgcgattctgtctgcgccggggatggcgatcctggctctatcgtcagtcttctggcgagagccgtggaagtatggagagcgggcgctgcggtactgcaaccatgacgtggggcacgcgctcgcagcggtggccttggccgcggccacgctgggttgggacgcgcgtttgctagatgggctgtcggacgaggacctcaggaggcttgttggggtggagaaagggagcccggctgctgctccggaggggctccttaacaaagtggtcaagggtaaggcgcggtgggtggagcggaagcatccagattgcgcggttctgctattcccagttgggtatgagccggaggtcgaccatgaacatcaacgtcgacaacggcctcgcctgcctcaccaagatctccggcgcctcctccgcgtccacggtctcgccgctgccccacatcgcgtcctccgcctaatcaatgaagcagatgatgcgaccgtggatggggaggtggaggacgggtgcatgctctggcgggattggtgcaggctcgtgctgatggctttctcggcgcggggttgttatcgcgggcggattgggcggaggcttcgcgggcggttggagggggcatgcacgtggaggaggggaggcgggggcaccagattagtctacactctactcttaatagttagtacagatttagtctgataacgcgcacaacctggattataaacttcaagcgcattctaaatatgacactatatttttgttttaggatgagagtcccaatttagatagtgattaaatcggcttggggtttttttgttggagaaggcgaatcgtgatattttaaaatcactgttgatgcggg

SEQ ID NO: 93530 - DNA, 417 bp, Zea Mays
atggcgagcagagacgagcggctgccaggcacgcggagcgagcagggcacacggcgagcagagcctagccagggacacgacagtagggaagcaggcgaccaggggaagggctctgtggagcctaggcgtgactcgctgggcgaaaacagcacgaggcaacgggtgctcgaggcggtgctccagcttaacggcggccaccagcggagcggtatacaacaaccaggagataaggccgagctgaggccggctgagaggagcaaagggcacggtgagcagaggagagaagctgggagttgggagggcgccgagctgggtccaagccatgggcgcggcacgcgtagggaggaagacagaggttggggaaggagctccatggcttggagacgcaggggacgcgcgacagctgaaatggattga

SEQ ID NO: 93531 - DNA, 1575 bp, Zea Mays
cctgagtaacactaggttagtgttgttagacgatgttctcttgacgagcagcctttgtcttggtactcgttcaattatccatcttcagattcatccgactgacgacgtcgtcttgcggagatgtccactcctagcaccatcttgaggtcaacttggctcgtcttccgcatcacgcgatcaattaacgtacctcatgggatgcacgatgcacatgtatgagcacgagtataaatagtacaagatagataatttacactaaaaaggatgaaacacttataaccaagcatattgtatacaatataccaattataactttagaactaaaagacctaaattgtttatacgcattacttatcagacagaccctagattttggttgaaacagatatatcgatgttacttgatcctaaatattcgaagtagcaatcaacatccattcaaatcatgaaatcgaccaacacacatagaatatcatacctagtttagagagcacactaaacgacttaaaactttaacttcaaaattcttggacacctaacacttataaaatttgatagaagaactttcattaaatttctaaactaatttcccggttaacctgtgtatcacatatatattaataaaacatcacatttttaacacctacaatcccgcaagcactgggacctattgcgacctctttctccacacaacatcgaccaaatcactgtagatgacttgggcatcctaataaatagtatacctaccgttcccttcatcaaactaataaccgaattagcaatccgacacaccacataattatcacgattaatatacctagtcagaccattcatcaatccactagcacgaataacaaatttgcttaccctgactaattcgacgagatagtcggaagcacgacgacggtttccggttgacgtctttgatcacacacgtctggcgagcagggagacaggacgagagcgctaggagccgggaggagtagaggaaaagctgcgcgcggggaaggaggccttggcacggcggccatggccgaacagagagcagagtaggggcgcggcaccaggagatggcagagggaaggtcgccgcgagggagcaggggagctcgcggggaagggacctcgacacggcagccatggccaagagagagggagctgggcgccgagttggaggaacagaggccggggcgagcgaacaccagaggagggcgacggcgcatggaggataaggctcctgcgcgcgtaggagctggaggccgagcgctggaagtcacgacgctggagggtgagctgaggggcgcggctatggttggagtagaggaggagagtgctgctgggggaagcgaagcgccatggctggagctccaaatccggcgcgcagaagccgaaggtaggtcgctcgggcgctggatccgagccaggggcgatggggaagctccacggtggccagggatcaggaactagggcggcagcgcgtgagagatggagcgtgcaggggaggggtgcgcgccgtaggagacgcagggcgccgggagggagacgaagcagagagagagcagacgcggttcagattt

SEQ ID NO: 93532 - DNA, 301 bp, Zea Mays
gaaactgtgtgcatcgctcgccagacgtgtgtgatcaaagacgtcaaccggaaaccgtcgtcgtgcttccgactatctcgtcgaattagtcagggtaaacaaatttgttattcgtgctagtggattgatgaatggtctgactaggtatactatttattaggatgcccaagtcatctacagtgatttggtcgatgtcgtgtggagaaagaggtcgcaataggtcccagtgcttgcggcattgtaggtgttaaaaatgtgatgttttattaatatatatgtgatacacaggttaaccgggaaa

SEQ ID NO: 93533 - DNA, 636 bp, Zea Mays
actacgtcacatgctaactcgcagcggaagaagaaggccaccgcggcggcggccgccgcctcctccaagcgggagagggagagggagcgggagcggaacaaggaggcgaacgaggtcaccgtggagctccgcacagtggggttcggcaaggaggtggtgctgaagcagcggcggcggatgcgtcggaggcgccgcctgggcgaggaggagcgcgcggccatcctgctcatggcgctctcctccggcgtcgtgtacgcctgacttggctagcaaccgcgccggcccccgagacgccgctcccaaaggcggcgaaaggagagggggcccgattcactggacgtgcgacatgatctgagccccagacagatccgtccgtctggatctatgctaagttttcccggctaagtagtagctcgtcggttcgaacaaggcgagttaataatccgtgtccgtgctaggctagctgctttgttccccctcccgttgcttgctgtgttcttgccaccgcctcctctagttgtaatcctgccgctagtagtgtgctagtagtagctgtcctgctgtaaccttctcttgcaatgtaaggagagattatatggttggtcattcttgcaatcctaacgctagtcctgtgct

SEQ ID NO: 93534 - DNA, 1483 bp, Zea Mays
ccgaccgttttcattgctcacactgctgtctccgttccatcccctacgagatctgccccctcgccctcgccctgctccaatccccatctccttgcggcccgatccaccctgctccaatcccccggcgatggtcgtgtgcaaatgccgaaaggcgacgagggtttactgcttcgtccatcaggtccccgtctgtggcgtgtgcatatgcttcccggaacatcagctatgtgtggtgaagaactatgctgaatgggttgttaattctgagtatgactggccacaacactgttcgtcttgcaattctgttctcgaaggtggaactgaagaaacaacacgattgggttgcttgcatgtggtacacaccaaatgcttgatatcacatatccaaagttttcctacccaaacagcaccagatggatacgtctgcccctcctgttctgcacccatatggccaccttctagcattaaagatacaggttcgcgccttcacactgaactgaaagaagcgatagtccagactggaatggagaaaaatgtatttggaaatcattatgtgacaatagctaaagctgatactcagacacctcctgcttttgcatcagatcctctcaaaactttatccaatcgtgatgatagagaatttaatagtgcaaatgcagctaaagatgctgctttgccatcaacattacattctgggatgtactcttctgctgtaggatctgagacaactattcatgttgatccagaaattgttgaaatagagggttctagtcctgtatcgacccaattttcagtgcaggactccaacttcatcaggagtccaagcccacatgggcctggtgctatgacaagaaaaggcgctaatactgttgatagacaaaattctgagatttcttattatgctgatgatgaagatggaaataggaaaaagtatactaaaaggggtacatttcgtcacaaatttctaaggatgctgctgccgttctggtccagtgcactgccaacgctaccagtcacagcaccatcaaaaaaagagagtgatgctctagaggggagtcgatcacgccatcagagatcatcaagaatggatcccactaagatcttacttgcaatggctatcatggcatgtatagcaactatgggaatactctattaccggttgtcacagcgaggtctttctgaaaccttcttagaggacgagactcagtaatcttgccttcctgtattgcgttgttgctgattcaaaggattttaccctctgtattttttttcgtttaccctttgtgggcctttttggtggtttgaaggtggggtagtggttagtagactctttctatattccgattcatgctcatgtttatgtgactactataatggtatatacaatattgtattatctacagctgagatcatagaaaatttaacccatggacagtttaaacctggttagctcatctaatgtagtatttcctagtttctgttt

SEQ ID NO: 93535 - DNA, 1450 bp, Zea Mays
ccgaccgttttcattgctcacactgctgtctccgttccatcccctacgagatctgccccctcgccctcgccctgctccaatccccatctccttgcggcccgatccaccctgctccaatcccccggcgatggtcgtgtgcaaatgccgaaaggcgacgagggtttactgcttcgtccatcaggtccccgtctgtggcgtgtgcatatgcttcccggaacatcagctatgtgtggtgaagaactatgctgaatgggttgttaattctgagtatgactggccacaacactgttcgtcttgcaattctgttctcgaaggtggaactgaagaaacaacacgattgggttgcttgcatgtggtacacaccaaatgcttgatatcacatatccaaagttttcctacccaaacagcaccagatggatacgtctgcccctcctgttctgcacccatatggccaccttctagcattaaagatacaggttcgcgccttcacactgaactgaaagaagcgatagtccagactggaatggagaaaaatgtatttggaaatcattatgtgacaatagctaaagctgatactcagacacctcctgcttttgcatcagatcctctcaaaactttatccaatcgtgatgatagagaatttaatagtgcaaatgcagctaaagatgctgctttgccatcaacattacattctgggatgtactcttctgctgtaggatctgagacaactattcatgttgatccagaaattgttgaaatagagggttctagtcctgtatcgacccaattttcagtgcaggactccaacttcatcaggagtccaagcccacatgggcctggtgctatgacaagaaaaggcgctaatactgttgatagacaaaattctgagatttcttattatgctgatgatgaagatggaaataggaaaaagtatactaaaaggggtacatttcgtcacaaatttctaaggatgctgctgccgttctggtccagtgcactgccaacgctaccagtcacagcaccatcaaaaaaagagagtgatgctctagaggggagtcgatcacgccatcagagatcatcaagaatggatcccactaagatcttacttgcaatggctatggcatgtatagcaactatgggaatactctattaccggttgtcacagcgaggtctttctgaaaccttcttagaggacgagactcagtaatcttgccttcctgtattgcgttgttgctgattcaaaggattttaccctctgtattttttttcgtttaccctttgtgggcctttttggtggtttgaaggtggggtagtggttagtagactctttctatattccgattcatgctcatgtttatgtgactactataatggtatatacaatattgtattatctacagctgagatcatagaaaatttaacccatggacagtttaaacctggttagctc

SEQ ID NO: 93536 - DNA, 1297 bp, Zea Mays
gagtgtgtatatatgtggagcacgtacgccaagcagcggcgtgaggcagcctgctagctgagaggatcggatcgcatggaacttgccgggacatggaggaaggtgatgccttacatggccatggtgtttcttcagttcggcttcgccggaatgttcctcatctccgtcgcgtccctgcggcagggaatgagccactatgtccttgttgtctaccggaacgtagtggcagccattgtcatggctccattcgcgctatggtttgagaggaaaacaaggcctaaaatgagcctaccggtgttcatcaagatccttgctttgggattactcgaacccgtgcttgaccaaaacttcatctacatgggagtgaatagcacatcagcaagcttctcctctgcgttaaccaacatattgccagctctaacttttgtaaatgccatcatactcaggatggagaggatagtgattaaggagcgacgaagccaggctaagattgcaggcacagccataacagtctgtggtgccttgcttatgatacttttcaagggccccatcatcaacttcccatggagcaagcacgccagccacgccgtatctgacagcggcgtccacaacagcggacactggctcatgggcacgttcatgatcctgttaagctgcttctgctggtctgccttcttcatactccagtcatatacgttgaggagttacccatctgagctctctttaaccactctgatatgcgcaatgggcgccacggagagtggcgcggtcgccctagtcatggagcgtgacaccaaggcttggtccatcgggtttgacatgagactcttcacggccatatactcgggaataatgtgctctggagtagcttactacgtgcaagggatagtgattaaggacaggggcccagtgttcgtgactgcgtttagcccgctctgcatgattttagtgactgtgctaggctccttcattctttctgaggtcgtcactttaggaaggctcattggtgcgacagtcattgttgttggactctatgcgctcatctggggcaagaacaaggaccatgtgaagtcgcaaaacagttttgacaagcacgacacatttgagctgccgttctctacttctgccgttaacaatacaaccggtcccgtcctggcaacatctatttaaggctcgtgtccatgtgacttcctgtatcccgcacccatcgatttaaggctagctagcggcctagcatgtaatcgccaaatttccattaaaaaagaattctaggatttgcataacacagtttttctct

SEQ ID NO: 93537 - DNA, 1121 bp, Zea Mays
caacattataattaatataatataaataagtaccattcaatatatcataaataagcattgtcaaacaacgcatacataagtgtactctaaatctaaactaaaatacaactgtcaatgttcctgatgatgaggatcagaggcaggcactccctggacttgtgaggtccagaagatggcttgggagcctacagaaaaaatgaccaacctgaagcatcagacaacctgaagctctcctctatgtgcaaggtaaaaaaagaacagcttcgaccaacggtgaatcaaggagagagagaaaaaaaaggccgagcccacaacttgaaaacaaaagacccttttcatacatgtctatctctattacttatatatgagcagtgccatcgtcagcacctcctgtatgtatacctaggacgacatcagctggcgagggcgcggggacgcacgggtgtcttggatggttcaccataaaaacacattagaacgactctgttatccaaccgcccagaagagctccttcctcaatgcaaagcgtaagaagatcagtcagagttttaccttattggcaaggatcccagtaccacaccgctagagttgagagcggcagtagcactttctgcctggaaaaaaattgaggcccagtcttaaaacagctcgcagaataataaggcatttgaacggcagaccaaacaacttggaggcaccaagccaaccaaattctattcactccagccactaacagctcttcttacggaagtattatataatataacaggtaaagctttatttgagagaacaaatatccctagcgttctatgatttggaggtgatgtgtgtcctcacccatcaaacgatgctaaaagccaggcaacttttgcgcaaaaaaatacttccctaaaaaaagaagctgcacaaatttgaaggcgaaggtatgcttagatgaccatcacgaattccacaaaagcgatgcgggtagaatgatggtagtcgccaagaaacctcagtcgaaatacctgttagcagccattgccatgagccaacgatatactgtgctggttgaattgccatttctgcaaacttttagctgtacagaagggagattgtgtttggagtaaagaacgaccaac

SEQ ID NO: 93538 - DNA, 98 bp, Zea Mays
ctactatatcacaccacggcacacacacacacctacatgcactaattaaatcctcgcatcccatgtatttccaatttactcatcacgttaaacaacac

SEQ ID NO: 93539 - DNA, 104 bp, Zea Mays
atttatcatcacatgtgaacaccatatctaaaataaatatttacatcgtaatggagtttgattgtgtatttaaaatggaattgaaaaacagaaaaaaaaagaaa

SEQ ID NO: 93540 - DNA, 361 bp, Zea Mays
atgtttctgcttcacgaatatgatattttttggacattttcaaataatagcaaagccttattcctattttggtattttggatttcaggacttttagccccggttagtgaaggaccagagaagctttcgagttatgaatcgggtatagaacccatggggggcttggttacaattccgaatatgctattacatgtttgcgctagtttttgttgtttttgatgtggaaacagtctttctctacccttgggcaatgagtttcgacgtattgggtgtatctgtttttatcgaagcttttcatttttgtgcttaaaatagttgttggtttattttatgcatggctaaaaggagccttggaatggtct

SEQ ID NO: 93541 - DNA, 120 bp, Zea Mays
agtattactcctcattaggatgtatatattaatcatcctatttttaatatatattaatcatcctattttaattaggttctaatccaattagtagtaactattttcttttttatttaatag

SEQ ID NO: 93542 - DNA, 1863 bp, Zea Mays
atgggtgcccgccctcgctctcgctcggctcttccccgcctgtccttcctgcctcggcgccgccctcgacctcgcttgatctgcctgctcccagatgcagcagaggtagtcgccgtggcgccacctgtccactgcactgccccagagcctccaagttgcatatcggaattcggaagtgaagcgccccgtgattcgcaatcctcctctctggatctcgcggtggaagtcgtcggtccactcgatcagcgagcgagtcggtgccgcgcggcggattccccgacccgagcaaaggaaccggacatgcggccgcggctggtgctcttcggcgactccatcaccgagctgtccttcgcgtccggcggatggggcgccgcgctcaccgaccgcttcgctcgccaggctgacatggtgctgcgcgggctcagcggctacaacacgtggtgggcgctcaaggtgctgccgtgggccatggagggcgcggcgggcgcggacccggcggccgtgacagtcttcttcggcgccaacgacgcctctctgccggaccaggtgcaggtgcaccagcacgtgccgctcaaggagtaccagagcaacctccgcgccatctgtgcctacttcaaggttaagttatgggcttatcttggattcggatgtcttggattggttgctcacctatccgtcgcttgggttcttcgatcgcaggagcgatggccctccactgctgtcatactcatcactcctccaccgatttacgagccagcgagaatccgtatgattgtgcaatttctcttatgcaaaatggttgatagtgacctactttttcaggctggaattgaaggctgtaactactctagaaagttctcccacaggggtgacacatacagaaaaattgtcacattctggtgggacatcaaaggttctggaagtgctgatatctgtgatacatttgatatgataaaagaaccgggggagctcattgtttctcctaagctccagttcgcaatgcaaaaacagttccttcagaagagtgatgtatctcctggagttgctgagggtaaggcatgtgcagctgctgatcttagctcattgatagcttctaaagaagctaggtctcaaaatgatattaacaatgacaggccgaaaacttctctgtgccatgctgattccatgaaaataaaagttagtgatgaactaccagtgaagcaatggacatactgtgatcatatgtctgatttacacagttctttcacatctgcaaataatgatatagccaaagaaatgaatgaagtgctatttaaatcattgtctgctgatacatctgcccttgatttgttggcatcaagtgatcttcttagccaacggaagattgatttgattggcaaagaaagacttggagtacgtaaaaccaggctgaggttgaaagagcagattcttacaatgaagttcaagacatatcgtcacttgtggaaagaggatgtacgactactttctacaaagaaacagcgattgaaatctaataagcgcattgatcagaataaccgaacatctcaaattggatctcagaggcaacgtttttctaaccattcacgattagccatgcctggacgccagcgaagtgcagctctagatgtcggcgaagtgcaggacaccggtgagtcggtgcttctcgacgtgcgcgagcgtggcgttccgctgcacgtgagcctcggcgtcggcggcgttgaagttgtcctcgggcttgaaggcgaggtgcctgtacatgacgccggtgctgcggggcacctcggcggtggcgggcgcgtcagcggtgggctcgacgacgacccaaacgacgggttcacctctcgattatgtgtccttatctaa

SEQ ID NO: 93543 - DNA, 462 bp, Zea Mays
atggggaggagagtggcgaagctcgatgaccacgcaaggcgaagaacggtgctactgtggagaatcgacgacgtgcggcttgttgtgcatttcgtcgagcacatatcaagcatcaatggtgcaggcgcagcagcacgcaagccgggaggaacgaagggaggaaggggcctacgctgtggaggagatggagtccttgctgctagtcgttggggacagcgagcaggcagggaaaggcgccatgagcaacatgagctcgccggcgagcaggagcccggtgaagccacgatggcgccctgcaggggatcctcggcgagcagtgccatggcaaggttggtgaggccgctcgctactgctggccgtggagaagggggaggcgctggagggaagggacgccttgggcaggagctcggaggccctggaaataatggagcccgcgccatggctggagagcgcctgctctaa

SEQ ID NO: 93544 - DNA, 499 bp, Zea Mays
atgcattccaaaaatagaaactaattcaaggaaaagtatcacgacagtgtaagaaatgttcgacactttccaaacatcgtcacatatatacaaccagcggcctccaaaagtaatgtacaaatagcagccaagccgcctaccgcctgtgggtcgattaattaggacgatagaaacctccaaaggcgtggtgtacaactaaaggcctcaggtacacaaacaggtaattaacactctccaacgcacaccaggaactgctctcctctggccgccccttgtgcctttttctatagccgccacgagcacctgctcaatttattttccaacaacagtaggacatgttgtcctcttactgcccctcatgtgccttttctcaatgctctctgcagacgtcaggacccctcactgcttagtttaccttccaacacagcaaggacctactctgctaccatcaagacccctcactgctcagtttatctgccaacacatagaaagattcact

SEQ ID NO: 93545 - DNA, 83 bp, Zea Mays
acagaaatcacagatatttttggatcgagatttttagcgacaactaaagggtcgacaatactcgcgacatggtttgatttgat

SEQ ID NO: 93546 - DNA, 438 bp, Zea Mays
atggagctctgcgagcaagagagacgggcgcgcagaggagcaaagagggagcgccatgggggtgtcgcggctggaagaggagcgagcaccacagggctctgcgcggcgtcagagagctccaaccagggagccgagcacagggagataggcggccgagcgccagggagaaggaagagagcgccgggagagaaggggagctcgcggcgtctggaaatatccaaaggtgcgctacgtaagaaatggagaggagaggggataagaagaggcatccggtggaaaaatcttcaggagatggacaccagcgcgcggcggtggaaaaaatcagacgctcgctgggcatcgagctgggcgatggaagggcctggcgcgtacgatggctgggatggatgccgacgtgaagagattttttttgctggagatcgagcgtggatggattag

SEQ ID NO: 93547 - DNA, 153 bp, Zea Mays
taagcatgaaggggttcaattccattttttctacactacatatgttggtaaagcacttacctaagtttaagttatggaaaattcataattcatcggttattttagataatactaaaaaacaagatagagtgagatacaaaagtgtaaaaaaga

SEQ ID NO: 93548 - DNA, 735 bp, Zea Mays
atggccgcccagcttcttccccatggcgccaccccctgcagcttcacctccctgcgccccctgctctccccttggtcgctgccttctctgcatgtgcgggattgccagcaggagctccctcccttccatggtcagcgcccaaagctccagcccctcctcccaagggcaccagcaactgaagcccttcccttgttctccggcagcaagaagccagcgaccatctcctgctcgaccacctctatgcgcaggggcttcttctccattgatgctgcccagctctccggccagcagccatggcgccgaggattccctgcgcgcgagcacaagccccatttcttctaccgctgtccggcgcccagcagcatccctgcgccgcaccgctgctccatttcctccccatcttccccaccaaacagcaaccgcagcgagtcgccgtcgcccatggccgagcccccttcctccctggccgcccagctcactgtccagggcgcccagaaaattccagcagcgagccccttcctcgctgttcgtcgtggtgcccgccagctgttcgacaaaatgcgcagcaagccgcgcgctgcagcagccctcccgttcgatctccactcccctcgtcgcgtgtcgtcgctctcgtgctcgctgcgcagccccatccgcgacgccgtcgaaacccttggtgagaaacaccccgctgcccttgctattatcatatttttgtgctcggaaaaatattga

SEQ ID NO: 93549 - DNA, 359 bp, Zea Mays
gaggtgacaagcacgcaaggacgtggagtcagagcgcgtcgtgcagcaggcgctggatcgggtgatgaagaaccggaccaccgtgttgctggcgcaccgactgttgacgatcaagaacgccgacgacatcttggggttgcaggacgacaagatcattgaacaaggggtgccagcacctgatcaagaacaagaaaaacacctaccacaagctcatcaacttgcaatagcagcaacagatgtcgcagcagagcttatgagacattttaatacaaaaatcgcgcctatgtaacttcctatggcccttttcggtagaaagtggttaatttaactctgtagccatcagtgcaaagcttaaattt

SEQ ID NO: 93550 - DNA, 730 bp, Zea Mays
gtcactcgtgaggctgaatacactgatgacacaccgacacctcccaatactttgcatgctgctttggtgctgagtaagaaggctcacgctcgcatattgtctattgatgatgcacttgccaaatcttcccctggctttgctgggctgttcctttcaaaagacattccgggtgttaaccatactggaccaattatccatgatgaggagtttttttgcatctaacattgttacttgtgttggtcagatcattggaattgttgttgctgatactcatgataatgcaaaaactgctgccaacaaagtacatatcgagtattgtgagctcccagcaattttatctatagaggaagctgtcatgattggaagctttcatccaaataccaagaaatgtcttgtgaaaggcgatgtagaacaatgttttctgtctggtgcatgcgatagaattgtatcaggacaagttcatgttggaggtcaagaccatttttacatggaacctcagtgcactcttgtctggccagtggattctggaaatgaaattcatatggtctcatctactcaagtagaagggagcattaagataaatcccatagctggaggtttgcagaactttaacataaacccacttaatttgattgggaagctgcccccaaagtggacgcaatgccttgtcccgcttgtcaactcgtccaaggtgaagattcaggggaagctcgtgttcccaatgatgtag

SEQ ID NO: 93551 - DNA, 513 bp, Zea Mays
atgccccaccgcgtcgctgccctcctcctcctcccgctcgctgccgcgtcggaggcgccgggaccggcggctgaggccgcgctgctggagcggcacgaggtgcagctcgccaagctagaggaggtggcggagtcgcttgcgaggtccgtccacgcgctcgagtccgcgcttgccagatccgcggacccggatccctcgcagcctgttgccctggcggcggccgtcggggaccgtcccacggccgcgtcttcgtcttctccgcccgcgctgctcgagctcgaggcgagtgccgcgtcaccgcgctcctcgtctacctttcgccgcggagccgccaacatttgtcgtctcttgcgctgctcgccactgcggccgcctctccagccgccgctccccagcagctcccgcctcctcccctctctctccagccgccgatgccctgcagccgccgctgctccctccccggcgcccgcgcccatcgccccgcgacgctccgcgtcctcccaccgcggctga

SEQ ID NO: 93552 - DNA, 133 bp, Zea Mays
ctctattgctcgctaaattcgggcgttgcgtctctttccccacttcttttcgctaaaaccctacctacttccaaaactccaagtcgtataataataataaaccctaaaagtattttatttggttgtttgtaat

SEQ ID NO: 93553 - DNA, 330 bp, Zea Mays
atggcgtccggccctgcactcttctccctcggcgcccctctgtgcagacccacgctgctactccggccggcagcagccctgcgccgtgcccctgcagcagccctcgctcgctctgtcctctactccgcaacaccgccattgtccttgcctaagcgcagtccaaatccctgcaacaagcctcgccgagccttgccccgcagtagcatgctccttcgcctcgcgcgtgggtgctcgacgaatcgcagcagcgagccacgccctccggcttcgcttcggtctcccatgcgcgacgacacgttcgtcttcgcgccacatgtgcagcaaccctga

SEQ ID NO: 93554 - DNA, 187 bp, Zea Mays
ttatcagaatacgatacttgagatgctactaatttgtttgaacccggataaaaacttatctgttttccgaaccgaattgatttctctacctagaatagcacactaaagaataatcccaaattttcttagcgatgtttacgatgtagacagtaattgtgacacggttttgatttggtgaatactcggg

SEQ ID NO: 93555 - DNA, 543 bp, Zea Mays
atgccggagctggagatcgagcgcgtgcacagggagttcaagaagagagagacgcagggagatgggagggcgccgagttgggtccgagccagggacgcactcgcgcggaaccagggagagggagagctcgacgagctgagcgcaggggagagagaaacagggcgcggtggccatggcgagcagggacgagctggaggaagagagggcgagccgcagggaggagcgcgcagggaagaagcgtgcgtagggagctggagcatcgccggccatgggagagagaggcagctgggcgcgcggcgagcaccagggagggctccacggcgaggaggagaacggaggggtggctgggcacgcgccatgggagcgtcaaggccgagcgaacgcagggagatcaacgccgtggggaagagccgctcggctgggcgtgctcctgcggaagaaatagaggccgaacgcctaggagagagaaaggagataaggacgctgcgcggggctgaaacaaaaatcccagagggcggcgtaggatttttcctcctgtcttga

SEQ ID NO: 93556 - DNA, 335 bp, Zea Mays
tgttctgaacattgcactgagccaccgataattgataacacaaacaacatatgacatccagtgagatagccatagtagttcatatttcctgaccatttgagatgtggcttgcatcattgatcatcccatcgtgttttatagcagtgaataggaacattgcagcatttggtgctggaactgggcgcctatccactgatcagaagaaaaagcttctttggggtaacaaaaagagtaatccttcggaggagataggtttcagtgaatatatgaccctttttcgtattattaatagaataatgccaagtaacagtatgaattatatagaactatgtgag

SEQ ID NO: 93557 - DNA, 665 bp, Zea Mays
gtcacctcttttcctcactgtccctctctgttccctcgacggtcaggcctctccttaaccgcggatgccgatctctgccaccagcgcacggtcgaccatcatcctcccccgttttgctgtgtgccttggtcggacctcaccttgccaccgtgccgtaatatctctggcgcatgcgtccagcaccacgcaccgggcgcttggctactccttgcctcatctacaccaggccatggctccctgatgtactccccattctggccatcgatccctggtgttggtgctccctttctcctgtgctcgctaggtattcgctgagacgcctgagccatgggattgacgtcgttcttgtgtattcagaattgattgatgttggtacgctagttgatcacgtgatatggaggactagaaccgagtcgaccacaagatgttgttaagcgcgggtttcttcgtaaggtgatgctgatggataaagttaaggatggatggcctgatcaactgccaggacaaggaagatcatcaagagatcgtcgtctaaccaacactgacttagtgttattccaggcaagccccgatgcatttgccacctccttgttgttataaaacttttatcacttatatgttgcattaggtgataggagttgagtgatgaaaaacaattgatgcat

SEQ ID NO: 93558 - DNA, 109 bp, Zea Mays
attattctttcattccctttcttcaaatttcagttttccaattctaatttaaattcaaatttttcagagttcagatttcaaaattatatgcatcacataaaactccagt

SEQ ID NO: 93559 - DNA, 745 bp, Zea Mays
gtgctttggttgtgttggagtgttggcgtgggtcaaaggagcaacactacatgtatagctcatgatgtgttggcaccctaggagtcttccaccactatgttgtgtgcaagttcagggagtgtctgcctatatttcaactgccttagggctgaaatcagtgaagccttctcccctgccttgagttctgaccatagtgcgcagcaagcgtgtggtgattcttttgttcggggtgctgctgtgcgcgccattccccttgtctgtggtgaccaagctggccggttgtccacctcgccgtggtcaggtcagtttggtgagttgctcacccatatcggagccgtgggcagattcaccgcagactaagcaacctgtgtcttctccgagcagctttgcgcaagcaccaggatctagagctcccaacagaaggagtgaagattcaagatgaagtggtagttgaagaggagtttgctccagtgcatgttcatcaagtggatggaggcatctaactggttattgggtagaaaggtcttgagcctcttctctgcaacaaaggcaagccccggtgcatttgcccttccttgcgttttaaaagatttttatacactttaagtctagtgaaatgtgcatgaagtttataggagttgcctagaaactacttgatgcattgactaccttgatattcattccatttatagatacttcttttgaagtattaagtattatttaccaaatttgcttagtccggctt

SEQ ID NO: 93560 - DNA, 108 bp, Zea Mays
ctttcaatttcaagatttaaggattcaaactcctattttgaacttcccatttcccaatatcaaaattcctactaatgtgaatatatactctactgtttacaatattat

SEQ ID NO: 93561 - DNA, 913 bp, Zea Mays
ggtgtcgctggccggaccaaggtggactcgcaaggactaggagcgtgcgcggcaccagagaaacgcgaagttgctgcggcgtgatggagattgaggccgagcgagtcgagatggcgtgctggcgaggaagacaagtacagccggcgagctgagagatcacggcgcgagctctagggaacctgcggagaagaggacgcgcaaaacgtgacaaacgacactggagcgcgcgtcgcgcagaacatggtgctgactagaacacgacgccggcgagctgagatgactaaataagtgctggcgagcaggaaaggcatggttgacggccacccgacagcgcgcacggttggaaaaggcagaggtccgagcagggagattggcgcgctggagcagcaagacaagaccgcgcccaggcgagctggagcaggggcaagctggggagccggcgcccaccagagaagaagatccggcgcagagagcaaccagagagaggggcgccgaactgaaacagggaggagcgccggcggtgaagcgtccgggcgagctggagactaggcgaccgagcgccatggcacagggcaaggccgagcagggcgcaatccgagttgggcgagctgggcgcggcgctggaggagagatggagggagagagaagcaagggggcgcgccatgggaaggaccgagctggagctggagctaaagccggcggcggggtgctggagcgtggtgggcgcgacctgcagagaagcttcgcgcgtgcggagagaaggaagaagccgagggaggtggctggagggggcttggctggcagatgaagcactcggctggtcggacttgggcagccgttggccgagcagaggagcgcggtgtggaggctagcgactgcgagaggatgaagacggctggagaaaaaaaatcag

SEQ ID NO: 93562 - DNA, 365 bp, Zea Mays
gtttcagatccaacaatggcgtccatgggtttcagctatgcgcagatccacgtgcagcaggagagatgcaggatgaaggctcaagagaaagagaagaaggacaatgaggccgtggacgagggagaggaggctcatataaacgggaggcctactaaggttgaagacaacaacaaggccggcggtgttgggggtgcaagcgggagggtgcacccctgtgccaggacggcagcaccggcgccagaccacagtgcccggtgacgttacataggttcacggtccaaagttacgtttggtttaatttgtcttgtgttttgtgtcattattttcctgtgctgaatgtaaagtgaataaagatggtgttatat

SEQ ID NO: 93563 - DNA, 2687 bp, Zea Mays
ctagtgactaattttcaatccatctatttttagtcttatggggtgtttgttttctagagactaatttttaatccatcaatttttagtttagattaaaaaatagtccctaaaaatcaaacaccccaattctaaaaaagttttttaacatgcaatacatcgctaacacagaatttaaagcatctaagcaaataaaaaagggaatagtatgaacttttatttggtggtccatcgagagcccattagtccagcacgaacccaagttccaccagagccacacgttttcactgctcccacgaaggcacaccgcacacagccgcggcctgcaggcgacggtgacggcggcggcggcgctccatcctccgccccttcccttactcgcgttcggcacgcaggcgacggtgacggcggcggcgctcaggatcgggctctcagcgacggcggcggcggttttccctcccggctctcgccagtcgcctcgcgctctcgcctccggtcctccgaacgccggccggtgaccctgctggatgacatgagcacactaaatacaatcctgatgaagatggcaggattagcttcctgctgagttttgtcctacaagattgcaaagggcagaatgtcagctagggattctaatcattcatataaatgttcggatgattctcaaatgccgtactacaataactcagcacctgtaggagaaaatggtaggatccatatggcagaaaacagtctaggacatcattactcatcctccgatattggatcacaaaggatcaacaattccaaccctcaagtatttgaagcacagtactgcactctggaatcatcctcagcaaatggtgtttatcctgcacaaagctccacatcttctcatagcatctcccctttaagtgggagccccctgtctcagcatgacagccactcagaccacacatatagttctcctccaagtgcttcctgtctaactgaggttgcagatctcctgattaaacaaaaagaattagagaattccattgttggacctggactggacattagttctgactgctctcggagcttgttgcaagcccatgttccagtgagaccagacaactggagacaacttctgggaattaatggaggagacttgatgcaagtagtcatagcatgtggtaaggctgttgcagagaatgatgtctttgcaacagaactgttaatatctgagcttggtcacctggtatctgtatctggagatccaatgcaacgacttggagcctatatgcttgaaggaattgttgctagactttcttcctccggcagtatgctatataaatctttgaaatgtaaagaacctacaagctctgagctcatgtcatatatgcatctcctttacgagatctgcccattctacaagtttggttacatgtcagcaaatggtgccattgccgaggctattaagggcgagaactttgttcacataattgatttccaaattgctcaggggagccagtgggttactctgctacaggcccttgctgcaagacctggggggccaccatacattagaatcactggtatagatgactcaaattctgcttatgccagaggaggcgggcttgatatagttgggaggacgttgtgtgatgttgctaattcatgtggtcttccttttgagttcaatgccgttccagctgctagccatgaggttgagcttcagcatcttgctataagacatggggagattattgctgtgaattttgcctatcagctacatcatgttcctgacgaaagtgtaagtacagaaaatcatcgggataggattataagaatgatcaagagcatcaatcctagggttgttactctcgttgaacaggagtcaaatacaaacacagctccattcttcccaaggtacatggaaactctcaactactatacagccatgtttgagtcgatagatgttgctctcccaagggatgataggaggcggatgagcgcagaacaacactgtgttgcaagggatattgttaatttaatcgcatgcgagggtgctgaaagggttgagaggcacgagctgtttggaaaatggaagtcaagatttgcaatggctggatttagaccgtacccactgagttcagttgtgaacaacactatcaacacattgttgcatacctacaacagctactacaggcttgaggagagagatggtgtcctttaccttggatggaaaaacagagtattggttgtatcttcggcatggtgttgacatttcctctgcaggttccatcgcactttggcctccatctgacgtttctaaggcaccattatgcttgtctggtatactcagtatatgcttgtatgtaatttgcaaccataccttacccaatggttatcttaccaactagatcttcatggcaaggtgaagtgtcacttaaaatctagaagttgtaactgtcgtgttgacgctagatatagatagttctgctttggtttgacatatgcagatgtgctgtaatgctcaggggttatgctaggcaggcccaagagggtgcctgtttgttatctatcaggctactgtgttgccgcctgctttgtgtgtgcatatatatttggaatgctactgtcctttctctgggatgaagtggattgctaaagtgtcatgtttttcgtaaatactatatccattctcaaatatttgtttgttgtcagct

SEQ ID NO: 93564 - DNA, 597 bp, Zea Mays
atgcaggccatgcagcaggagttggccattctgaggcaagccattcctgttgctcctgctaggcctgctcagggtgccggtggtggagttcagagaggcgttgtccctatggctgctgctccaggtggtggggctgaggtgccccttcccatcagtggactctctctgatgcagtggacgggcatgaagctggacgcctttgatggcagtggtactccgattgaggtggcagattggctgacttatgtggagggtaagatggatgttttcgagattgtgtatggggatcgtgttcgttttggcacacagctgttgaagggggggctcaaatttggtggagaggagaagaagtcagtcacagagtatgaagtgggctttaacaagatggttcactttgttcctcatgtggcttacaatgaagtggagaaggcaagccagttccgtcagcgcctgaaaccctctatcaggcatgctctgggtgcctttccgctggtggatttttgtactactgtggagcaggcattgggcatggagatgcagcatcagtacaccatggaatctcagaagtcttcgagtgttgatcagcctcgtggctag

SEQ ID NO: 93565 - DNA, 1500 bp, Zea Mays
ctcgccggttgccaccgctcagcttcagaaatatcccgccgtcgttcggtggtatttatctccctagctcgctcgctcctggccttcccctgccggcgcgcctgttccctggccgaagccacctagtcccaggtccggtcggccggctcagtttttttttctagtaccacgcgtcgtgcttccccttccatccgaccgaagctcccagctccagtcatggcgcgtccggttccctctcccatggctccctgtccgaccggccgagatccctccatggtcgcgagctcagcccctgctctgctctcgctaccgagttcctctgcgcgtcttctctccctgctggcgcgctcaaattcctgtgctcgccggagctctccctgccgtgcggctacagctcctgcgcccggccaagtttctctgcgcgccgcagttcgcccagcccctctgctcgccgagctctatccgctccccatggtcgagcttcctgcgcatgctgccagatccctgcaccagcgccgtagctccctctgtctagcagcttctctctcctggagtttctttgtgttctgctcagaccctgctccattccctcgccagcctgtcgcgcgccctggtcggattccctgcgcgccgcgtgagctcgccggcgtgctccccatccggccatggtgccctgcgccggccgagtttctctctgccgcgcgcagctcgcccaatcctctgtgctcgtgccgtcgttgaagcttttggatgcgcccgcccagctaaccttcctgtgtcgcgcgcgcgagttttcttcgctgggtcttaattcccgtcgcgtcgtcgaccttgccaaatgcgttcgtcgtttagccctatgtggttaggctcgttgaccgtgttcgctaccgcgtgcgcttgttcctaatgcgcatcgcacagtagtagggtctcgcacgcgtgattttgaagctatgcgcgtttgtcgtgccgcgtcgtgtgccgatattcactcccggcagacctcgccatcgaccatgttcaagtaattgtttggctcctcgcatcccgcttattcgataaaacacctaaatccatagactgtcaacgtactgctgccatacgtgactgtctctgtcacttgcgtcagctcgtcaaacatacagctttatatacgttaccctctcgtatcgtcgtcaagcttgtcgaacctcgttcttccctgctcgatctcgtcgaaccccaaatcccggacgttaggcaaaaataagtgaggtacctgtgcatcgcttatcaagtgcttggtcggagacttcaatcgaaggttgtcgtcgatccatgcgtcatcaagaatcccaagagtcgggtgaagacggaggccaacagcgtgatattccccaagtgctcgacaccagagctgaatcagaacccttgccgtgtttgcggatagtccgtcagatttagaatggtaagccgattcaaaattttcgttagcttgattattaaagtagttcgatg

SEQ ID NO: 93566 - DNA, 552 bp, Zea Mays
atggcgcgtctggttccctctcccatggctccctgtccgaccggccgagatccctccatggccacgagctcagcccctgctctgctctcgctgccgagttcctctgcgcgtcttctctccctgctggcgcgctcaaattcttgtgctcgccggagctctccctgccgtgcggctacagctcctgcgcccggccaaggttctctgcgcgccacagttcacccagcccctctcctcgccgagctctatccgctccccatggccgagcttcctacgcgtgctgccagatccctgcaccagcgccgtagctccctctgtccagcagcttctctctcctggagtttctttgtgttctgctcagatcctgctccattccctcaccggccggtcacgtgccctggtcggattccctgcgcgccgcgtgagctcgccggcgtgctccccatccggccatggtgccctgcgccggtcgagtttctctctgccgcgcgcagctcgcccaatcctccgtgctcgtgccgtcgtcgaagcttttggatgcgcgcgcccagctga

SEQ ID NO: 93567 - DNA, 721 bp, Zea Mays
ttttaacacaaggagcactagactggtcggagatatgtagcgaccccagcctcacgcggtcacgcctcaccatcttcaccggcagcacaccacgccgccgccgccgccgtcccacgcattgtctgttgctcagcttctcctagcccagctcctgctagctaggctaggcctaggctgctacatactgccatcatccatggagtcgcctcctgatcaggcagcggcggcggcggcggcgcgccaggacaaggagcagcgggactacagactcatcgcaaaagccgtggacgaagcgtaccgggcggtggagtgcgacggcggcgggtaccccttcggcgcggtcgtcgtccacggcggcggcgacgacgaggtggtcagcagcagccacaactcggtccggaaggacgccgacccgtcggcgcacgccgaagtgaccgccatcagacagccaggcgtgcaagaagctggggaaaaccagcctcgccggctgcgagatctacacgtcctgcgagccgtgcccgatgtgcctggggctcattcgcctggccaagataaaggaggtgttcgagaagaccaagggcaagtttcgcaacaagtaaacgcgctggagatggcgccgggcggatggctgttgcctgttgctagtggaatggttgccgtttccaagctttttgtccgggggacctttgatcagaggtcacatgcccagagaccggaataa

SEQ ID NO: 93568 - DNA, 714 bp, Zea Mays
ttttaacacaaggagcactagactggtcggagatatgtagcgaccccagcctcacgcggtcacgcctcaccatcttcaccggcagcacaccacgccgccgccgccgccgtcccacgcattgtctgttgctcagcttctcctagcccagctcctgctagctaggctaggcctaggctgctacatactgccatcatccatggagtcgcctcctgatcaggcggcggcggcggcggcgcgccaggacaaggagcagcgggactacagactcatcgcaaaagccgtggacgaagcgtaccgggcggtggagtgcgacggcggcgggtaccccttcggcgcggtcgtcgtccacggcggcggcgacgacgaggtggtcagcagcagccacaactcggtccggaaggacgccgacccgtcggcgcacgccgaagtgaccgccatcagacaggcgtgcaagaagctggggaaaaccagcctcgccggctgcgagatctacacgtcctgcgagccgtgcccgatgtgcctggggctcattcgcctggccaagataaaggaggtgttcgagaagaccaagggcaagtttcgcaacaagtaaacgcgctggagatggcgccgggcggatggctgttgcctgttgctagtggaatggttgccgtttccaagctttttgtccgggggacctttgatcagaggtcacatgcccagagaccggaataa

SEQ ID NO: 93569 - DNA, 438 bp, Zea Mays
atgagctcaaaacaagtgcatgtagcaacggatcgtctggctacatatggtgaggcgatgtctagtcagcatggatcggactatgactggaggaccgcacctattgatcctcaggttgtgtatgcgagtggtggaaaaccccatggaaggtactcgatgttcgataacgtcatcgactcgagccaggtgacggttcaaaggggagcaactagcacaagcccaagggatacaggttccgatgcccccccacctccacctcccatacattttccttggccatcacctccacctccacctaccgaacatcaggtatatgagacccctccagctaccttgccggtgcagcaacaacatgatggcttagactttgtcgatgcgttgttcgccagtggaggtagggagcccatatcgctgattcctgatgctgatcgacagtag

SEQ ID NO: 93570 - DNA, 999 bp, Zea Mays
atggacgcaaagaaaccatacatgctggctattactacagtagcaatctacaccggcatgtacgtggtctcaaaggctgccttcaaccagggaatgaacagcttcgtcttcgtcttctaccgccaggctgctgcatcgcttctcctcctgcccatcgcacttgttctagaaaggaacacgttaggcatgaatctgtgcaatgcaagtgtgacgctcacgtcagcaaccgtggcgtcggcaacaggaaactctactcccgttatcaccttctgcctggcactgctactgaggatggaggtggtgaagttaaggagcgtctctggcatagccaaggtcaccggcgtagcactgtgcctggccggagcgttggtcatcgccctgtacacggggccgtcgctcagcccagtcaaccgccatcaccgtgcctctggcggcgcccatggcttcaaagctccaacccgtggggggacatgggttacaggcacgttcctgatgcttctgtccaacgtcacatggtccctgtggacggttctgcagggcgcgctgctaaaggaataccccaacaagctcctcgtcacgacctcccagtgcttgttcagcaccgcgcagtcgttcgtcgtcgcagcggtggccgagagggacttctcgaaatgggcgctcaagcttgacgtcagcttgatcgctgttgcttacaccataaaaggacctgtcttccttgctgtctggaacccactctgctttgtgctaaccatattctgttcctccttcttcctcggcgagaatgttcacctcggcagcattgtgggtggaatcctcttggtctgtggcctttatagcgtgttatggggtaaaaccttggaggttcatcagactgtggaatctggtgataatacggtcggtgaagtgcaaaatggacaagaagagaagaatcatcaacagaaggtgctggagaagggacgccaagaggaagcatcaatgacagcacccggtgtagtgtga

SEQ ID NO: 93571 - DNA, 1067 bp, Zea Mays
agcagtcttatcttcccagccgcacctctatccccagccgatgagctcgatcctccttcatctccctcctctcggcgtcctgctcggccctatcatattccctggcgcccgcgcgtgaaatttctcgcccagatcctttgttctccctgctcgttctccagtggagtcttctctgcgcggcgcgctctgctcgcccaacgacgccgtcagccggatctcctctgctctctctgctcgccctggcccgccgtgctctgctcgccacggccgcgtgagcggcgagctctctgccgcggcttcctttctccctcggctcgccccgatggcgctcggccgagcttctccatcttcctcggtcgcctctctctgcgcgccggttgccagcccggtgttccagccccacgcgcgctgccggagctcgctcctgcgcatccatggcgcgcacccctctccttcctccgtgctccattgcgtcgagctcctcccagccgagttcctccccggccccttgttttccccatggctgaagcctcttccagctccagcgtcggctgctcctccctggccaaaccgcgcccctgtagccgcggcactccctctggtcgcagggacgcgcatgccccatccccattggcgctcggtcgcccagctccctgttcctcccactcgcccaactcggatctcgatttcctgctcggctcgtccttggcgctcgactccctgtttcagtctgtttttgtcatcgcgtcgtcgtgttcgccggtagccgccccgtggtgcttgtctccggtgctcgcttcggtcgcggacgctatcgagcccgtcgttctccttgtccagtgctcgtgtggttttctgctcgccagcgtgccctctcggctcgctcggccttaatccccatcgcgttgtcgacctggccgattgtcgtcgttaatatggagagattccaagaattgcggatggaagagaaagtaaagctccagtctatactcatcagttgtctgaccgaagacttcaatcgaagactgtcgccgttctcgcaaatattgaatgaagttaataacggt

SEQ ID NO: 93572 - DNA, 1709 bp, Zea Mays
ccacctccttcgtccttcccctacccgctccggcacgaccccaagcgccccctcggccccgcaggaccatcgacatcgaagaatcccaagagcccaaatcgcatggccatggcgccggagcccttcttcactccgccgcccgcgccgcggcacctcgccgagctccgcatcgaccccgcgcatcacgctgttgccttctccgcgccctgcgccgccgacgcgaggcgcaagcgccgctgcctcctcccggcctcctccgtgcgcaagaggatactcctcgagcttcccccctttgacaccacgccgaacaccccgtcaactccgccgacgcccccgcccccgcccatctcaccgatggtgccgcgcgccgcgttctcgttcgagccgggactccgcccgcgccagccaacctccgcggggggatccgaggccagctgtgcggggaacatgttcgcgttcttggctgcgccggaacggcccaacacgcccacgggtcccacctccaggggtggcttcgtgttcgcggcttcgcccgagggtccgctgacgcccacctccaggggctccaacaccggcaggctcacgttcttgccttcgccgaagcagcctttgacgcccatgtgctccactgccagcggctgcgaggcgtctttgatgctcaccggtagcggcgcagccgcgtccctccactccgcgaagacggcgcgcacggggtctacgacccgaggcgtcgggttcgaattcttccctccgaaggggaccgcgtgcgcgaaactaggctctccatcttccgctgcagccaagaagacgacgctcccctccgtgggcctcggagcaccgtcgttcgtcttctcggcgtcgcagacgctgcctccgcggcgcggcgggagcaggaagcgcccacggcccaacctccgcatcgagacgactgatcgttccatgggtccgcgactctgggaggaagatatgacgccgctacagcagcagctcaccccgtcgccgcagaagctcgcaaagacgaactccaacgtcaaccccgcggcctcgcgctcgtctatcatgtcggagccgtgctgtgcgttcttcgcatcgccgggaaaggcggccaagcaggaagccaagaaagcccccagtgaggcatcccgttcgccagccgggtcacgctgcacgtcgtcgaaggcgaggacttcctcgccagaaaatccgagaaagccggagcaagaggtggaagtgtccagcgcaatctgctccggtgccgagctgctgctgcgcgtgacctgcaagtgcggtgtccacaaagagtttagcttcgaccacggtgtctgatcaagtagctcctgtctatcttcatcgtcggtgttcgggttttactttgcaaatcactgaagtcttagaacaaggttaactgcaccgaattttaaatgatacatgctcacgtagaaactagtttaagccttgagaagccgcagtaacgtagaaattaaacgagtatgtttcttggttgatttgatcttgtagtcgtgtgcttgtggtacatacatgctcatttggatgattggtagtggtagagtaactgagtaagaggtatcattccgctttatttggaagcacacatgattttgatgtctattaacatgttcccttgtgtgaaacgaccatagactcggccagtttaatgtctgaactgaatgatagttctgattcttttg

SEQ ID NO: 93573 - DNA, 3378 bp, Zea Mays
acagatatcgagcagatactgaaggaagctcaacaccgatggttacgccctgctgaaatatgtgaaatactgaaaaactacaggaatttccgtattgctccagaaccaccaaacagaccaccaagtggctcactttttttatttgatcggaaagtattgagatacttcaggaaggatggtcataattggaggaagaaaaatgatcagaagactgtcaaggaagcccatgaaaggttgaagtctggaagtattgatgtgcttcactgttactatgctcatggggaagagaatataaacttccaaaggaggacttactggatgttggaagaggactatatgcacattgtacttgtgcattatcttgagacaaagggtggcaagtcatctcgtgctagaggaaataacattattcaagaagctgctgtgggtagtccttcacagattatggaggtagaaagctcacttagtggacaggcctcagaatacgaagaggcagaatcagatatttattcaggaggagctggatacgactctttcacttggatgcaacagcatgaaaatggaactggacccgtgatagattcttctctcttcagctcttacacacctgcttcgtccataggtaattaccaggggcagcatgccacacaaaataaaagcttctatcctgttaaccaacataatggtcctctcattcttaatggatcaagtgacatgcttggaacaaatggccgtgcaaatcaaactgatcttccatcatggaattctgtgatagaactggacgagcctggtcaaatgccccatctccagtttcctgtcccttctgatcaaggtgctaccacggaaggcctgggagttgattacttaacatttgatgaagtatattctgatggcctcagtctcaacgatattggtgcagcaggaactcatgggaagtcatatctgcagttctctagtgctactggtgatttgtctgcaacagagaacagcctccctcaacaaaatgatggttctctggaggaggcagccattggctatccatttttgaagactcagtcatctaatctatctgatatcctaaaagacagctttaagaaaactgacagttttacaagatggatgagcaaagagcttcctgaagtggaagattctcaaattcattctagttctggggggttctggagcactggagaagcaaatgatatcatcgaagcatcaagccatgagccgctggatcagtttactgtttccccgatgctctcgcaggagcagctctttagtatagtagattttgctccaaactggacatatgtgggttcaaagactaagattttagttgctggtaacatcctgaatgacagtcaaatcaccgagagatgcaagtggtcatgtatgtttggagaagttgaagttccagcaaagattttagcagatggtactctcatctgttattcgccccagcataaactcggtcgagttcctttttacattacctgctccaacaggttggcctgcagtgaagtgcgggagtttgaatttcgaccaactgtttcccaatacatggatgctcctagtccacatggtgaaacaaacaaagtttatttccagatacgccttgacaagttgttgtcccttgaaccagatgagtaccaggcaactgtatctaaccccagcctggagatgattgacttaagtaagaagataagttcactgatggcgagtaatgatgagtggtccaacttgctaaagttggctgttgataatgagccttctactgctgatcaccatgatcagtttgttgaaaaattgattaaggaaaaattgcatgtctggcttctaaataaagttggtatgggtggcaagggacccagtgtgttagatgatgaagggcagggcgtgcttcacttagcagctgcccttggatatgattgggctataaggccgacacttgctgctggcgtgaatattaatttcagagatgttcatgggtggactgcactccattgggctgcgatttgtggccgagagcggactgtagttgcgcttattgctctaggagcagctcctggagctttgacagacccgactcctgatttccctggaagtacaccagcagatatcgcatcagctaatggccaaaagggaatatctggtttcttggcagagtcttctctgaccagtcatcttcaggccctcaatctgaaggaagctaatatggctcaaatatctggtctacctggtattggagatgttactgagagagattcactgcatcctccaagcggagattcattaggtcctgttcgaaatgctgctcaagctgctgcgcggatatatcaagttttcagggtgcaatccttccagagaaagcaagcggctcaatctgaggatgataaaggtggaatgtctgatgagcgtgccctctcactcctttctgtcaagccacccaagtcagggcagcttgatcctctgcattctgctgcaactcgcatacagaataagttcagaggatggaaggggagaaaggagtttcttcttattaggcagcgaattgtgaagatccaggctcatgtgcgaggtcaacaagtgaggaagcattatcggaaaatagtttggtctgttggcatcgtggagaaagttatattgcgttggaggcgtagaggggctggcttacgtgggtttcggtctacagaaggttcagtggagagcagcaatggcggaacgagtagcagttcaatccaagataagccttctggggatgattatgattttctgcaagaaggacgaaaacagactgaagaacggctccagaaagctcttgcgagagtgaagtccatggctcaatacccagaagcaagagatcagtaccataggattttgactgttgtgtcaaaaatgcaggagtctcaggctatggaagaaaagatgctggaggagtcagcagggatggacttcatgagtgaattcaaggaattgtgggatgacgacacacctatacctggttatatttagttttcaaacctactttgttggatttctctgtagattgcctcctttgtcttgagtgctactgaattgatggcgcacatagctgataacccgaagtagcgttgctggagcagtggagcatgacctgacatgcttgaatttggacttagatgtagtatttcatttgccttatgtacagtagaatgttctctacatttgaggaagccttgtatttactgtgtgaaatcggtgtaaagagtttgacattagagatcttaccagatgacttaacggttgcatgtgtggcgtgcagtccagaagttaggaatttgacccgtcgtggctttctgaaccgatcaaaggctgtggccgtgctcatcatctactacc

SEQ ID NO: 93574 - DNA, 320 bp, Zea Mays
acagatatcgagcagatactgaaggaagctcaacaccgatggttacgccctgctgaaatatgtgaaatactgaaaaactacaggaatttccgtattgctccagaaccaccaaacagaccaccaagtggctcactttttttatttgatcggaaagtattgagatacttcaggaaggatggtcataattggaggaagaaaaatgatcagaagactgtcaaggaagcccatgaaaggttgaaggtaagtaatttcgtttatcagtatcttctctctaatgatccatttcaatgctggccaaccattatttttcaatggtaact

SEQ ID NO: 93575 - DNA, 1367 bp, Zea Mays
caccaaacatagaggcattccgcagtccgcagtccatccgcagtccgcagtccgcacgcacggacgcgccctcccagatctcccgcctccggcaaacaaaatgcccccactctcaccgcccgcatcgctgacccccgctgctggcggtcggcgacggtggaagtgccgcctcagtcccactatcgcacgtgaccgctgctacactcgctccttccgctccgcggggctccgcccggcggccattccgctccccgatggcgccgtcgtacacctgtggctcccgcctcctgccgccgaccccgccaagcccctataccctgttctgcttctccacggcttcggcgcacaagccacctggcagtgggcgcccttcctcggcccgctcctcgctgccggtctggccccctatgtcccggacctcgtcttctttggcgcctcatcctcccccgcagcagaccgctccccggtctatcaggctgcctgtgttgccgccgctatggccgcgcttcctggcgccccgcagcggtacgccgtcgtcggggtcagttacggcggcttcgtagcataccacctcgcccacgcgtttccggcagcggtggagcggcttgtactagtcgcggccggtgtttgcctcgaggaggccgatctggccgcggggctctttgccgttgaggatatcgccgaggctgcaagtcttttgctgccccagcggccggaggatctccggaggttggtggggctcaccttctgccgccctcagcggttcatgccgtcctgtttcatcagagattacatcagggttatgtgcacggaaaatgtaaaagagaagagggagttgctgtatgcattgatcaatggcaggaagctttcagaccttcctaaaattaaccagcaaaccttgataatttggggagagcaggaccgggtctttccattggaacttggattacggctgaaaaggcatctgggtgatacttccgaactaatcattgtcaagaatgccggtcatgccataaatcgcgaaaagccagcagaactttgcagactgataaagcactacatcgttgatccctcagtcaaatgtcgagatgaccgtaagggatcttggaagaatgcgataaagaggtttgttgggtcgagcctgaggaaggtggactcttctcgaccgctgctatagcaattgacgtatatatattgacttttacgtgcagcagatttgttatctgattgtgacacgcaattaagtaattaacgatgtgtaatgtccagtagccactattattgtgtaactagcattggcagacatctgttcaaaaaatacttgtgcaatatgtataatgcaaatgattaataatttcttagttaca

SEQ ID NO: 93576 - DNA, 342 bp, Zea Mays
atggctcggcattccatcgaacgggcaaggcgcgaagcgtggcgtcgaccactagctgcgataacacaaaaatttgttgacaacagttcatcgaacatcataaatgccggaaaaacagagaggatagcggggttctcaccgagggtcgacggtgtcgtgggcggggctgtctacaacaccaagcctctcacaggcattctgtcgagcacctgcagagcatgcgcagcgcgggactgcagggaaacgctgctgcaaggattgaccacggattgcatggaggggggctgctgggcgcttaaggaggagctagagaggcatcacgacaccccgatgtggctctga

SEQ ID NO: 93577 - DNA, 1635 bp, Zea Mays
ctggtttcggctaatcacgcatagcagattgaaaataccgagtcaaactcgtttcaatttggtcagtttatgtcatggccggaatagtcacgaaaattatccaaacgagatttggacagaaccgtctaagctgttattcctctgagttccgtttcataactcggaaaattaaatgcgtagccttataacgcgttgaccaattatgttcatcgcttaaaatcgtgatttaaaatatcttcgattgccattaagaaaaagagaaaagaaaattaaaaaaagaaaatatcttcttcttcgttatcacccgccgccccttcctccgatttttgttcaggccgccgctgttcgctcgtcgtgatccgctagccgcctctggataaaaatcccgccatggtgtccatctcctgcgtctttatccagccgcacgcctagatgtctgcgcgctctgctcctcttcctctgatacgcagcttcctccagcctctgttcgtcggcaaccctccctgcttccctgttgcgttccccggcagcgctccatctctccctcacggcactcgggctcggcctccatttccagctcctcccctgctctctccatggccgtcgggccccggctcgaccgcgccccctgctgcgcgcgctcgtgcgctctgcgctttgctcgttgtcgcagacagcggcgcccctgcttctccctgccatggcgccctccctgctcgttcccggcgcccagcctctgcgccgtggagtccagaacgccggctttggctcggccctcctcttccttccttccgctcccttcttgccggttcttctccctgcacgccggaactcgcccagcttgccatggccgccgagctcggccctaccctttgctgcagctcgcccccatggccgccccagccctgttcctctttctccctgctcgaatttggtcaagcccgcgcgcgtccatcggtctctgctcggatttctgccctgcccagctccctctctcctctctgcatctccctgtcgggcggcacccatcttcctgccgcgcgcaatccttcttggctccatcccctagcgccctgctcgctccctgcgtgtcgcgccattcttagctccctggcgcgcgcgagttcttctgctagcgctgctccctgcgtcgcgctctgctcgtggagttccttcgcggcgttcatctccctgctcagcttgccgcgccgaactgcgcagcgccgttgacgcctgccgattgttcgatactttgcgcggctagtcgcggtcatacatagcagtgcctgctctcagctccacgccccagtccctagtgcccgaccgtcgtcgtcactggtagtacgccggcgcagcgttcctgcacatcaacgccaacaagtcatcttgccatcgtcttcgtcgtatggagatcgtcgtgctgacacgtcaatgccgtcaatcgccatcctcgtctacactaaagatccgagaagattaggcgcggagggaaacaaattagtacatggcgggaaaattctcattgtggaagaagtgtgatttgatgcgacactcaccatgtattcacgggaaaagttagagctgaaagacatcgtccatttcatgatttcaagacggatttaattatggtaagct

SEQ ID NO: 93578 - DNA, 213 bp, Zea Mays
cacttctctgaaagcatggttcttgcctccctccttggagctcgtccattcgttgggttgggtgatcccttgctctcacgttcgagtgtttgctcgtcgtttaggccggtgagtgacatttttgctcattgcagtcacctccggggttcttcgcaccatggaaaaagatgctcaaaccctagaccccctcttgatccgttagacccccaaaca

SEQ ID NO: 93579 - DNA, 109 bp, Zea Mays
gatatgcctaataccttaaatgactcgttcacaattcacctgcatctttaccaaaacattccctcatcgcttgaaactcaacctaagcttcactacacaattttaggac

SEQ ID NO: 93580 - DNA, 112 bp, Zea Mays
ctcatttctccccctatttcaggtcctctccaatcaatcccctatttagctccctttatactttaagtggactatttgacataattgcattggttaagtctttacaagcatc

SEQ ID NO: 93581 - DNA, 1836 bp, Zea Mays
gccgcctcgcctataaatacggcgtcgcgtgcggccttctctcatcgccaagtttttttaactatacaatccaggaaggaagtcactgtcacttggtgagatcgatggcccgcgtcgccgccgtcctcgttgctctcctcgccctctttgccgtcgcggccacggcgcaggcccctgccgcgtcgcccaagcgcgccccagcccctgcgccacccaagatggcccctctcccgccgccgccgaccagggcccccatggcctccccgccctcgcctcccacgatgtcgccggcgtccgccccctccgccgacgctccagccacgagccccgccggtgcgggatttggcgacgcgatggccccggcgggagcctccgctctgactccggccgccgcgcccgtcacggagaagagcacagccgcatctgcctccgccatcagcttcgtcgccatcgccggcgctgtggcagccgccgccgtcgtgttctagacatccggaagtggatctgaggagctgcagctgcacctgagccgctctgctgttgttgatagatgccctctgtttgctctgttttacgatccattgtttatttatttatttgtttgtttgtcatttagaggtctgagacagagatgaggatgtgtaatcctatcaattttctgaacgggagttgtttctatgctccgcaagcaaacatatgacactgcaagctggtgtgtaccttgtggatgatgttctgtgcaaggtgtgcctcctcggcgacttccttggacgcgtgctccaggagcacgaccgctgtcctcagcctcccgttctcgggcagctgctcggccacttccgacgacaccttctctgcgacggtggccgcgtcctcgacggcctccgccactacctccgccgtgtctttcaccatatccacctcacctgatggcatcggcgcagagttaaattttgcatcggtgcagagtttcgcggcgcgcggtacagggctctttgctctactctgaatcagcaggaacgacgcccatctggaatgcagcattggcgctgcagcagcaagaatagaaccgacggccagccttgccctgcagtgcagcagaggaattaggagccgcaccgggacccactaataactgtacaacggacagaacagtcgagcaatcacaagatgaagaaaggcgtccgctccttgtcctgagactgatgctggctcggccgagccggcggacgtctcacgtctcccccgtggctggagcccgagaatcccgatcggaccaacgcctggaaacgcggtggcgccgccgtcgcggatccgagacgggtggtggagcggagcttctgggagtagagagacccgaacgacctgaccagggacgacatggccgattgctggaggacaaaacagtcagctcctgatcgctgggtccttatgcacatcgatcaacaacgtggaacgagcgcgtatatgtacaacatggacacctcgccacgcgcaacggcgtgaggattgaaagcgtgtccattcgttagcttgcaaggaattgttggatgtgaagttagggtgaatgatctgtgcacgtcaaaggcagtcgatttccggatcagatatagccttgggaaggcaaaaggggatgcggtgtcatgtgtggattgtgagacggatagcagacatgctagcatgctggtgccgaaacctgaagcttccaagcaacaacgttcgggtggatatcctttttcattttctcagttagttcggatcgacgtaaccctatgacgacacgtggcttgtaagtttcgtatatcatcataaacttcccgctttctttaccgatcaagt

SEQ ID NO: 93582 - DNA, 938 bp, Zea Mays
gctcttcgttccggccatcctgacctctagtctgtcgctacccatgcccctgtgacctgcctgttaattcctgtcctttccctgatgctgcgccaccagccgcctaattgccgcgcgctgcttgctactgtgccgccggtggcagaggtccgcatcctcgtaatcccttcctaacacgacatgagaggaatttaatgaactgttccttgaattgcgccaagtgggttgtggagtatatctcaaagtcttggaaccactgcgttggcattagtgggcatgcttacgaatcttcagttagatgcctatcagcggcaccttggtcaaagctgctaaactttgataatatttgattatgtgaagaaaattgagcttgattccaaaacctgaatattggggtggctacaaattgacaccgacactttttgagttctggcaaggacaacagtctcgactgcatgaccggttacaatactcgcagagagaagtagatgggagcacagtgtggcacatcgagaggttgtccccttgactgttagcctgtcaacacttcggtaatagcgttgaggttatcaccagcaaccaaatcttctccagctgcaagatgtgcgaactgccccaagatgttaccgtggtgattagatcccgtgtttgagtaccgcagcccagaagctcagttctgtgcggacacccttttcagtttccacttgggccttccattgtagcggtgggtgaggagagagtgaagtgctttgcaaagtcatcagatctcttttaggcccttgcgtttctcttccgtaaatggtatccatcgaaccaggtttctaaatcctgccgattgtgaacttgtgccgtgatacactagtactgcgggaataatgatcttgggatggcattgtcagcaccgtgctagtaaataaagatgcaatttgatttattcc

SEQ ID NO: 93583 - DNA, 2785 bp, Zea Mays
atggtggtcattcagggtggaattggtcctgctggcttatccgctgaggaccttcatgttcttgatcttaaacaacaacgaccgcgatggcatagagtggtggttcaaggtcctggtccatggaaaacgacccctggcagatgtatggcccttgatactacggccaagccatatgaatggagaaaacttgaaccggaaggtgaagggccaccaccatgcatggagatggagacggaggtgagtgcgcgggacgttatggccatgaaggatcacatagatctcgaggcctcgcagtcgcagcagcccaggaagctaccgcccaaggacctcaaggagatcgccgggagcttttggcttgtcgcctcgatgttcagcaagaagtggcagaattggaggggcaagcaatacaactttggagaatgcaagttgtgtttctgcctctcagccagtgtagctatatctgatttaaatcatactctgttacagggttccacaaatgttggaaaatctgcatttatcagtgcaatgctaagaacaatggcgtacaaggacccggtggcagcgacagctcaaaaatacaagccaatacaatctgttgttcctggaacaacccttggccctattcaaattgaatcatttttaggcggagggtggcatctggcatgtgaaccagttgagccagtccgccgaggcagcgccgcagcggtcccggaccagaggatgctggccgccgtcgcgtccagaacccgcaacaaatcggccaccaccgtcctctcccttgctatgccattcctcctctccgccgccagcgccagcaccaccaccaaccctcatcctctctccccgttccctcgcagccagaacaatagccgcgtccaccgcctgcaacttccggcacgccgcctccccagcttccccgcggttgctccgggcgcttcctttgctcccctcccgcagaggctaggcatggcgtcgctggcggcgtcagcggccgccgcggcggaggtgacgcacctcacgcagcgcgacgcggcggagatcgacgagcagctcatgggcccgctcgggttcagcgtcgaccagctcatggaacttgctggattgagcgttgcggcagcccttgcggaggtttacaagttgaatgaacatgcaagggtacttgttatctgtggcccaggaaataatggtggtgatggtctggtagctgctcgtcatctttatcactttggatataggccatctatttgctacccaaaacgcacacccaaacctctatattctggtctcgttactcagcttgaatcactgtcgatcccattcatacctgtcgaagacctacctaacgaattaccacgggagtttgatgttattgttgatgcaatgtttggtttctcatttcatggaacacccagaccaccctttgatcatcttatccaaatgcttgtttcattgagtgatattcaaaatccagataagcgcccagcaattgtttctattgatatcccttctggatggcatgttgaagagggagatgtcgatggaggcattaaacctgatatgctggtgtcattgactgcacctaagctctgtgcaaaaaagttcactggcccacaccattttcttgggggaaggtttgtccccccacctattttaaacaaatacggacttcagcttcctccttaccctggcacatcaatgtgtgtgagaattggaaaagctccatctgttgaaatttcatctctcagggagaactatatttcccctgaacttcttgagagtcaagtgatgtctgatccatttgatcagttccttaaatggtttgatgaagcagtaacagccggtctgcgtgagcccaatgcaatggctttgacaactgccaacaaggaaggaaaaccttcttcgaggatggttcttttaaagggagttgataaacagggatttgtttggtatacaaattatggtagccggaaggcgcatgacttgtgtgaaaaccctaacgcagcactccttttctactggaatgagatgaaccgtcaggtaagagttgaagggtcagttgagaaggttccagaagctgaatcagataaatatttccacagccgcccacgtggaagtcagcttggtgccatagtcagcaagcagagtactgtaattgctggaagagaagttcttcaacaggattacaagaaattggaacaaaaatattctgatgggagcttgattccaaaacctgaatattggggtggctacaaattgacaccgacactttttgagttctggcaaggacaacagtctcgactgcatgaccggttacaatactcgcagagagaagtagatgggagcacagtgtggcacatcgagaggttgtccccttgactgttagcctgtcaacacttcggtaatagcgttgaggttatcaccagcaaccaaatcttctccagctgcaagatgtgcgaactgccccaagatgttaccgtggtgattagatcccgtgtttgagtaccgcagcccagaagctcagttctgtgcggacacccttttcagtttccacttgggccttccattgtagcggtgggtgaggagagagtgaagtgctttgcaaagtcatcagatctcttttaggcccttgcgtttctcttccgtaaatggtatccatcgaaccaggtttctaaatcctgccgattgtgaacttgtgccgtgatacactagtactgcgggaataatgatcttgggatggcattgtcagcaccgtgctagtaaataaagatgcaatttgatttattcc

SEQ ID NO: 93584 - DNA, 1107 bp, Zea Mays
actaaaattggtacagtagcatccttccggcgggcgcttcctttcgtttcgtctctcgattttgggggttttggcaacaccccccgaaacggcagcaaacccgcacgcaccctgtggagaatggagatggcccaccccggcgcctccgcgtccgccggcgttgccgacatcaccggcgaggtagcgttctggaccgcgtgcccgcactgctgctacgtgcactcattcccgcgtctctaccttgggcgccgcctccgctgcccgacatcggcctgccgccgcgccttcgtcgccgctgagctccctgcgccgccgcctatcgtccctggctctgacatgtacttctgcacctgggcattctttccactaggcccgcccgtaaccgccgagagttgggtgcccttcactacattccaccccttcaatcctccgccgtcaccctcccccgccccaaaccccgtcgccacatccgccgacacgccatccatcgcaggccctacttccaggaggaagatgggcgtatgtttcaagggtagggcacgggctgaggcggaggaggaagaggttgcagccgccatcgatctcgaagtcgaggccgaggcgggtgtgctcggggagcaatgggacagcggcatcgccatcaacgagacggtggacctcagcgagttgggcttccgcgtcgacgagatgggagtgctccacgatttgccctgaccgatcaagggttgatgaagggaaggttgtgccttttgatcgcaatcttgctcttgttaattctgcctacatagtaacagctcaactgggtcgatggttggttgggaaactgagaactgcgctatcaaacaggtgtgcttttgtgtatgcttagtttagtatcagatgcaaatgtagagcttttggtgcttcaaagtcgttgaattttgtgatcaaacgtcatggggatggttatggagaatgtggctcctttttgtgtggaattggacgtgcacagtgggtccatgttcataccttgctatgaacttatgaaagagtttgtttaatgctgccttaatctatgttaaatactatttttattctgtgcctggtttcgttgacggtattgttatc

SEQ ID NO: 93585 - DNA, 246 bp, Zea Mays
cctactcaccttgcgggtcattacagcgatgaagacgaagatagtttccaggagagggaggcgaacaaggagatggttgtctaccttgtcgacgcctcgcccaaaatgttcacccctgccgccacccagggcaatgaaaagcaggagacacatttccataccattgttaactgcatcacagattctctgaagacacaaattattggtagatcttatgatgaagtcgcaatatgtttctttaacact

SEQ ID NO: 93586 - DNA, 1772 bp, Zea Mays
aacacgcatatcattgaggaaaaaactcacttgttggtttttcatcacaatcattattctcatcatcatctgctagctagctagtccattgatcattagctagcagctaccaagctaagccgacgacgatgacgaccacgttagtgacggtggacataacgcgccgcacggtgctgaaacccccaccaccggcgtcctcccgcggcggcggcggcagcctgtcccggctgacgtccttcgaccgcgcctccaccgacggctacatcccgaccgtcttcgcgtggtacgcgcctgcgccggacaacgaggccatagtggatggcctcctcgctgtggtcgcgaggtacccgcacctgtcggcccgcatgggtgtcgacgaccgcggcaggaagtgcttcctcctcaacgacgccggggtgcttgtcgtggaggccaccgccgacgccgaccttgccgacgcgctggtggctcacgacgtgacggcgcacatcaacgaactgtaccccaaggctgataaggaacgtgaggacgagcctctcttccaggtccagctgacgcggtacacgtgcggcggcctggtgatcggcacggtgtgccaacacctcgtcgccgacgggcagtccatgagctccttctacgcggcctgggccacggccgtgcgcagcgcctcggcagccgatctaccgtcgcccttcaccgaccgcgcggccatcgccgtcccacgcaacccgcccgtgcccaggttcgaccaccggaacatcgagttccgcggcgagcatagctcgagccgcccctacgccgtcctccccatggacaggatcaagaacctcggcatcaacttcccggagcagttcatcgccgacctcaaggcccgcgtgggcggccggtgcaccacgttccagtgcctcctggcgcacgtctggaagaaggtcacggcggcgcgggacctggcgccggaggagttcacgcagataagggtcgccgtgaactgcaggggccgcgccgaccctccggtgcccatggagtacttcggtaacatggtgctgtgggcgttcccgcggatgcaggcccgggagctgctgtcctccagctacgccgcggtggtcggcgccatccgcgacgccgtcgcgcgcgtcgacgccgagtacatccagtccttcgtcgacttcggggacatggcggaacgcgccggcgaggagctggcgtccacggccgcgggtccgggcacggccttctgcccggacctggaggtggacagctggctggggttcagattccatgacctcgacttcgggtacggggcaccgtgcgccttcctgccgcccgacctccccgtcgagggtctcatgatcctggtgccgtcgtgcgcggccaagggtggcgtcgacctcttcatggctctcgacgatgaccacgttgatgccttcaaacacatctgctactccatggattgatcgctagctcaacaaaacaaagacgagtatgtccgcgcgcggtatatctacgtagtacacagccacgtacgtctttgtaatactgcaagcgatatcgtgttgattacgtacgtacgtgggcatctgttatatgtacatgaccaattgtgtatattacgtatgaccaattattcttcatacacagtacacacatagagattcacaacgctagcttgtgcacattcacatctaaaaacgtacacgtgtaaacactacctttgtaagtatattcgaagactgagagccagcaaattcaatgtattaaaaatatagtcgtct

SEQ ID NO: 93587 - DNA, 551 bp, Zea Mays
cttctaggtacataccttctactatgcacctatgtatatcctatcttagatacacaatacaagctatgtatacctaaaaaagccaatgctacttgcattttggaacaacgagattacatgatttttggacttcaggtacaaaaggcagcctataatggtatcccaaaaaagaatagaatgatccaaagtcatgcagaaacctgaatcaacaaaggtcagatacaaatggggacttttaactggtggttgactgaatattagagctcaaataaaaatttgttgatgacatataggtatgttttggttctttttacaatagcaatgatatgttcaaaggtaagtcaattaagttatattaattcattccaacccaaaaacaaatacagtgagatgtctgttgcgaactgatgcttgtacaatactccaaatcttaattcattcacaaaaccaataatctaataagcagtattatgacagatatggcacatgagactttaaagagccctttccagatatatcaggaagaaaaaaataattgtactaattcacag

SEQ ID NO: 93588 - DNA, 1441 bp, Zea Mays
agcgctgcctcctctttgtagctgctacctgctagttctcacgtcactgtagtctgtaacgtcgtcttcttactccccctatccgacgccgggacaggaatcagcttcccctccatgctccggctggagcaatatctccggttgctgccggcgaccagccacgctacagcgcccgcgttgatctcgggttactctttcctctccagtcctctccctcgcctcagtgccctccggctagcccgctcgcggcctcccccgctcaggggcaaaacgtcgagccccgtgcgcgcctcggcggagccggattctacggtaaagcgcgcgcccgagatggcccagagggaggtggcgcgggtggtcgcggatcaggcggtggcgcgtttgggcgcgcggctgctgccgtccgccgtgcctgccgacgtcgtcgagtttcgcaacgccgccgggaacgccgtcggctcgctcgacgtgcaacggggctctcctggctcgtcgattgatttcatgctgcagtcctcgcttcactgtgaagtcccgaacggtgccattgacatcacctcaattctcattttcctgaacgcctcgacggacgcaccacatttcctactggagctcatacaaggcagctcaacttcaatggtggtgattctggacctgcttccacggaaagacctcgcgtttcacccggactacctgcagaagtactacgaggaaactggaatggatgagcagcgcagaaagatcgaggagctaccgcaggctcgtccatacagatctccgtcactcttcgtgcgcagcgcatgctcgcctacagcaataatggtgagcattgactgtggacaagggggtgagaaagccttggaagagataatacatggacagttagcaaaggtcattcaggaggctcttcagacttggcttgacaactgtgttgattccaccatagagatggatgaggcggagagggactgcctgctcaagagggaccggattgtaaggtcgaaatcgatagaggttgacctgactgcaaaccttcccaggatgtttggtccggatgtgtctagtcgggtcataactgaaatccgcaaggcctttggtgtacaagagccgtgaagatgatcagttgttaggaccaggtttccaggaacagtctctcatcacagagttcctaagccgttcctgtcttcctgatgctaacatacccaataagcataagaattagctctgcctaaaaaggaggtactgaatggcggtgtgttttgctgcatcttgttttatgtatataaaactttggtgtatatggtgtacatattaaaaaaatatccatccatgttagatctactatcctttgccgctgtatgtattttgcaaagaacactctccatcaccatttttcgcaatgttcggatatggcatcataatagtattatgtgtacctgat

SEQ ID NO: 93589 - DNA, 1612 bp, Zea Mays
gtactcaaatacacacatcaccccatatatggcatctgtattgaataccaaaaaatggcttgtgtttcagttcagtatggtttggtgcacttgctgaccgcctacttctcgccaattggataattgttgtccactgatccattcaaggtgaattgtcaaagttttagatggaaatattgctaatgcaactctatcaaagcatcttgtcaattgtaggttactaacagttctccatttgagtcccttagattattgttgtgacttgtgagactgccgagttccagataaagaaactggcaatgatccgtcccgtgatttccaaaacttaaactgtaatcgcagtccaatctgaatatcactgtcatatatgttgttgtccttgagctgatagttcaatcttaatatgtgatttcagtcattgaaaacagcaatgtcgtcgaggatggaagaaagcttgcattaacatgcttcctgtttgctactgctgtaagatgtagtaaaaagaaacgatgacaggacctgatgtgcgtttcctccttgtctacagattgatttcatgctgcagtcctcgcttcactgtgaagtcccgaacggtgccattgacatcacctcaattctcattttcctgaacgcctcgacggacgcaccacatttcctactggagctcatacaaggcagctcaacttcaatggtggtgattctggacctgcttccacggaaagacctcgcgtttcacccggactacctgcagaagtactacgaggaaactggaatggatgagcagcgcagaaagatcgaggagctaccgcaggctcgtccatacagatctccgtcactcttcgtgcgcagcgcatgctcgcctacagcaataatggtgagcattgactgtggacaagggggtgagaaagccttggaagagataatacatggacagttagcaaaggtcattcaggaggctcttcagacttggcttgacaactgtgttgattccaccatagagatggatgaggcggagagggactgcctgctcaagagggaccggattgtaaggtcgaaatcgatagaggttgacctgactgcaaaccttcccaggatgtttggtccggatgtgtctagtcgggtcataactgaaatccgcaaggcctttggtgtacaagagccgtaagtcgttcataaatacaagcatgtagttactttattgtagagaaaaattgttgtgagtccatgaaacccccttatttgaacaatcgaaagtatatgtgctaaagttgtgtatatattactaccaagtgctaactgagatgatgaaagtgagctatgcaggtgaagatgatcagttgttaggaccaggtttccaggaacagtctctcatcacagagttcctaagccgttcctgtcttcctgatgctaacatacccaataagcataagaattagctctgcctaaaaaggaggtactgaatggcggtgtgttttgctgcatcttgttttatgtatataaaactttggtgtatatggtgtacatattaaaaaaatatccatccatgttagatctactatcctttgccgctgtatgtattttgcaaagaacactctccatcaccatttttcgc

SEQ ID NO: 93590 - DNA, 1629 bp, Zea Mays
aacgagccgagccgagccagctcgtttccttaacgagccagctcgagctcggtcgagccgagccgagtggctcgatatccaccccgataatcacgtaaattcttttttgtgcgtgcattggcgatagcgctgcctcctctttgtagctgctacctgctagttctcacgtcactgtagtctgtaacgtcgtcttcttactccccctatccgacgccgggacaggaatcagcttcccctccatgctccggctggagcaatatctccggttgctgccggcgaccagccacgctacagcgcccgcgttgatctcgggttactctttcctctccagtcctctccctcgcctcagtgccctccggctagcccgctcgcggcctcccccgctcaggggcaaaacgtcgagccccgtgcgcgcctcggcggagccggattctacggtaaagcgcgcgcccgagatggcccagagggaggtggcgcgggtggtcgcggatcaggcggtggcgcgtttgggcgcgcggctgctgccgtccgccgtgcctgccgacgtcgtcgagtttcgcaacgccgccgggaacgccgtcggctcgctcgacgtgcaacggggctctcctggctcgtcgattgatttcatgctgcagtcctcgcttcactgtgaagtcccgaacggtgccattgacatcacctcaattctcattttcctgaacgcctcgacggacgcaccacatttcctactggagctcatacaaggcagctcaacttcaatggtggtgattctggacctgcttccacggaaagacctcgcgtttcacccggactacctgcagaagtactacgaggaaactggaatggatgagcagcgcagaaagatcgaggagctaccgcaggctcgtccatacagatctccgtcactcttcgtgcgcagcgcatgctcgcctacagcaataatggtgagcattgactgtggacaagggggtgagaaagccttggaagagataatacatggacagttagcaaaggtcattcaggaggctcttcagacttggcttgacaactgtgttgattccaccatagagatggatgaggcggagagggactgcctgctcaagagggaccggattgtaaggtcgaaatcgatagaggttgacctgactgcaaaccttcccaggatgtttggtccggatgtgtctagtcgggtcataactgaaatccgcaaggcctttggtgtacaagagccgtaagtcgttcataaatacaagcatgtagttactttattgtagagaaaaattgttgtgagtccatgaaacccccttatttgaacaatcgaaagtatatgtgctaaagttgtgtatatattactaccaagtgctaactgagatgatgaaagtgagctatgcaggtgaagatgatcagttgttaggaccaggtttccaggaacagtctctcatcacagagttcctaagccgttcctgtcttcctgatgctaacatacccaataagcataagaattagctctgcctaaaaaggaggtactgaatggcggtgtgttttgctgcatcttgttttatgtatataaaactttggtgtatatggtgtacatattaaaaaaatatccatccatgttagatctac

SEQ ID NO: 93591 - DNA, 1162 bp, Zea Mays
aaacaccccccacggaccagcggagatgtatcagctctccctgttcgctttggcctccgcttgccccctccctctcgcgtctctatacatcgccgctgctgtgttgcagttcagtttgcatcctgagctctctcctggaccagccgagatttctcgctctgcgcatctctgattcatcttcgtcgagaggagctgttcctcttctttgccgcctcgaatctgggactggtcggttttctggatccctgctgcctgtcgggttctcgagaggtgtaaaatccaatggagggtgtgtcatcgttgaaccagccgttgatcaacgacgaccggcagcccgtgcccagcagtatcgccaagggtgatcaaatccaaggcctgttgtcgggtgaatggacaaatgagcggcacagctcgtacataagctccatggaggcatctttcgtggagcaactccgtagtggttccaaggccatccaggagggcttgtgccagagcatgaggattccgagggatgatgctcgcagccatgacgtccctgagagtccgtgggtggtggtgaggcgtttcaggccacgcggtgtccaccatggcgatggaatggaagtggaacctttggtcgatggttatggatcaggtactgacacggcccgagagaaggtccggacccacgcaagagtagcgaaggcttctgctattattgaagtcacggaccagaattttcctgaggaggggattcaatccagtaacggtgcatgcaagagacagaaatctactcctggcaatgcatcaaatggccagggtacttaacaagatagtggaagccaagccatgccctctctgaagccttcaggaggccatgggggaaacgagacttgtctgcagtactacgtgatgacaggtcgtgctgcagctgcaagtagtttggcttaccaaaatatgatatcgtcgtcctttctgcggtgtggagagtagaatatgcatatccacatctgcagagagcaccggttctcttcttcttgttgctgttactattttgtgccatggagcaaatttatttggtaaatttgagctgccactgtctgcagagtgattttttttagaaaacaatgctggttcctagggcttgttcggttattcacaatacacatggattggatgggat

SEQ ID NO: 93592 - DNA, 796 bp, Zea Mays
aaacaccccccacggaccagcggagatgtatcagctctccctgttcgctttggcctccgcttgccccctccctctcgcgtctctatacatcgccgctgctgtgttgcagttcagtttgcatcctgagctctctcctggaccagccgagatttctcgctctgcgcatctctgattcatcttcgtcgagaggagctgttcctcttctttgccgcctcgaatctgggactggtcggttttctggatccctgctgcctgtcgggttctcgagaggtgtaaaatccaatggagggtgtgtcatcgttgaaccagccgttgatcaacgacgaccggcagcccgtgcccagcagtatcgccaaggtaaccaaccgtgaagcgatggggatttttaggctcttgtgagagaagttcctttttttttctttaattttgattcttcggcagggtgatcaaatccaaggcctgttgtcgggtgaatggacaaatgagcggcacagctcgtacataagctccatggaggcatctttcgtggagcaactccgtagtggttccaaggccatccaggagggcttgtgccagagcatgaggattccgagggatgatgctcgcagccatgacgtccctgagagtccgtgggtggtggtgaggcgtttcaggccacgcggtgtccaccatggcgatggaatggaagtggaacctttggtcgatggttatggatcaggtactgacacggcccgagagaaggtccggacccacgcaagagtagcgaaggcttctgctattattggtaaaagcaaac

SEQ ID NO: 93593 - DNA, 2519 bp, Zea Mays
atactgaagccatcgagagcagctttcttgcaactcccatggccctataaggcagagagagatagagcaagcgagcggggagaagagattgagcattgctggtggccctgtgctttgagagaggagagaggacttgaggaataggcaggaggctttgtggtggagcaatggcgacagcggcctgggccgcatggctgctcatcctcacgtgcttcggcgcttggaccccgcggcaaatcttggttgctgcagccaccgacgcgaatgatgttactgccctcaacacgctgtttaccagcatgaattcgccgggacagctgcagggctggaaggtgagtggtggcgacccatgcggcgaatcgtggcagggcatcacttgctctgggtcctctgttactgcaattaaattgccgaacttgggcctctcgggaaatctggcctacaacatgaacaccatggattcattagttgagctagacatgagccacaacaatctcggtggtggccaacagattccatacaatcttccaaataagaagcttgaaagactcaatctggcagaaaaccagttctctggatctgtgccatactcaatttcaacgatgcctaatattaagtacctaaaccttaatcataaccagctatcaggagatatcacggacatattttccaacctcccaagtttaaccacagtagacctttcctccaattctcttactggcaatctaccacaaagtttcacttctttgtcaagcctgaaaacactgtatttgcagaacaatcaacttactggttcaatcaatgtacttgcaaatcttccccttgatgatctgaatgttgcaaacaaccgcttcactggttggattcctgaggagttaaagaagataaatagtctgcaaactgacggcaactcttggagcacaggctcagcaccaccaccaccaccatttacagctcctccacgttcgcgcaaccgtcgaaagagcccaggccagcactccaatggaagtaacaactcgagttcaggtggaagctctagcataggtgctggagccatagcaggcattatcatatctgttcttgttgttggagcacttgttgcattcttcctgataaagagaaataaaagaaaaagtgcaatgccagaacactatgaacaacgccagcctttcaattcgttcccttcaaatgaagttaaaaatatgaagccaattgaagaggctaccactgtagaggtggagtctttgccttctcctgctgcagttaacctgaaaccacctcccaagattgagcggaatcaatcatttgatgatgatgattttgcaaacaagcctgttgccatgaaaagtaatgcagcagcagcaccagttaaggcaactgtttattcagttgctgacctacagatggcaacagatagcttcaacatggacaaccttattggagagggtactttaggacgtgtgtacaaggcacaatttagtgatggaaaggttctagctgtgaagaaattaaacagtacaacactgccaaggcaatcatcagatgatttctatgagctggtgtcgaacatttcgaaattgcaccatcccaatctcagtgagcttgtgggctactgcatggagcacggacagcacttgcttgtttatgatttccacaggaatggttcactgcatgatatgctccatctctcagatgattataacaaaccacttagttggaattctcgtgttaagattgcgttgggctctgcacgtgcactagagcatcttcatgaaatttgttctccatctataattcacaagaactttaagtcgtccaatattttactggacaccgagctcaatcctcacatttctgatgctggacattcaagttttgttccagatgctgaattccaggcttcagatcaggggtctgggtatagtgcccctgaggtcgagatgtccggtcagtataccctcaagagtgatgtctacagctttggggtcgtcatgctggaactcttgacaggccgtaaaccatttgacagttctaggccccggtcagagcaatcacttgtccggtgagcaactccccagctgcatgacattgacgccttggaccagatggttgatccggcgctcaagggtctttaccccgccaaatccctttcccgttttgcggatgttattgctctgtgtgtccagcctgagccagagttcagacctccaatgtctgaggtggtgcaagcgctggtgcggctcgttcagagggccaacatgaccaggagaatgctagatggcgaggaggcttctcggcggccggatgaccaggaacaggaattcgtctaacaagctactgaaacaatatacacatcatgtgctgtacctgcaccatcttaatgttgtgactgttgataaaacagggaaaacagctttgtcgacttccattcagtatatattacaggttttatttcatataacgaaatatatatgttattttttagataatgggaattgaaagtttctggcctttgtttc

SEQ ID NO: 93594 - DNA, 1384 bp, Zea Mays
aaaagcccccctaaaactgcagaaaaccagggaaacccgagaaaatcgagtatactgaagccatcgagagcagctttcttgcaactcccatggccctataaggcagagagagatagagcaagcgagcggggagaagagattgagcattgctggtggccctgtgctttgagagaggagagaggacttgaggaataggcaggaggctttgtggtggagcaatggcgacagcggcctgggccgcatggctgctcatcctcacgtgcttcggcgcttggaccccgcggcaaatcttggttgctgcagccaccgacgcgaatgatgttactgccctcaacacgctgtttaccagcatgaattcgccgggacagctgcagggctggaaggtgagtggtggcgacccatgcggcgaatcgtggcagggcatcacttgctctgggtcctctgttactgcaattaaattgccgaacttgggcctctcgggaaatctggcctacaacatgaacaccatggattcattagttgagctagacatgagccacaacaatctcggtggtggccaacagattccatacaatcttccaaataagaagcttgaaagactcaatctggcagaaaaccagttctctggatctgtgccatactcaatttcaacgatgcctaatattaagtacctaaaccttaatcataaccagctatcaggagatatcacggacatattttccaacctcccaagtttaaccacagtagacctttcctccaattctcttactggcaatctaccacaaagtttcacttctttgtcaagcctgaaaacactgtatttgcagaacaatcaacttactggttcaatcaatgtacttgcaaatcttccccttgatgatctgaatgttgcaaacaaccgcttcactggttggattcctgaggagttaaagaagataaatagtctgcaaactgacggcaactcttggagcacaggctcagcaccaccaccaccaccatttacagctcctccacgttcgcgcaaccgtcgaaagagcccaggccagcactccaatggaagtaacaactcgagttcaggtggaagctctagcataggtgctggagccatagcaggcattatcatatctgttcttgttgttggagcacttgttgcattcttcctgataaagagaaataaaagaaaaagtgcaatgccagaacactatgaacaacgccagcctttcaattcgttcccttcaaatgaagttaaaagtgagtttatatgataccctgtattcccaaatagacgctttagtttatagtgtggcaggctgatgtcgttctgcaaccttgtagatatgaagccaattgaagaggctaccactgtagaggtggagtctttgcc

SEQ ID NO: 93595 - DNA, 568 bp, Zea Mays
tcgcttggcattgtgctgggttttcttgggtgaaagccttggcgacggcgacgcccctgggcgccgcttcccctgatgagggtgtcgtgcttcccagcactgtcttacatgggcgaaagccccgtccatttcggaccggtgacggtggcgtcctcgacgtcactcctcgacgtcactcccttcctgaaggcgttgctactgctggcgggggcaggacagaggatcaaggttttggaagtctcgctggtgaagaatcagagctgtctcgagtggggtgtctcgtgcttggcaacgacggcgcgccgcattcttcctcctcctgggccgatgtttgtagtcgtcgtcattttttatttagccttgtgctgcctatcttggggagtcggagctgctcgtcacttgtgttgagctcggcaacgatgactcaggatgtgtattgtgtgggggttgctgttgtctgggttgtgtgtatgccctgtgtaggttttgggtccgattttccttaaaactggatcaattcctttcttcttaattgagaggcagagctcctgccattacgttcaaaaaa

SEQ ID NO: 93596 - DNA, 3766 bp, Zea Mays
aacccaattgtcgtcggccactgctcttccacttgcagtcttccgtcgccctcgcccctcgcccaggcacagccgcacagcaagcatagccgccaccgccagtcgccactgctcagctcggcgctccatggcgtgcccccaaattccgtgacggcgtgactcgtcttcctcctttcctctctgccgggctgcacgtgcagaccacggacgaacacactgcccccaaggccccaatccaatgatcctggtgggcgtggctctaagaagagcagcaccgcgacgtaaggccgccagaatttgttgctgacacttgaatggactgtctctctctgaggttaccagaccccaaaccagactcctccgaagacaggggcttcttgctgattatccggtagatctcggctagaacggtgtggaaggccttctccacaattcagaatctgcttttagtgcgggtggtcatgtacttgtgtttttgtgatatttataaactttgttgtattgtgatattttcatattgatatggttaccgattgtattttagattccgaccgataccgatgtattttttgtaccgaacttctgtttccgatgattccgaaataccgatgtcgtttccgtttccggaattaccgtttccgatttcatttccgataaaaatatgaaaacggtaacggttttagtgttttccgatcgtttccgaccgttttcatccccgctgtccctggccttgggccgaataaccccgcactcggctacggccgtcgttctcatccgttccttcaccctgcgtgtgctctctttcctcccatctctctccgactagccgatcactgggtgggctaccgccgccgccaccctgcgccaggtgccgaggccttcgtcggtctcttctccggcgacgagcacccaccagagtaagcagctgctgtcgaagtgtacatgagcaatggtttgtgttgggtccaaggcaattagacccaaggggagcacaataaatggcttgggagatggagctttagacgatagctcacacaagaagaggacaaggaaggatacgagcgagaaacacgggaaagggggtcacagctcaagtaaaggaccttctgtagggaaacctcggcatgtgaaggataggaagcagaggaaagatgatgggaagaaagggaagggtcgacgaaaggaccatcattcaggaagctccgtgatggtgaatcccaggacgaagaacctcaacaatcaggatgcggtaccatcctccgatacatcaaaaccagtacaaaatgttcttaggaaaagagttgatcctgaaactgcaaagtactttatggagatctcaaacctctttgataacaaggagattgattttgaagagcgctcaactatatgcgctaatgccttagaagaaactagagggaaagagcatgaacttgccactgatgctgttataagccacaccttgcaggttcttatagaaggctgtgagttagagcagttatgcacattcctacgcaattgtatcgactatttttcggtcattgccgtggacaaaaatgggtcgcatgtggctgaagcagctctcaagtcactcgcaacacatcttgaagatgaagcctccagggccatgatagaagggatactgaacaaaatatgcaaggttattgctgtggatgctgttactgtgatgtccagctgctatggttcacatgttctccgcactctactttgtctttgtaagggtgttccatcagattcactacaagacttccatactactaagagatcttctgttctagctgagcggctcagttgtgggacaaatcagtctagtcgacatgttccaaagaattttgaaaatggtttctcaggcatgtttaggtcttttgtcagagaaatgctacataatgcaaaagctgacattgcaactttacgagttgacaagaacagtagccttgttttacagactgcactgaagctatcgtctggtgatgataatgaattgcatcatataatatcaatacttcttggttatgatgaatataaaactgtacagacgagagattacagtgaaaaaatggacgagattgttactttacttgaagaaagtgcttatagtcatctcttggaggtgattgtggaggttgccccagacgaattgcgcaatggtatgcttgcacgtagtctgaagggtgcattatttgcaatctcatctcaccactgtggtaactatgtggtgcaagctttcatatcatctactaaaacctcagatcagatgaatcaaatatgggaggaacttggtccaaacatgaaggaattgcttgaactaggtaaaacaggggttgtagcttccatgttagcggcatgtcagcggcttgaaacttatcgccttgagagttctcaagctcttgctgcagcgttaagttcagattctgagtctactaagagcattgttgcacgtatactttttcttgagaactacctacatgagagatctaattggaaatggattcttggtgcaaaaatgagcattctgggttgcttgatgctgcaatctattttccagtacccgcatcaatatattcgcccatatgtcgcaagcttgctggccatgggggatgatcagatcctccaaatttccaaggattcaggaggttgccgtgttcttgagtcttttctaggttcaagtgccactgcaaagcgtaaatttaatgtttttggaaagttgcaaggtcattatggagatattgctatgaatccttctggctcattcttagtagagaagtgctttactgccagtaacttttctcataaagaggctatagtggcagagctgttggctgtgcaatctgatctatctaaaacaagacacgggttccacttgctaaagaagctggatgtcgatagatatgctaggcgacctgagcagtggagggctagtcgaacttcaaaagaaacaacccaaaaaaagtttgaggcagaatttggctcaaacagtcaatctactgggcagattgttaaagaaaagttctctcaaagtcgcacgaagaagcgtaagcagaaagagaaggttgacaaaattactgaggatgccaggagcaacaaaccagacttctctcagaaaggaaacagtaagaggccaaaatctggcaacgcaacttctgagaaccccctgagtgaaggtgctagtgctagcatggtgttcttgaagggctctgtcaagaggaagtccccaggtttcctttcagataaaccgagcttcaagaaacaaaaacctcacaaacccgattctggtagaccagacggcaaacgttttgttcgagatagtgatactagcgcaccgttcgtcaagaatgccggcaaacagaaacagtccattgctgagctcgcggacctggctggtaaggagaagctgactgcgtctgaagttcgcaaattgctgaagcctgaaatgtcaggcaagagctaatgagtttagggtgagcagaggcagcaattttgttggtcgtttttcctcgtatgttgcggaaagaaactgtggcacgtgatatgggtttgtttcagtagaaacgtattcgtgatacctgtcctgataccggtttctcttgctagcgaatctctttggctttgcatatgtttgtttgatccgctgcttgctgatatagtgcaaaacatgtagaaagatgcagccccgcccagggcaacattttccctgctaagaccaaatactcgtaataacatgttaatgcaggaaatgccaagagactat

SEQ ID NO: 93597 - DNA, 3088 bp, Zea Mays
aacccaattgtcgtcggccactgctcttccacttgcagtcttccgtcgccctcgcccctcgcccaggcacagccgcacagcaagcatagccgccaccgccagtcgccactgctcagctcggcgctccatggcgtgcccccaaattccgtgacggcgtgactcgtcttcctcctttcctctctgccgggctgcacgtgcagaccacggacgaacacactgcccccaaggccccaatccaagtaagcagctgctgtcgaagtgtacatgagcaatggtttgtgttgggtccaaggcaattagacccaaggggagcacaataaatggcttgggagatggagctttagacgatagctcacacaagaagaggacaaggaaggatacgagcgagaaacacgggaaagggggtcacagctcaagtaaaggaccttctgtagggaaacctcggcatgtgaaggataggaagcagaggaaagatgatgggaagaaagggaagggtcgacgaaaggaccatcattcaggaagctccgtgatggtgaatcccaggacgaagaacctcaacaatcaggatgcggtaccatcctccgatacatcaaaaccagtacaaaatgttcttaggaaaagagttgatcctgaaactgcaaagtactttatggagatctcaaacctctttgataacaaggagattgattttgaagagcgctcaactatatgcgctaatgccttagaagaaactagagggaaagagcatgaacttgccactgatgctgttataagccacaccttgcaggttcttatagaaggctgtgagttagagcagttatgcacattcctacgcaattgtatcgactatttttcggtcattgccgtggacaaaaatgggtcgcatgtggctgaagcagctctcaagtcactcgcaacacatcttgaagatgaagcctccagggccatgatagaagggatactgaacaaaatatgcaaggttattgctgtggatgctgttactgtgatgtccagctgctatggttcacatgttctccgcactctactttgtctttgtaagggtgttccatcagattcactacaagacttccatactactaagagatcttctgttctagctgagcggctcagttgtgggacaaatcagtctagtcgacatgttccaaagaattttgaaaatggtttctcaggcatgtttaggtcttttgtcagagaaatgctacataatgcaaaagctgacattgcaactttacgagttgacaagaacagtagccttgttttacagactgcactgaagctatcgtctggtgatgataatgaattgcatcatataatatcaatacttcttggttatgatgaatataaaactgtacagacgagagattacagtgaaaaaatggacgagattgttactttacttgaagaaagtgcttatagtcatctcttggaggtgattgtggaggttgccccagacgaattgcgcaatggtatgcttgcacgtagtctgaagggtgcattatttgcaatctcatctcaccactgtggtaactatgtggtgcaagctttcatatcatctactaaaacctcagatcagatgaatcaaatatgggaggaacttggtccaaacatgaaggaattgcttgaactaggtaaaacaggggttgtagcttccatgttagcggcatgtcagcggcttgaaacttatcgccttgagagttctcaagctcttgctgcagcgttaagttcagattctgagtctactaagagcattgttgcacgtatactttttcttgagaactacctacatgagagatctaattggaaatggattcttggtgcaaaaatgagcattctgggttgcttgatgctgcaatctattttccagtacccgcatcaatatattcgcccatatgtcgcaagcttgctggccatgggggatgatcagatcctccaaatttccaaggattcaggaggttgccgtgttcttgagtcttttctaggttcaagtgccactgcaaagcgtaaatttaatgtttttggaaagttgcaaggtcattatggagatattgctatgaatccttctggctcattcttagtagagaagtgctttactgccagtaacttttctcataaagaggctatagtggcagagctgttggctgtgcaatctgatctatctaaaacaagacacgggttccacttgctaaagaagctggatgtcgatagatatgctaggcgacctgagcagtggagggctagtcgaacttcaaaagaaacaacccaaaaaaagtttgaggcagaatttggctcaaacagtcaatctactgggcagattgttaaagaaaagttctctcaaagtcgcacgaagaagcgtaagcagaaagagaaggttgacaaaattactgaggatgccaggagcaacaaaccagacttctctcagaaaggaaacagtaagaggccaaaatctggcaacgcaacttctgagaaccccctgagtgaaggtgctagtgctagcatggtgttcttgaagggctctgtcaagaggaagtccccaggtttcctttcagataaaccgagcttcaagaaacaaaaacctcacaaacccgattctggtagaccagacggcaaacgttttgttcgagatagtgatactagcgcaccgttcgtcaagaatgccggcaaacagaaacagtccattgctgagctcgcggacctggctggtaaggagaagctgactgcgtctgaagttcgcaaattgctgaagcctgaaatgtcaggcaagagctaatgagtttagggtgagcagaggcagcaattttgttggtcgtttttcctcgtatgttgcggaaagaaactgtggcacgtgatatgggtttgtttcagtagaaacgtattcgtgatacctgtcctgataccggtttctcttgctagcgaatctctttggctttgcatatgtttgtttgatccgctgcttgctgatatagtgcaaaacatgtagaaagatgcagccccgcccagggcaacattttccctgctaagaccaaatactcgtaataacatgttaatgcaggaaatgccaagagactat

SEQ ID NO: 93598 - DNA, 144 bp, Zea Mays
atgtcgggaggcagtgatggtctgtcaagccctgcgctagcgacggcgggatcaaggaagaagcagcgacagcaggagccgtacaacaaacgaccggatagcggagaaaaagcaggcccaaaaggttttggtgtgtgtctataa

SEQ ID NO: 93599 - DNA, 1412 bp, Zea Mays
atttctttctccaacaaatcaacaattaatactccactacggtcgctcttctcccctcctctcaatttgcgctcgtgctctgcttcttcggctccaaggagcggcgaccattgctcattgatggcgatggagggacctgttttctgccgtcctgcaatgcaagcgaaactgcctgctgctgcgctgatcaacaactccctgaccaaatccgggcagcttgggactgcattgtttggtgccatttcaaaatacagaaacatttcaagattcatttctcccatctctcaaacatctacgaagaacataggtccatgctgtagcttcagctcgtcttctgatggtaatggatacatggctggaaactctagcgagagtgatgaagactatgttaattctactgtgctagaagcagttgaggtgagaagtggatcagaaggatatgtgataaagatgcgagatggaaagaacttgcgttgtgtccatagtaattttcaagggagaaatattccagagaatacaccacaacctgctattgttttgaggattgaagatggaagcggaactttactcccgatcattgttttggagatgccaagcgttcttctgatggcagctattcgtaatgtccacattgcacgaccgaccatatatcaagttgtcaaggaaatgattgataaaatgggttatgaggtaaaacttgttagggtaaacaaaagaattcaagaagcctactgtgctgaactttatttaacaaaggtcaatgatcctacagacaacatcaccttcgatcttcggccttcagatgccataaacattgctgttcgttgcaaggttcctgtacaagtccatagaagtcttgcatacagtgatgggattagaccagtcgagccagcaagaatggcagtaacagctggcctatcagatgggttgttatttacagagcttgacagacctgatggacagccatgtgtggaggctcaagagtttggactggtgaggaacatgctcattgcagctatcgaagagagatacaaggatgctgcatcatggaaggacaaactgattcggctcaggtctaagcgggagaactgggcctgagagcgtcgcatgtctggatggtgtaaataaagatgacgctcagctgaattccagtatgcactccagacaattgatactgtttatggctctatgtaactagctgtacatattgtaactagctgtacatattgtacgtactatgctcaggtctcagctaaattcagactaagatttgaagtgaaaaactaatccttttgtaatcttggccgtattaatttgtatgttagtctgttaggttgaatgtttggcatgaatttttagctcatcgacctgcggtgagatatgcagaatttcggttgtacacggaactaagc

SEQ ID NO: 93600 - DNA, 1313 bp, Zea Mays
actgggagaccgatgctcgccgtcgttcgcccaccgctttgcgattcttctctcttccggataaagcgaaagattgatggcgatggagggacctgttttctgccgtcctgcaatgcaagcgaaactgcctgctgctgcgctgatcaacaactccctgaccaaatccgggcagcttgggactgcattgtttggtgccatttcaaaatacagaaacatttcaagattcatttctcccatctctcaaacatctacgaagaacataggtccatgctgtagcttcagctcgtcttctgatggtaatggatacatggctggaaactctagcgagagtgatgaagactatgttaattctactgtgctagaagcagttgaggtgagaagtggatcagaaggatatgtgataaagatgcgagatggaaagaacttgcgttgtgtccatagtaattttcaagggagaaatattccagagaatacaccacaacctgctattgttttgaggattgaagatggaagcggaactttactcccgatcattgttttggagatgccaagcgttcttctgatggcagctattcgtaatgtccacattgcacgaccgaccatatatcaagttgtcaaggaaatgattgataaaatgggttatgaggtaaaacttgttagggtaaacaaaagaattcaagaagcctactgtgctgaactttatttaacaaaggtcaatgatcctacagacaacatcaccttcgatcttcggccttcagatgccataaacattgctgttcgttgcaaggttcctgtacaagtccatagaagtcttgcatacagtgatgggattagaccagtcgagccagcaagaatggcagtaacagctggcctatcagatgggttgttatttacagagcttgacagacctgatggacagccatgtgtggaggctcaagagtttggactggtgaggaacatgctcattgcagctatcgaagagagatacaaggatgctgcatcatggaaggacaaactgattcggctcaggtctaagcgggagaactgggcctgagagcgtcgcatgtctggatggtgtaaataaagatgacgctcagctgaattccagtatgcactccagacaattgatactgtttatggctctatgtaactagctgtacatattgtaactagctgtacatattgtacgtactatgctcaggtctcagctaaattcagactaagatttgaagtgaaaaactaatccttttgtaatcttggccgtattaatttgtatgttagtctgttaggttgaatgtttggcatgaattttt

SEQ ID NO: 93601 - DNA, 661 bp, Zea Mays
acactaaattgattatgcagtaataacattttttgaatcacttatagatacgcactcttcgacggattcattgactcgtcgtcggtgagatctcagaggacgggttcatcttcccgtagctcatgctctcgtcgaccgaacgagcaggagttggagattatgaggatgcgtgaagagatgagacaacaacgcgaatttatggaagcttgcaatgctcataatcaagcgatgtatcaattaatgcagcaacagggcatgacatcaaattttccaccgccaccacaatggagccaatttgcaaacacaccagttccaccaccacagttcaccacccctccgacacatatacctgcacctggagatagggttacgcctgaagcgggtggcagtgggtctgatccagcagtagggactggatttgttgactcgctcttcgcgttccctcctcctggtggtgaaggcggcagcggtcatagctctaaccacccaagtggtggttatctctaaacacttaaacttatgtttgaaatgtcgtactcgttgatggatgttatgttcaatactatgtcgtacttgttgtttgatgttggtggatgttatgtttgaatactatgtcgtacacgttggtggatgttttaattataaatgcactatgtctaaa

SEQ ID NO: 93602 - DNA, 76 bp, Zea Mays
agggtggctcccgtgttgaggtcgagcacggcatccttcgcatctgggatcacgaaaccggttgctcgcccgggtg

SEQ ID NO: 93603 - DNA, 297 bp, Zea Mays
tagttgttgcactttatgtccctacctttgctcgatgagtgagatatctgtttcattttcaggttgaagttgatctgttgagtgatggtgtgaaagaaggtgctgaatcaggtaaaactgattctgaactgaaagttttacctccatggatgatcaaggatggcatgaatcttactaaggaacaaagaggagagataattgcgccacaaaaacttgagaaatctgatgccggagatgacaagaagcatgacttgaaagatgatgattgttttcgctcagctcaggaatgaacacata

SEQ ID NO: 93604 - DNA, 1090 bp, Zea Mays
ggcgggagagggggagcaggactcaccaagtcactaggttcctgcagattgatgagggcggcgtgcagactgcagaggaggggcggcgtgagaggaggggcggccggcggcgtgaggactgagggacgaccgtgggttcgggaggaagatttggctaaagcattgaagctccactcgaaacagctgcgtcgcattctccgtttctttgaagaggagaaactagtcacgagggatcatcgaaaggagtcagcaaaaaacgcaaaagcacataatgctgcagctgctaatgatggtcaaccaattgctaaggagggagaagagaaagtaaagctgcacacacattcatactgttgcttggattatgctcagatctgtgatgttgtaaggtaccggattcaccgcatgaagaaaaaattgaaggatgaattggacagcagaaatacaattcaacactatatatgtcctagctgcaataaaagatactcagccttcgatgcactacaactggtaagctacacggatgagtacttccattgtgaaacttgcaatggtgaactggttgcagagagtgacaagcttgcttctgaggaaatgggagatggcgatgacaatgttagaaagcgcaggcgtgagaaattaaaggacatgcagcaaagaatagaagagcaattgaagccattggttgcacaacttgatagagtgaagaatattcctgcaccagagtttgggagtctacaaacatgggaaagagcaaatattggtgcttttgcaattggtgaccctgctgcagctgattcttctaggaattcacaagggcagtatggtacaccaatgccatacattggagagacaaaggttgaagttgatctgttgagtgatggtgtgaaagaaggtgctgaatcaggtaaaactgattctgaactgaaagttttacctccatggatgatcaaggatggcatgaatcttactaaggaacaaagaggagagataattgcgccacaaaaacttgagaaatctgatgccggagatgacaagaagcatgacttgaaagatgatgattgttttcgctcagctcaggaatgaacacata

SEQ ID NO: 93605 - DNA, 796 bp, Zea Mays
ggcgggagagggggagcaggactcaccaagtcactaggttcctgcagattgatgagggcggcgtgcagactgcagaggaggggcggcgtgagaggaggggcggccggcggcgtgaggactgagggacgaccgtgggttcgggaggaagatttggctaaagcattgaagctccactcgaaacagctgcgtcgcattctccgtttctttgaagaggagaaactagtcacgagggatcatcgaaaggagtcagcaaaaaacgcaaaagcacataatgctgcagctgctaatgatggtcaaccaattgctaaggagggagaagagaaagtaaagctgcacacacattcatactgttgcttggattatgctcaggagcaattgaagccattggttgcacaacttgatagagtgaagaatattcctgcaccagagtttgggagtctacaaacatgggaaagagcaaatattggtgcttttgcaattggtgaccctgctgcagctgattcttctaggaattcacaagggcagtatggtacaccaatgccatacattggagagacaaaggttgaagttgatctgttgagtgatggtgtgaaagaaggtgctgaatcaggtaaaactgattctgaactgaaagttttacctccatggatgatcaaggatggcatgaatcttactaaggaacaaagaggagagataattgcgccacaaaaacttgagaaatctgatgccggagatgacaagaagcatgacttgaaagatgatgattgttttcgctcagctcaggaatgaacacata

SEQ ID NO: 93606 - DNA, 2669 bp, Zea Mays
atttttatctgagtttgaccaaaccggtgttgtcttaaatattgaatctgtctgtttacgcgctgtccgagaaaaatgatgcgccagctcattgtcgaattattctctgattgaatatttggatagcaggcgaaatttatttaggttcaactaaataaaatcatgtcacaattattgtctaccccgtatacatcgctaaaagaatcgtgaatcgaattatctgagattttcggtaaaacaaaaaaaaaagaaaaatatcccaacgtcctgatctttttcagtcatccgtggtccttgattttttttttccaggcgatgctcatctcctggccgcgctgcacagccctggaaaaatatcacgccgcccacgcctggtcttttctctctgctggccaaagcatcttccttcctgcgcccagccatcttctctttgcccagccgctccttcctctcgatctcccatggctgatgcgtgccctgcaccatctccagctccttcatggaatgatcccctccctgctcgatcccacatgcccctagcgcgcgagctccaccttccatggccagccgccgtcgaccctgccatggacgctgaagtccctctgcccgttgccatagccgctgtgccgagcttcatctttggccgtgctcgcgcgctgctcgtccatggcggcttccccctgctggcagccgtccggccgagctccatccctgcccatctccctgcatcgcgcgccctctccctgctcaagctcgcccttggcgctcgcccgtgatgcctgcgctcggctctgcccatcttcctctgccgcgcgccgtacgcccagccgagcgtctccaccgcacgctcctccttcctccgaaccgagctcctctcccatggccgaccgtcgtgtgcccctgcagcacggatcccttcctccctgccctctgcacgcgtgctgctccagctcgcctgggcgcggtctcaccttgctgccacaaccgcgcctactgccgcgcccggcctgctcccttgtgcgcgctctgtttcctcgccgagctcgtccctgcgcgccgagctcgcgtgcagctcgcccagctcggagtttccctgtccatctcaccacgctcggtctctagctccctgtgcgtctctgttcatggtcgtggtgatgctatggcgtggcgacgtcgtatacgttgcgacagccgtcctggccgcggggcagtccgcgccatagagttcgcccgaccgtgatctcgctttactcctcacgtcgttgctcgccgagtccttccccagttcgcgccacaaaattcgctcggtcacggtctcgtcaaactgtgaagcttccttgccgtgcgctctggcatcggctgccgccgattccgccataaagttcacgagcgctccttgctcactttatttcgcagtgaacaatttttccacgtttcaattctgtgttgcttgccccgtgtgtgctcgctcctcatccatcgggtttcggcatgttcgcgtttaccgtcgagtcgtcgaacccgtcatcccctgctcgacccccacctcaccagctcgctctagacttcaatcgaaggtcgtcgtcattccgtacgttgtcaagaaatcccaagcgtcaggtgaagacgaagctagctgcgtgatatttaccaagtgctcgagagaaggcctgagcaagaatcagcaacgtttccttggaattttaattgaatcggtaactgttctctagttcgctatttctttaattgattgagtcgatgaatggaataaattaatgtgctagtgtgctgctcactaggtgctcgattaattgcgtgagtccctgaactctcgtcgacttcgcggttctcgcgattatcgagccagattcagttatggcgagttatttcgctatttcagtcagttagctgaattggtggagtgagtagaatattagtaggcatgtgtgatcatgaaatattttaatcacttataaagaggtgtatatatttacgataaaaaatgtttgatataggaacaaaaatttgatcgctactttcagtaaaaagaatattggtaggtatatatatagtatgattgtgttcgtgatggtgaagtagttgtgtcgcgtgaagcttaggattgaaatataaatcatacaagggaatgttgtggtggacgcgcatgtcgattaggcttaaattggttctttgttgtggtgtgaggagaattagtagcgagaagaattaaatcggtgcttcgtatctaaggagtggtcgaagtaacgttgtggaaagtaggtcttgtgtttgtgtttctagtgtcttgtcgaaggatagtatgtggcgggtttcgtctaattgtatggagtcgatgccctgctgtgatattcatgatgcttaatgcttgttaattgattttaatgcttggttttaagtgtttcatcctttttagtgtagattatctatcttatactctttatactcatgctcatacatgtgcatcgtgcatcccatgaggtacgttaattgatcgtgtgatgcggaagacgagccaagtcgaccccaagcgtggactaatccgcaggataatgctgatggatgaacctgcctgatcaagtgctaggacaaggatgatcgtcaagtggtcgtcgtctaacaacactaacctagtgttattcaggcaagcc

SEQ ID NO: 93607 - DNA, 882 bp, Zea Mays
attatttagtgcttcttatattatattgtttgctctgttgaatgtttctaggtctgctttatcccttgctaacatgtaccatgctttttctaagccgattactgtagttgcaactccaaatttagtttctaatcccatctaataaattgttttgttagtggctttagtattgtgtgatttttacttgcgttcctaataattgattcgtttgattaacagtttaagcttcacctctagtcatgggtaaagagaagtcacatttcaacattgtggttattggccatgtcgactctggcaagtcgaccaccactggccacctgatctacaagcttggaggcattgacaagtgtgtgatcgagaggttcaggatcttcaggttgagcttgagaatgagaagcaagaaaaaacaaaactttgacaagtgttggataacttgaagacggaatcagaaacttcaagggtaaaacattatgaggaaatagaagttgtaaagatgacatcacaagaaatgcacgtcctcctttgttaaatgctaaaattcaaccagggccagcacaatctaaggccataaagtttctaagcccccaacagtgaattattctagtatgtttcttctttgaaaattggttgttggttgaactatgtcgggttgttctatcaatagttggttgctagtttttcacaagtaggacttagtggctccaagtttgttgatttttgttactagtagccttaagttttgttgaacaatgttgcttcttgctagatgtattgtgacctatgaattggaatttgtctgccacaattttggtcattggatatgtaaattttgtgaaatatgtcatgtgaacatttgtacggttgaatgaagccaaaaattgg

SEQ ID NO: 93608 - DNA, 555 bp, Zea Mays
atttgtatacatatttttaactatgtttttgttcttgtttggctgtgtgtgcatggttacatatgaagtaaataagttatgcttatttataggttcaggatcttcaggttgagcttgagaatgagaagcaagaaaaaacaaaactttgacaagtgttggataacttgaagacggaatcagaaacttcaagggtaaaacattatgaggaaatagaagttgtaaagatgacatcacaagaaatgcacgtcctcctttgttaaatgctaaaattcaaccagggccagcacaatctaaggccataaagtttctaagcccccaacagtgaattattctagtatgtttcttctttgaaaattggttgttggttgaactatgtcgggttgttctatcaatagttggttgctagtttttcacaagtaggacttagtggctccaagtttgttgatttttgttactagtagccttaagttttgttgaacaatgttgcttcttgctagatgtattgtgacctatgaattggaatttgtctgccacaattttggtcattggatatgt

SEQ ID NO: 93609 - DNA, 865 bp, Zea Mays
gtctaagtttatcgttcgaattgaagaactaacgttagacaaaaaagttaggcaaagtatgataagttaggcagcgaaccaaacaggcttactattctctatagtttaaatgcctttcgaaacaaaaaaataaataaatactaaatatgtttaaaataacttgatatagagttatactttaatcttatgtattatctctttttattaaaaaaaatatggcgtatcctcgccatggatggcttcacgggcgcgcacgcttcttccttctcgtgtcatctccgcttgcgccgcccctagccccaccatcgtcctccccatgaagccgccggttgagccgccccctcttgtgtcgcctccatgtccgcgcagatatgcctcgctcgccaccccgccgtgttcctccccgagacaccgtggccagcctctagcccgcgctcttcctcgtcacggcgatgtcggcttcccggaccccttccggcttgcttccatgccttcgcttcggtttgttcgggcgcaggagaggctacacttcctctatgagtcgaggttggccgtcggcaagagctccgaagggttccaggcgctgcagcaatctacaccagggccagcttcgcgtctacttctgcacagatgagtgcggctaattgttccaagtttaagcttcacctctagtcatgggtaaagagaagtcacatttcaacattgtggttattggccatgtcgactctggcaagtcgaccaccactggccacctgatctacaagcttggaggcattgacaagtgtgtgatcgagaggttcgaaaagtaggctgctgaaattatcactactgttgaggccatttttcttgagctcatgatatgtgt

SEQ ID NO: 93610 - DNA, 501 bp, Zea Mays
atgggtgctggtggattggaaaagatggggatgggtgacgtggatggtgggaattggatgttgtggattggtatggagttaggcgtggcggtgatgggggcggatgatggtgggttggtcatggctgggatgccgccatatcctggcagcccaaagggaaatcctggcgggttattggaggacgatgttgttgatgagatgttgttgatgatgccgcactctccaaggctgtcatgcgggaggacagcgaggacatatgctgcaccatctgccggtggaaatcaaacatcatcatcttcaattcccccacatcattggtttcaggcgcagcgggtggaggatcaacagtgtcggctggggcgccatttgaggcattcaccgtctctgataccagattggtatggcttgagcttctcaagttgtagggatgatgttggtgggcaagggcatgccgcgtgctgttccagggggtgccgtggtgaagtgattaaggaaagctaa

SEQ ID NO: 93611 - DNA, 1972 bp, Zea Mays
gtctcaaccacccacgcctcatctagagttgacacgcgccatgtactggacgattggccgctggagacgacgcacgctcggccatggcgctcgctctcctatccccctccacgccatcccatcgtatactgcttcgtcctattccatttccatctctgccagtcgcgcgcgccactagtgccggtagcttcggcctcgcgttcttctgccccctctctcgcggttcctcctcgctgcagaggaccggcgcggcaggcggcgttattgatagtgccggagagggctcatcggaagaaccggtcgctggatggctcagcgcagacctgctcaggcggatatcaggcgcggcggacgcggaccgggtcctggacattgttgccgagtcagttgaaggcgcgggtgccgctctgggcgcgcccgagtgcaacgcgatcgtctccgccgcttttgaccgtggcaacatcgcgctcgctctctcggtcttcgaagccatgcggtccggtttcgcgggagttggaggctggaggtgggcaaggcctgatgtgaggacttatgcgttgcttgtacagcggttggcggccgccccgcgtgttgctgatgcaatcatgataattgattatgtgtctcgcgcaggtgcttcttctatggatgaggttcctttcggaatcattgttcgctgtccaacctgcatgatagcagttgctgttgtgcagcctcaggatggaactcaggttgtttcctgttcaaagtgtcgatatcaatatgaattattttctggagacattacgagtattgaatccgaagaagttagcatggatatttcagccctggagaaagccttgagatttattaatatgaggaaagatggtattccagctgctgtccactctattgtgatccgctcaccttcaggaacagcacgtacttacagatttgctacccagaatgtaactcttcctgctcaagaaggagaaagggttaccatttccttggcggccccagttaacgtttaccgtgacatgggacccctcaaggttgctgcgcgctcacaaggatttaaacctggagaacctatgtgtctcactaatcacatcaatgggcaagtctcgaagttgctaagagctccatcaaagaacaagggaacatttttccttagcccatatttattggtcggtgctcttgccttccttgcatctacagatgctgcttccgcattcattgacccaagtcttcctagacttgttacagcaactgccattgcatcagctgccataggaacaacactaaatggagtggtcctgccaaaaattcaaaagcttccagaaaaagcagtggatatagttgctgtacagcaaaagcttttgtctcagtatgatattcttcagagtcgtcttaaggaactgaaacagtttgctcaaaaagaggtgtggatgcttgcgcggatgtgtcagttggataacaagatagtagcagttggtgaaccatcttatcgtactagacgagatagagtaaagagggttcgggaaagcttggaaagcacactcctggcaaggattgagctaatggaaagttatgcaaaactgtgctcaatgatcgaaattgaagttgagatggactctgatgttatagctgctgaagcggcaagcagtgcagagagaatatctgagcagatacaacaattaatggagatcgatagtcttgaagagcaatggcgtatacaagctgaggctaatgatgaagcagaaaggcttcttagttcagattcctcagaaacatatcctgctggacgtgtaatgtaatataactctgttagtgcgcaggcattattctttattttctatttagttgtttatctctcttcaatttaaatgttctccctaccaaagtacaaacaaaacctctagttagacttgtcaaggaaaataatgccagaaaattagaaaaatagtggaacaacatgataatagataga

SEQ ID NO: 93612 - DNA, 1194 bp, Zea Mays
atggaagcgcggccgcggctgctcttagtcgtcgtcgcgatcttcgtgtcgatatctgccgtcgcggcagccgtcataaacgtcaagaactacggggcccatggcaatggtgtcaatgacgacaccaagccactgatggcggcgtggaaggcagcgtgcggatcagccggcgcggcgacgatggtggtgccgccggggacgtactacatcggcccagtgcagttccacggcccctgcaaggcctccaccttgaccttccagctgcaggggacgctcaaggccgccacggacctgaaacggttcggcaacgactggattgagttcgggtgggtgaacgggctcaccgtcgccggtggcgtcattgacggccagggcgccgcctcgtggcctttcaacaagtgtcccattcgcaaggactgcaaagtgctgccaacaagcgtgttgttcgtgaacaaccagaacacggtggtgcgcgacgtcacgtccgtgaaccccaagttcttccacatggcgctgctgtcggtgaagaacatccggatgagcgggctcaagatcagcgcgccctccaacagccccaacacggatggcatccacatcgagcgcagcagcgggatatccatcatggacacgcacatcagcacgggcgacgactgcatctccatcggccagggcaacgacaacgtggacgtggcccgcgtgcagtgcggcccaggccacggcatgagcgtcggcagcttgggtcgctactccggcgagggagacgtcacacgggtgcacgtccgcgacatgaccttcacgggcaccatgaacggcgttcgcatcaagacatgggagaactccccttccaagagcaacgccgcgcacatggtcttcgagaacatggtcatgagggacgtgcagaaccccattatcatcgatcagaagtactgcccctactacaactgcgagcacaagtacgtgtccggggtgactctcaatgacattcacttcaagaacatcaagggcacggcgacgacgccggtggcggtgttgctccggtgcggtgtgccgtgcaggggtctggtgctgcaggacgtggaccttaggtacaaggggcagggtggtacatcggccaagtgcgagaacgccaaggccaagtaccttggctaccagtttcccaaaccctgcccctaggtgccggtgcttgtccggccg

SEQ ID NO: 93613 - DNA, 495 bp, Zea Mays
atggcagatccaaaattaagtggttggaagtatgggtattgggatgtcattgaaaatcgagattgggtgtggtgctctttatggttcaagcctcctagttatcatgagttgcgagagcttttgcttgacaaggttaagaagattgacaatgacaaggccaagcatgacgtagcatggaagaggcatatcaagaaaagaaaccggctgttacaccagaagttgaatgacttggtatatgtgtcctacaataagaagatggccactagatttcaaaagaggcgtgagaaggggaccaaaggccatgatggcattgcatgggatcattttgacgatgctattggtgcatcaacttatcttcaaggttgtaacctccctaagaaagctcatggtcaacaattgtactacacaaggagggtgcaacaagtggaggataaagttgacacagagaagaggaagatgattcaagtatgggagaaggggatgataatgagatag

SEQ ID NO: 93614 - DNA, 1184 bp, Zea Mays
cgtaattcaacaactagctgcatcgtcttctccaccgaccttgccgccgtcgccccgccgctccatccggtaagacatggaggagtacctggagagcatgaaatctctccgctcctacatgaacgatctggaggacgacgccgcgaagcggtctgtcgaggagcagcagcagcgtacagccatcgacgctcacgacagcgatgtcgcgctagtgatggcgcaagcaaagcaggcgagcgaggaggccgagcggctggccacagcgagggctaaggtaggcatgcagatggccgagaagcagggaaggattgccacgctggacatcgagtgcgccacactgaagcagaccttggagctcctccgtcaggaaactgcaagtacatttgtgaaactctgtgagaaaagattgttctacacaaagagaacagaaaccttgactgtcaaactacaggagcaacaggaatggtttagtatgaagaataagattactagacaggagccacatgttgccaaatctcagagcaagcaaaacttcattgaaggggagaaacatgtcatatttaactcagaagggagcctggataagtttaacaagcccgggaaactctacacacaactggtgtcagctcagctcaagatccaagacatcaaatcacaaagatcagcgcttcttttagaaatcagcagaatcaagcagattctggagcaagagaaaaacataattcctggttttcccgctgcactacagcagatggatatgaagtcattggaggaggaatacaaagctctgcaaggtgataaatcgggggaagttgagtacttccagtctcttgatgaaacaattaatgggatgaaggggattttggatcctgtcaaatgccaatgtggactggagtacaacttaaaacttgatggtgaagccatggatataagctaagcaagaacgaccacatacgcagatgcccatctccaccagatttcgtgcattttagatctgtacagtgtgagagatggattattctttggaaggtacagaatcttctcgcatgtatacgggtggatgctttgggcagagcttgacagcgtcatcgcgaataatatagaattctgatgttagaactatctggagcttgaacggactatacggccatagttttgttcaataattgtttttccttacgctc

SEQ ID NO: 93615 - DNA, 597 bp, Zea Mays
gacagccttattggataatcgtttgtattactaaatcaattcttcacactattaattctccttacacaataatcatattaaacttgagtttcgcgtgacttgaccactttatacttatgtacacaatctattcatcaaaccaataattaagctaacaaaaatatgaatcggcttaccatactaactctgacgcgctatccgcgagcacgacaaggattccagttcggcccttgtgtcgattacttggggaacatcactctgctaactccgtcttcacccgactcttgggattttttgatgacgcacggaacgacgacgaccttcgattgaagtcttcgaccgagcacttgataagcgatgcacacggacctcgcttatttttgcctaacgtccgggattcaggattcgacgaggttgagcagagaagaatgaggttcgacgggcttgacgacgatacgggagggtgacgtatatagagctgcaagtctagcaagctgacgcaagtgacggaagcagcctcgtacgacagcacataggcttgcgtcgacagtctatgggtttgagtgtttcatcgaataggcgggatacgagacacga

SEQ ID NO: 93616 - DNA, 182 bp, Zea Mays
cttccatgttattgtgttctgatacttgagacttttattatgactatgtatgagatattgtctcttattagtactagatgagatgtatcttattatgactatggatgagacttttgtgatgtaattgatgagactatggatttaaatgttgttatgtgattgtgtgtgagatgttttatgtg

SEQ ID NO: 93617 - DNA, 1587 bp, Zea Mays
gagccgatatagagctaaacacttcagaagcagtacatctgaaacaagaagctttcgcaagctggccagctagctccctaccgactagataccgaggagtgacggatcaggatgggaggggtgacctcgagtgtggcggcgaagatggccttcttcccgccgacgccgccgtcgtacgcgctggtggaggacgccggtgcgggggtcaccacgctcagcggccagccgcaccgggagaacgtcgagttgctgcgcttccgcacccgcaaagggaacacgctggcggcgatgtacgtgcgccacccggacgccgcgtccacggtgctctattcccacggcaacgccgcggacctgggccacctctaccagctcttcctgcatctgtccttcaacctccgcgttaacatcctcgggtatgactattcaggatatgggcaatcatcaggaaagccgagtgaacacaatacttatgctgacatagaggcagcttacaagtgcctcatagagaaatttggtgccaaggaagaagaaataattctttatggacaatctgttggaagtgggcctactgtagatttggccagtcgtttatctcagctgcgagctgttgtcctgcatagtcctatattgtcagggctgagagttatgtatcctgtgaagcgcacatattggtttgacatctacaagaatattgataaaatccctcaagttacatgtcctgtgctcattatacatggaactgctgatgaagtggtggattggtctcatggtaaacaactttgggaactttgcaaagacaagtatgagcccttatggctcaggggaggaaagcactgtgatttggagctctttccggaatacatccggcacctcaagaattttttccactcactagagaaatcgccatcccataggcaagcatggagggagaatgtggaccggattgaaccctcgcggaagagcactgatttctttgaaccctcgcgaaagagcacagaccaaaggaaaaaatcaaggtcaactcgagataagacgagaaacactgaacatagatatagcaacgtcgagaaggtagacaagctaaagatatcatttgatcagttcgagaaatccaggagaagtgttgatatcttcgagaggccaaagaggaacattgagcagctggattgtggccggaagagtgtcgacagattggacaggatctgggctagttaattcctttctttcacatgatatacaggttgggcttcggttgttttgggggattttacaggtgtggcgttaagagttgattcaccgacactaaaggagccaagcgtcgttgacgaggcttcgtgtagatgtgatggcttgtgtggtgggagaagtgtatgttgttggtcttcaaaaaaattgttatctggtcttaaactaaatgacactggggaggagtccatggcagcattgtgtataatctaatgctttggatcaacgatgtttttttcttctatttcattgaatcgaacttttccttccatggatattggctgtgtatggattttacggaccgtgaagttaaaagaaaggtgaattagataacttacaata

SEQ ID NO: 93618 - DNA, 486 bp, Zea Mays
atggaactcgacagcggcgatctgggcgagcacaacagggagccgggacgagatcgcggccgagggagctctggccggcatgggcgcgatggccagggagctatgcgcaggggcgagcaccatggggagctcggcggggaagagacaatcaccagggagctgggcgcggctggaccaaatctgagctggagctcgtggcaccggaggagcaggggaaaagcactgcggcgagcgtggggagggctcaggccgggcacgcaggaagcaaggcgcaacgtccatggtgagcatagggagatggggaaaagcggctcggtccgagtgccatggaaggggaagcttcggggaggagctcggttagaggagtgggaggccgcggcgcgcaggagcttgcgcgcgcagactgggcgagctccatgccggggccagggacgcacgcggaagctccggggaagaagaagacgcgagggagggaaagaagtctag

SEQ ID NO: 93619 - DNA, 103 bp, Zea Mays
cctataaatatcagcctctgcgatcgcacatcgggggtagctcaatcgtggtaccaaactgtaacacccggttttaaggaacaaagccgggtgcatctcatac

SEQ ID NO: 93620 - DNA, 993 bp, Zea Mays
gggctgcccattaagttcgacggtacccacgttcttaaacttaagaacgtgggtacccacgttcttaactcttttacagaaaaaaataaaaaataccgaaataacgaagacgacgaggacatgaggtggaaactggagaagaggcgcaagctcctcctgctcctgcttgccatcctcgcagccagcctcacctaccaggcaggcttgaatccaccgggcggcttctggcaagagaacatcacaggccacgtcatcggcaaccctgtgctcaacgacaactaccgccgccgctacatggctttcttctactgcaacgcgacggccttcgtctcgtcgctggccatcatcatgctgctcgtgaacaggaagctctcggcgagaggaatacagtcgcacgcgctcggcgtgtgcgtggtcctcgacctggtcggcctcatgggcgcgttcgccgccgggagctccaggatggtgtccacgtccatctacgtcctcgtcctggtcgtcgcggttctactctgcatcatgctccaggtcgttctggtcgtgtcggagtcggtccagcgtctcctgcagagactcctgtccgtcttcgatgtgacggagggagacgctggcttcgtactgccgcatgtagctgcagctgccagcaatggcgagccgcgagatccctggtacgaaaagaagcccaaatacctgctgctcctcgcagcgctcgcagcagccgtcacctaccaagccgccatgaacccgcccggtggcctctgggacgacggccagaccggccacgtagccggcgacccggtcctccggagcagccacccgagccgttacagggctttcttctactgcaacgcgacttccttcatggcgtccctcgtgatcatgcagtactatactttgagatatatttttcgttctaaaatcatactccatcttaaggcacctagcgtaaggactagtgtaacgaaaatgaacaggacagggtatttctaa

SEQ ID NO: 93621 - DNA, 2788 bp, Zea Mays
gcgcagccgatgcggcgccgatctccatggttgtgcgaaacctaggcggcgggcgcgagcgaggccacaaggcggcatctgcctcctgagtggggagcgggctcccccgatccacatcgtgcgggctggtggctgcgtcgcgatgaacccgttatgctgcatcgcgccggtctcgctcgagcacgctgcggatcagctccacgagcacccgcagcgcatcctcgctggtgcaccgccggcgacgccggccccaaagcaggatgcggttgtgggggtgctgcacaagtgggtcaactatgggaaggggtggcggtcgcggtggttcgtgctcgaggatggggtgctatcctactacaagctccgcggagctggtgctgggggggtagccgtgtcgcccgctgctgctgcagccagagtgatcggggacgggagtgccgtgcagcaggcgcgggaggtggccgcgggggcaggaaagctgtggaagccgtttggcgtgatacacctcaaggtctcgtctattcgtgcaagcaagtctgatgataagaggctgtacatattcagtggaacaaagacactacatttgaggtgtgaaactgaggaggataggaatgcgtggatagatgcattgctggcagcgaaggatcagttcccacggtcacagactagcaatgatgttggttctatggcagatattatgttgtcctctgagaagcttagggcacggctgcttcaagagggtctgtgtgaagcagtggtcagggagtgtgaatctattatgatgagtgagctactggaactgcacaatcatataaagtctcagcagcagcagcattctattttgatagaccgccttcggcaactggagacggagaaagttgaactggagagaacagttgtccatgagactaaggagagggaaacacttggctatgccaacagcagacaaagtgatttctattcagttttatcaggaggaagtacaactgaatcagaccctgacactgcaagccacatggctgaagttgaaactgaggaagatgaagttacatactttgatacaagagactttttatctgcagagtctttacggagtgcttcatgtcaaaggagggaactaattgcacatggttttggatcagaatatgttggagattctgttacaaatactgtcaaaactactaaatatccctttgtgttacgtagggataagctaccagagccgaaggaaaaagagaaacatataggattatggtcaataattagagaaaatatagggaaagacctgtcaggtgtttgtctacctgtttatttcaatgaacctctttcttctttacaaaaatgttttgaagatttggagtactcttacttggttgaccatgcactacactggggaaaacagggtgacagcttaatgaggatacttcatgtagcagcatttgcagtatcaggttatgcttcaaccgaaggtcggcaatgcaaacccttcaatcccctactgggggaaacatatgaagctgattatccagataaaggacttcgttttttctctgaaaaggtcagtcatcacccaatggttgttgcatgccactgtgacggcagaggttggagattctggggtgattccaatctgaaagggaagttctggggtcgatccattcagcttgacccaataggcgttcttacgctccaatttgatgacggagaaacatttcagtggagtaaagtgactacttccatttacaatatcataattggcaaaatttactgtgaccattatggcacaatgcgcatcaatggaagtggccagtactcctgcaagcttaaatttaaagaacagtcaattattgatcgcaatccacaccaggtgcatggatttgtgcaagataatagaacagggcaaaaagtagctatgttaattggaaaatgggatgaagctatgtattatgtgcttggggatccaagtgttaaacccaagggatatgacccaatgtcagaagcagttcttttatgggagagggacaagtctcttaatcagacacgttacaacctttctccttttgcaatttctctaaatgaattgacaccacatttgttgaacaagttggctcctactgattctcgtttgagaccagaccaaaggcatctggaaaatggtgaatatgagatggcaaattcagagaaacttaggcttgaacaactgcaacggcaggcacgacaactgcaagaaaaaggatggagaccaaggtggtttaagaaggatgatggcgacagttaccgctatatgggtggatactgggaagcgagggagacggggaactgggacggtattccggacatctttcgccagaatagtttgtctccaggactgcactaactacccttcttccctatgttatacttgtgtatctccaccaaacatttaacgaagttatggtggcaacaaggcagagccaaagcatagcgtttcttcgtgggcatggtcaacctcgtgtcggctggggttggacaagtggttggaaacgtaggtttcatttttgaatttcaggactaattttgtcttggaatgcggttagtttagatttgttttttatgccttggcggctaatccacggatggtaggctttgccgcgcgctctagtgtcttgggccatgtatggagtattatctatggacatcgggtgatttcaatcgtcgtcacaatacttcttgactgttacaatcgaatttacacaacataagatgtgatatctggctcaatttggattgaatctataattgtccttgtgtc

SEQ ID NO: 93622 - DNA, 973 bp, Zea Mays
aagcacttaaatatctatttgatcgagcctaggttttgacacaaattgttctaatcatttgtgcaggtgcatggatttgtgcaagataatagaacagggcaaaaagtagctatgttaattggaaaatgggatgaagctatgtattatgtgcttggggatccaagtgttaaacccaagggatatgacccaatgtcagaagcagttcttttatgggagagggacaagtctcttaatcagacacgttacaacctttctccttttgcaatttctctaaatgaattgacaccacatttgttgaacaagttggctcctactgattctcgtttgagaccagaccaaaggcatctggaaaatggtgaatatgagatggcaaattcagagaaacttaggcttgaacaactgcaacggcaggcacgacaactgcaagaaaaaggatggagaccaaggtggtttaagaaggatgatggcgacagttaccgctatatgggtggatactgggaagcgagggagacggggaactgggacggtattccggacatctttcgccagaatagtttgtctccaggactgcactaactacccttcttccctatgttatacttgtgtatctccaccaaacatttaacgaagttatggtggcaacaaggcagagccaaagcatagcgtttcttcgtgggcatggtcaacctcgtgtcggctggggttggacaagtggttggaaacgtaggtttcatttttgaatttcaggactaattttgtcttggaatgcggttagtttagatttgttttttatgccttggcggctaatccacggatggtaggctttgccgcgcgctctagtgtcttgggccatgtatggagtattatctatggacatcgggtgatttcaatcgtcgtcacaatacttcttgactgttacaatcgaatttacacaacataagatgtgatatctggctcaatttggattgaatct

SEQ ID NO: 93623 - DNA, 654 bp, Zea Mays
atcatcttcaagtcccccacatcgctgggttgaggagcagcgggcggtggatccatgttggctggggcgccattggaggcgggtgccatctctgtcccggacatctccgataccagattggtgcatggatttgtgcaagataatagaacagggcaaaaagtagctatgttaattggaaaatgggatgaagctatgtattatgtgcttggggatccaagtgttaaacccaagggatatgacccaatgtcagaagcagttcttttatgggagagggacaagtctcttaatcagacacgttacaacctttctccttttgcaatttctctaaatgaattgacaccacatttgttgaacaagttggctcctactgattctcgtttgagaccagaccaaaggcatctggaaaatggtgaatatgagatggcaaattcagagaaacttaggcttgaacaactgcaacggcaggcacgacaactgcaagaaaaaggatggagaccaaggtggtttaagaaggatgatggcgacagttaccgctatatgggtggatactgggaagcgagggagacggggaactgggacggtattccggacatctttcgccagaatagtttgtctccaggactgcactaactacccttcttccctatgttatac

SEQ ID NO: 93624 - DNA, 1668 bp, Zea Mays
atttgttgttctaacattgctaatgaatacaaattttgcttggagtaatagatatttgtagggcctattccttcgtagacaccaagaagcatgagcatttgttcattatttggaaactttgtttttttgtagaaaggcagttgatattattttgtgtactaaatttatggccagctcgatcctacaattggggcttattattattttttttctgtttgccaagatttctattcagttttatcaggaggaagtacaactgaatcagaccctgacactgcaagccacatggctgaagttgaaactgaggaagatgaagttacatactttgatacaagagactttttatctgcagagtctttacggagtgcttcatgtcaaaggagggaactaattgcacatggttttggatcagaatatgttggagattctgttacaaatactgtcaaaactactaaatatccctttgtgttacgtagggataagctaccagagccgaaggaaaaagagaaacatataggattatggtcaataattagagaaaatatagggaaagacctgtcaggtgtttgtctacctgtttatttcaatgaacctctttcttctttacaaaaatgttttgaagatttggagtactcttacttggttgaccatgcactacactggggaaaacagggtgacagcttaatgaggatacttcatgtagcagcatttgcagtatcaggttatgcttcaaccgaaggtcggcaatgcaaacccttcaatcccctactgggggaaacatatgaagctgattatccagataaaggacttcgttttttctctgaaaaggtcagtcatcacccaatggttgttgcatgccactgtgacggcagaggttggagattctggggtgattccaatctgaaagggaagttctggggtcgatccattcagcttgacccaataggcgttcttacgctccaatttgatgacggagaaacatttcagtggagtaaagtgactacttccatttacaatatcataattggcaaaatttactgtgaccattatggcacaatgcgcatcaatggaagtggccagtactcctgcaagcttaaatttaaagaacagtcaattattgatcgcaatccacaccaggtgcatggatttgtgcaagataatagaacagggcaaaaagtagctatgttaattggaaaatgggatgaagctatgtattatgtgcttggggatccaagtgttaaacccaagggatatgacccaatgtcagaagcagttcttttatgggagagggacaagtctcttaatcagacacgttacaacctttctccttttgcaatttctctaaatgaattgacaccacatttgttgaacaagttggctcctactgattctcgtttgagaccagaccaaaggcatctggaaaatggtgaatatgagatggcaaattcagagaaacttaggcttgaacaactgcaacggcaggcacgacaactgcaagaaaaaggatggagaccaaggtggtttaagaaggatgatggcgacagttaccgctatatgggtggatactgggaagcgagggagacggggaactgggacggtattccggacatctttcgccagaatagtttgtctccaggactgcactaactacccttcttccctatgtta

SEQ ID NO: 93625 - DNA, 95 bp, Zea Mays
ctagatgttctgtcggatattccatcaacatcaaagaacaaagcaccaggtatatgggccacctagaaacaagattgaatcattagaacatctgc

SEQ ID NO: 93626 - DNA, 106 bp, Zea Mays
ctatgtacatacaatataaggtgacaagtctaaggacgagcaaggaaaaaaagttattgacttctgtcttctttctcagtttataaagaatagttcagatcatttt

SEQ ID NO: 93627 - DNA, 267 bp, Zea Mays
ggtgtggattttaaaatcaagttccttacagttggtggaaagaaactaaagttgacaatatgggatactgctggccaggagaggtttaggacaataactagttcttactacagaggtgctcagggaattattttaggtaagacagtatttttactacagttgactgcttatatattttgatatattgtaatatcacattaatgtcatttttgtcaccttgatgtcggattattgaaatatgccattgaatggtataagttgatctat

SEQ ID NO: 93628 - DNA, 297 bp, Zea Mays
cacataaacacaaaagcaccacaattatatattcacaaaagtatcacaattataatatcattcacaactagatcactaatgtttcatatcactccaactattgttcaaaagcccacaactatatcactctagctgctccagagttgatcagtcacaaaagtaccaaagctacactaatgcttcaagcagttcaaaagccttcagacaaccactccagcttcttgtatcctcctgttttaaggtacaagctttctttgtccagaacaccctccactagatggtgttgcagccttatga

SEQ ID NO: 93629 - DNA, 761 bp, Zea Mays
ccaatcttcaagtttattcatcagtatcaccttgcgaagaagctcatgcttaacgacatcttggggtcaacccagctttggtccttcgcatcacgtgatcaattagcgtacctaaataatgcttcacagaagcgaattaaacacttagtgatgatacatcataactcctacgagcacacactaggtaactatgactctacgataattataatcttcgagataatcgttcttaattcaaacatccaatcaacaataattgaacacaagcctcaaactagagcgtaatatctaaaactagactgaatattatagaacaccaaaagactaacaaacttagaatcattagtcttagacatctaaatttagaataaggataaaagcacattaactgactttctaaatcacttatttagactaatttggataacacactaattacatgaatatcacattagttttagatctagcagacaactcattatcaacttaatagaattccataagactatagcttgaacacctaaaaacctacaaacagtggtaaatcctgcccgccacccgtttaaaatacttaacctgcctttcgtattattaatccaatcacacttgatttatacattcaataatacattcctagcataatatgcattttaaacctaagctttacgcgacacaattatttgtcaaacatgaacacagttgcaacaatgcatgtaacaaggcattttatcaaacatataataaaaccacaatgtgcctgt

SEQ ID NO: 93630 - DNA, 429 bp, Zea Mays
accggcaatgcctaaaagaattgggcacgcaaatacgaaatagccaggaccaggaatccgggttcatacaaatggaagatactgaggtccttgtaatgacaatgaataaattccgcaaacaaccactcattcgtggcaaggctagcgaagccattaaaattgaaaaggcagcttataatcacaactgttttgtagctgtagaattgttgggtagtaaagcttttttttgttttgttttgatctaattggatatctagttaccaacataactacatatcctttgttttgttttaattgcacctaggtgggccaagaagacttccacaatgcaccagtgggcattgtcccatttctgggacgagaacagcagctatgacggaattttgcattccagatgtgacagatacaatgcattgttattaaagcgtt

SEQ ID NO: 93631 - DNA, 2330 bp, Zea Mays
ccgctgacaaccggacatcccaatcgaatcagatgagaagctggaggctgctctacgatctccttcggcgcctgctcaaacccaccgatactcccggccaaatccgcccggcatcacacctttccacaaaatccggccaggctgcggcgcaatccgctgccgccgacccaacccgcgcggtgtcgctcctggccgagcgggactggttcgctcggatcaactcagagttcgccgccccactccggcagctgggcccgcgcttcgtcgtccgcgcgctgcagcacgccgccggcgagccgctcctctgcgtgcgcctctacgtctgggcatcgaggttcggtcagcacttcgcgcgggaccggtccgtgcggcgcgcgctcggggacgccctgttgcggcgcgggcccgtggtgctctccgcggcactggtcgccgacgtacggagctgtggctgcgaggtctcggaggagctgctgtgcgcgctggtggagagctggggcaggctcgggctggcgcactacgcgcacgaggtgttcgtgcaagtgccgcgcctgggactgcggcccagcacggccatttacaatgctgtgatcgccgcatcggtgagggcaggcgcggtggacgccgcgtacctcaggttccagcagatgcctgcggacgggtgtcggccggactgcttcacgtacaataccctggtgcacggagtctgccgacgcgggatcgtcgacgaggcgctaaggctggtgaagcaaatggagcgggcagggatcaggccgaatgttgtcacatacaccatgttggtcgatgggttctgcaatgctagcagagttgaagaagctgtttgtgtgttggagaggatgaaggagaagggagtgtcagcaactgaggctacatacaggtctctggttcatggtgcatttcgttgccttgaaaaagaaagggcatacaggatgctgagtgagtggattgagagtgatcctactctgcattcaattgcatatcatactttgctgtattgcctctcgaagaatgatatggacaaagaggcagttgaacttgcgaagaagatgagcaaaaggggatatctccttggcagcacaacattcagcattgtgatcccttgcgctgtgaaagtcttggagtcaagtgatctgtgtgagttggtagatgatttcatcaagaaaggggggaatctgggatttgatatgtatattatgattattaaatcctttctgaggtgcaaggatatctcaaaggcaaataagtattttagtcagatggtttcagatgggcttttgtctagtgtggaatcttacaacattgtgatagattgctttgccaaggcaggtgaagtggaaagagcactggagaccatcaaagttatgcaagagtcaggtttctctcctaatcttgtgacttttaacacattgataaatggatatttgaaactaggcaatgtacatgatgcaaaagcatttcttaaaatggtcatggaacatggtttaatgccagatgtcattacttttacttcccttattgacgggctatgtcatacccatcagctggatgatgccttcaattgcttcagtgagatgtctgagtggggtgtcaggccgaatgtccagacgtacaatgttctaatacatggactttgttcagctgggcatgttagcaaggccattgaacttcttaataagatgaaaatggatggcattacacctgatgcatattccttcaatgcacctattttgagtttttgcaggatgagaaaaatagagaaagctcagaaactttttaatgacatgtcaaggtatggtgtatctccagacagttacacatacaatgccctgataaaagctctatgtgatgaaagaagagttgatgaagctaaagaaattatacttgcaatggagtccatttcctgcattggtactaaacaacacacgtattggccagttgttggtgcacttactaaaatgggtcgtttcagtgaggcaggaatgttcatgaataaactgcatagaaaaaatgcccacttaggttcagtgcttatttaagggcagggtcagatattttggtccagactgtcaaagcatgacttatcagtcacatgatattttgctcggtggatgctgccctctcctgtgatgaatggatctatatcctcatctctgctaagctactatacaactgatgtttaccgttgattcacatgatctatttcaatcatgcttattgtgtccaccctttgttttcctattgagccatccatagtaatggtgacagtgtgcttgcattccctcagcaaatgttgatcaataattggactt

SEQ ID NO: 93632 - DNA, 2248 bp, Zea Mays
cccagaattggagtgactgaaacgcaaaactcgcatacgctaacgaaggagcaccagacggccagttgaaacgtagcagaagctccacaagtccacaacaccttctgctcctgcctcgccggccgccgccgcgtcccggctagcccgaaggaactccgccgcaaatacagctatgagctcagccgcttccgcggcgccacctagccgccgcactaggagccgcccgccatcagcttcttctcgcaagtctgacgactcctcggccgccgccgccaacgggaatgggaacaggaaggtcgcaaccaagcccgcctccccccaccagctcacgggggagaggacagtgaagaagttacggctctccaaggcactgacgataccggaggggacgacggtgttggatgcgtgccggcggatggcggcgaggcgggtcgacgccgtgctgctcaccgacaaccaagggctcctctccggcatagtcaccgacaaggatatagctacaagggtggttgctgaggggcttagggtggagcaaaccatcatgtccaagatcatgacacgaaatcctgtttatgtgatgtctgacacgctcgccattgaggctttgcagaagatggttcaagggaaatttagacaccttcccgttgtagaaaatggtgaggttattgctatgctggacattgcaaaatgcctttatgaagcaatagcaagactggaaaaggctgcagaacaaggaagtgcaatagcagctgctgttgaaggggtcgaacgtcaattaggagggaacttttcagctccttctgctctcattgaaactctaagggagaggatgttcaaaccttctctgtcaaccatcgtcacagagaatacaaaagtagcaattgtttcgcctacagatcctgtgtgtgtagcagcacaaaaaatgcgagagttttgtgttaattcagtggttgtctctacaggaaacacattgcaggggatctttacctcaaaagatatacttatgcgtgttgtgtcacaaaatatttcccctgagttgactctagtagaaaaggtgatgactgttaacccagattgtgccacattagaaacaacaattcttgatacattacatataatgcatgatggcaaattcttgcatattcctgttattgacaaagatggacagattgctgcttgcctggatgtcctgcaacttacccatgcaactattcaattggttgaaggagggaatggaactgtgaataatgtcgcaaactcggtaatgcagaggttctgggactctgctcttgcattggagcctccagatgaggaatttgatagccatagcgaggtatccttactcctgcagtcagaggctggagatggaaagagtagtgtttatccccctgtggttggcaattcgttttcctttaagctccaagaccgaaaaggccgtgtgcacagatttacttgtggctcagagagcttggacgagcttgtgtcttctgtaagacaaagattaagtattgctgatgaaaaagaagctgtgcaactcttgtatgaagatgatgaaggtgaccgagtgctgctgacaacagatgccgatcttgctggtgcactgctgcatgccaaatcatctgggttgaaggtgctgaagttgcacatcgaagaccctagtttgaacactgaagtgacaaaaccatcccaagagctggcaccacctcccctcaagagtgggatatcgatggttcatgttgggttaacggccggtgtagtcgctctcagtggcgcagcagtgatggtttacttgaaacgatctcaactgtgatttcgaaaatcggaggatgttttttaggagcttgattatctgaaacaagcattgccatcagctaatgcattctgaagctttgccttcactcggtgccatttacaagctaagaactgaaggaatgtacagaaatgaagaccacatctgtgatcttttgatgagctgaaagtccgtacaggccacgggacaagatcactgtttttggaggtgaatttctgggcagaacggcgtgcctatctttgttcattcagcacaagccgtggcaatttcacgactatgatgtaatgtgtaaacattacatatttgttcctattcatactgatgtatttgtttgtagataaaaactcatttcacatgacactattgtttgagaattgagaggggtctggtagaatgtcacctgattttgaggatagaatcgaatacataacatatatg

SEQ ID NO: 93633 - DNA, 719 bp, Zea Mays
cccagaattggagtgactgaaacgcaaaactcgcatacgctaacgaaggagcaccagacggccagttgaaacgtagcagaagctccacaagtccacaacaccttctgctcctgcctcgccggccgccgccgcgtcccggctagcccgaaggaactccgccgcaaatacagctatgagctcagccgcttccgcggcgccacctagccgccgcactaggagccgcccgccatcagcttcttctcgcaagtctgacgactcctcggccgccgccgccaacgggaatgggaacaggaaggtcgcaaccaagcccgcctccccccaccagctcacgggggagaggacagtgaagaagttacggctctccaaggcactgacgataccggaggggacgacggtgttggatgcgtgccggcggatggcggcgaggcgggtcgacgccgtgctgctcaccgacaaccaagggctcctctccggcatagtcaccgacaaggatatagctacaagggtggttgctgaggggcttagggtggagcaaaccatcatgtccaagatcatgacacgaaatcctgtttatgtgatgtctgacacgctcgccattgaggctttgcagaagatggttcaaggtataactagtgattctggcatctcctttgatagagttcattaaataaatgcttgtactaacaatataacgacaaagtatagcaagcctaagctta

SEQ ID NO: 93634 - DNA, 111 bp, Zea Mays
tctatttttaaatctcaatttgaatttcaaatttgtggtgaaaatgtacagtttgaacatacccatgtggaaggaatttattcttatttttatttcatatcatgtaggatt

SEQ ID NO: 93635 - DNA, 1906 bp, Zea Mays
ttcctgtctggctcgtcgtctctttatagattcagacagagcaagaaaaacgaggcctgatttcttgcagggcgtgcggcggcagcgcatgcgggttctctccttccccccttcctctccctctctccggacaacaccctcttcccttcttgcaccctcgttgttgttagattagagtaccaatatatagttccccacatcggccaggagcccaggaatcctcgcatcccgacatccgatttctctccctctccctcccttcccttcctctgcttccggggaggaggagaggaaagagacgaagggcgcgccgggaaggaggaccaggaggggaggcacacaacgcttcctcttgcacgcgggagtcctcaagcctcctccttggccttggctccaattcggggtgccataacacgacctctgccggcggccggccaccggcacccatgtcgcccttctacctcgctcgcggtgcttccaagctagtgagaaggattacctcggagacatcagtcgagctcaagattctctctgaaaaatggcggcttctcctcgctggcgtcatttttcagtacattcatggtttggccgctcatggggttcattatttgcaccggccggggcccacccttcaagatcttggcttcatgattcttccggagcttgggaaagaaaggggttacatcagtgagacattgtttacgttcatcttcctcgcctttgtgttgtggacatttcatcctttcatccttcagactaaacgcttctacactgttctgatatggcgcagggtacttgcattcttatgtgtttctcagtttcttcgaataataacattctatgcaacacagcttccaggacctaattatcattgtcgagagggctcacatctggctagattaccaccaccccagaatgcagctgaggtcttcctgattaatttcccaagaggagtgatttatggatgtggtgacttgatattttcatcccacatgattttcaccctagtttttgtcattacataccagaaatatggaagcatgaggttttgtaagatgcttgcttggtgcgtggctattgttcagagtcttcttattgtatcttctcgcaagcattacagcgttgatgttgttgttgcatggtatacggtgaatttggtggtcttttttgtggataagaagcttacagaacttcctgatcgatcggtggggtccacatcaatacttcctctgagtgcaaaggataaagataccaagttgaaagaagaaaatacgagattgctgaatggtaactctatggattcagctgatcggagaccacgaacacaaatgaatggaaagcaaattgataatgaaagccaagttgatagtgaaactgtgaaagcatgatatactctgatggagggggttttgtttgctaaaagctgttcagacagctaaggccctgttcgtttgttacggattgatggatcggaacgattcctaatcggattgctttagtttatataaacctcagctggaacgattccggggattgcttctctagtttatataaatctcaacgggaacgattctggatgtaattctacacaaacgaacaaggcccaaagaagaaatatgggatgccacgcgctttggtgcctagctccttgatgacttgatgacatagctacgaaggaaatagctttacatctcgctgttctaggcagcagaagttttgtttgcactttgcaaaactgtatatccttctcagctgtctcattgtaacccattctttttctggtttctttcctttattttccagcttggagttcagattctttctttatattaactgtgaatagatagtacacatctgaggttctttgcatgcgaacagtattcgtatagtcaatataaaattgtcc

SEQ ID NO: 93636 - DNA, 236 bp, Zea Mays
gtatttttttttctttttttttcttttcccaaccaaactttttatggtatgttcctacactatgtagacctacatgtaccattttggcacaattataaaaatgtttcctataactattagatttagttcgtttaatggaatttcctcggataattcagatttgaactgcaagtcactcgaaacatggaaaaccgtgcatgcaaaaatgatatgtatgttatttagcacaagttacg

SEQ ID NO: 93637 - DNA, 628 bp, Zea Mays
taagagtaccattgtaccgtagtgaagatatgctgtctgcctgttgcacccacgtatctgcgtacagaatctccattgttttttcacttcaggcacttgacgtctgacttcaacaccaggcaaatggcaggtggcagggttgcacatgctaccctcaagggccccagcgtggtgaaggagatcttcattggactgaccctgggtctgatcgctggaggtatgtggaagatgcaccactggaacgagcagaggaaaactagatccttctacgacatgcttgacaagggccagatcagcgtcgtcgtcgaggagtagttcccacgtgtcacctcagaagtttttttttccagttgtttttgaaaactcactctggagggcacgacaaagtgaatgctgtggagatttggcttgaaaataagcataaccatttgagaacaccagcttctgttgaattgtcttttcttgtcatgactatttgagcatgtccgtgtcgtaaccaaacatctgatctactttacaatatgttttatgtgatctttgcgattaactgtgctcgactttatgttgtgatttatgtgattggatcacggttacctaacaggctatttgcaaacctgtgttttgacgt

SEQ ID NO: 93638 - DNA, 356 bp, Zea Mays
gcgcaggagaactgcactccaatatattatagcagaagggaaggggaaaagaaccccggatacaaggcacccttacagaagggaagggaggccacacagaagcatacataaaacaatccataaggaaaggataagccacacacacccctatgaagatctgaatctgaccctaagaaagtggagagcggggcagccaggaaggataatcccttggcaccagcccacttgcccacttctccctctcctcatgtgcagtctgtaggagaagagagaggttaggagccactcccatcaaaaaacccactctatttctatgggtccagatcaacccacgctccaagagagagaggaggtaa

SEQ ID NO: 93639 - DNA, 590 bp, Zea Mays
acgcggcctccaactccacgcactccgatctactccaagtacgcccaccggcccgcccaccgggccccatcctcctaacccgaccgctactcacctgaaccctgtgtcgtcgcaagcgcgcgaggagatcgcggcggagcacactctacactgtgtgtacgcggaggcggtggccatggcagaggagaaccatgttgctgccggcgccggccagaagctctactggtcccgacaaaccagagccactgcggctcaacgcctgcgtttcgcggcacgttgctacctgcacgctctaacacataccctccacgcaagtttctatgcccatgcatccttgtttgtgaacaagtgtctagctgtgaatttttttagaaatttagcagcatggtagttatagttttatcttaattcctatgccactgagagctacaaacacaaagatacaacacctaatgtatatttgagaattctcaattgtaacttttgatgtttcagctatggagaaacatgtttattgacaaatattctatacctttatttatcgcattatagggtagcacaaagcatggaaaagaaataaacatgaaata

SEQ ID NO: 93640 - DNA, 1576 bp, Zea Mays
atcaaaggcgtaaactcggcgtagacggagactgcagacgcccggaccacaggaacaccgaagtaccgaacactaccggccacacgctcgagaataggcggcggtgcaggtcctcctccatctctgtcgtgactattctagtttctgcgcatgccctcacggatctttagactccagggttcaacttcactgtgaatacgctgacgctacgagaagtcatcacggaaggggtctcgaagcaaggtgcaaagactcacctgccgtctctgatgggctttgctggctgggtatccatgctgctcttcctcctggtcgccggtgctgtagcaaatgaccagatcttcaccacttcaggtgtgccatttgggcggagttcgcgtgagccaagttaccgcgtcgaattccatcctgttgattcaccattccatccagagaatggtcaagaatcggtaccaatggctagtcatgatgggaaacgttataaatgctttctaccagttgaagaaactaaaaccatgaagtcaatgcttccgcaaaatgcaactaatgttataatagaaagtgaaaggagaattaagccaaaggagccagatgagttacttgaggttctcaaggaccagtgcttctacaggcatgaaggttggtggtcgtatgaattctgttatcatgggaaaatcagacaggtccatgtagacgacgataaggttatccaagaatttgttctaggcgaattcgatgacgacgcgactgctgcataccatgaaaatatcacttctgagttagttgacgatgaccatcatgtgaaagatatatctcagaggtatcatgttcacttgtatacaaatgggactgtatgcgatctcacagatattccgcgggagacagaggttagatttgtctgctcggagcctactgtactgattagttcagtcaaggagatctcttcctgcagatatgttgtaacgattcaaagtcccatgctttgcaaaaacccgttattccaggaagaaaaacgaaccctctccatccactgcaatgagttgcctgctagagcggaatccagcgcggaggatgactcgcttccaaaagaagctcagatttccatcatccccgatcaggatgagctacatgatttcccagcctatgctacttgatttgcctccaataattatgtttgatgtagaaaaaaaaacaccattttggaggcgcaggggcaactgagcaacactatgtattaactatctcgtagatactacagcagaggctccttgtaaagcaggttgagacgatcattctgcagttcttattatataggatgattacgaaggtaacatgtttgggacagtaacatttgcttgaaatgtatatagtctacaacaagaataatgccagcattcttgaaatgtaggtgtgcgagcacttttacacgaagtaatattgctctggtgtgacgaacgatctgttgtcggttgagatgaaaaggcgttcgccttctattaagaatgtaaatggtacaaaaggatgtaaatggtacggatattatctgttcgtatttgaatttaatccggtttgagat

SEQ ID NO: 93641 - DNA, 1537 bp, Zea Mays
atcaaaggcgtaaactcggcgtagacggagactgcagacgcccggaccacaggaacaccgaagtaccgaacactaccggccacacgctcgagaataggcggcggtgcaggtcctcctccatctctgtcgtgactccagggttcaacttcactgtgaatacgctgacgctacgagaagtcatcacggaaggggtctcgaagcaaggtgcaaagactcacctgccgtctctgatgggctttgctggctgggtatccatgctgctcttcctcctggtcgccggtgctgtagcaaatgaccagatcttcaccacttcaggtgtgccatttgggcggagttcgcgtgagccaagttaccgcgtcgaattccatcctgttgattcaccattccatccagagaatggtcaagaatcggtaccaatggctagtcatgatgggaaacgttataaatgctttctaccagttgaagaaactaaaaccatgaagtcaatgcttccgcaaaatgcaactaatgttataatagaaagtgaaaggagaattaagccaaaggagccagatgagttacttgaggttctcaaggaccagtgcttctacaggcatgaaggttggtggtcgtatgaattctgttatcatgggaaaatcagacaggtccatgtagacgacgataaggttatccaagaatttgttctaggcgaattcgatgacgacgcgactgctgcataccatgaaaatatcacttctgagttagttgacgatgaccatcatgtgaaagatatatctcagaggtatcatgttcacttgtatacaaatgggactgtatgcgatctcacagatattccgcgggagacagaggttagatttgtctgctcggagcctactgtactgattagttcagtcaaggagatctcttcctgcagatatgttgtaacgattcaaagtcccatgctttgcaaaaacccgttattccaggaagaaaaacgaaccctctccatccactgcaatgagttgcctgctagagcggaatccagcgcggaggatgactcgcttccaaaagaagctcagatttccatcatccccgatcaggatgagctacatgatttcccagcctatgctacttgatttgcctccaataattatgtttgatgtagaaaaaaaaacaccattttggaggcgcaggggcaactgagcaacactatgtattaactatctcgtagatactacagcagaggctccttgtaaagcaggttgagacgatcattctgcagttcttattatataggatgattacgaaggtaacatgtttgggacagtaacatttgcttgaaatgtatatagtctacaacaagaataatgccagcattcttgaaatgtaggtgtgcgagcacttttacacgaagtaatattgctctggtgtgacgaacgatctgttgtcggttgagatgaaaaggcgttcgccttctattaagaatgtaaatggtacaaaaggatgtaaatggtacggatattatctgttcgtatttgaatttaatccggtttgagat

SEQ ID NO: 93642 - DNA, 1530 bp, Zea Mays
atcaaaggcgtaaactcggcgtagacggagactgcagacgcccggaccacaggaacaccgaagtaccgaacactaccggccacacgctcgagaataggcggcggtgcaggtcctcctccatctctgtcgtgggttcaacttcactgtgaatacgctgacgctacgagaagtcatcacggaaggggtctcgaagcaaggtgcaaagactcacctgccgtctctgatgggctttgctggctgggtatccatgctgctcttcctcctggtcgccggtgctgtagcaaatgaccagatcttcaccacttcaggtgtgccatttgggcggagttcgcgtgagccaagttaccgcgtcgaattccatcctgttgattcaccattccatccagagaatggtcaagaatcggtaccaatggctagtcatgatgggaaacgttataaatgctttctaccagttgaagaaactaaaaccatgaagtcaatgcttccgcaaaatgcaactaatgttataatagaaagtgaaaggagaattaagccaaaggagccagatgagttacttgaggttctcaaggaccagtgcttctacaggcatgaaggttggtggtcgtatgaattctgttatcatgggaaaatcagacaggtccatgtagacgacgataaggttatccaagaatttgttctaggcgaattcgatgacgacgcgactgctgcataccatgaaaatatcacttctgagttagttgacgatgaccatcatgtgaaagatatatctcagaggtatcatgttcacttgtatacaaatgggactgtatgcgatctcacagatattccgcgggagacagaggttagatttgtctgctcggagcctactgtactgattagttcagtcaaggagatctcttcctgcagatatgttgtaacgattcaaagtcccatgctttgcaaaaacccgttattccaggaagaaaaacgaaccctctccatccactgcaatgagttgcctgctagagcggaatccagcgcggaggatgactcgcttccaaaagaagctcagatttccatcatccccgatcaggatgagctacatgatttcccagcctatgctacttgatttgcctccaataattatgtttgatgtagaaaaaaaaacaccattttggaggcgcaggggcaactgagcaacactatgtattaactatctcgtagatactacagcagaggctccttgtaaagcaggttgagacgatcattctgcagttcttattatataggatgattacgaaggtaacatgtttgggacagtaacatttgcttgaaatgtatatagtctacaacaagaataatgccagcattcttgaaatgtaggtgtgcgagcacttttacacgaagtaatattgctctggtgtgacgaacgatctgttgtcggttgagatgaaaaggcgttcgccttctattaagaatgtaaatggtacaaaaggatgtaaatggtacggatattatctgttcgtatttgaatttaatccggtttgagat

SEQ ID NO: 93643 - DNA, 1419 bp, Zea Mays
atcaaaggcgtaaactcggcgtagacggagactgcagacgcccggaccacaggaacaccgaagtaccgaacactaccggccacacgctcgagaataggcggcggtgcaggtcctcctccatctctgtcgtgggttcaacttcactgtgaatacgctgacgctacgagaagtcatcacggaaggggtctcgaagcaaggtgtgccatttgggcggagttcgcgtgagccaagttaccgcgtcgaattccatcctgttgattcaccattccatccagagaatggtcaagaatcggtaccaatggctagtcatgatgggaaacgttataaatgctttctaccagttgaagaaactaaaaccatgaagtcaatgcttccgcaaaatgcaactaatgttataatagaaagtgaaaggagaattaagccaaaggagccagatgagttacttgaggttctcaaggaccagtgcttctacaggcatgaaggttggtggtcgtatgaattctgttatcatgggaaaatcagacaggtccatgtagacgacgataaggttatccaagaatttgttctaggcgaattcgatgacgacgcgactgctgcataccatgaaaatatcacttctgagttagttgacgatgaccatcatgtgaaagatatatctcagaggtatcatgttcacttgtatacaaatgggactgtatgcgatctcacagatattccgcgggagacagaggttagatttgtctgctcggagcctactgtactgattagttcagtcaaggagatctcttcctgcagatatgttgtaacgattcaaagtcccatgctttgcaaaaacccgttattccaggaagaaaaacgaaccctctccatccactgcaatgagttgcctgctagagcggaatccagcgcggaggatgactcgcttccaaaagaagctcagatttccatcatccccgatcaggatgagctacatgatttcccagcctatgctacttgatttgcctccaataattatgtttgatgtagaaaaaaaaacaccattttggaggcgcaggggcaactgagcaacactatgtattaactatctcgtagatactacagcagaggctccttgtaaagcaggttgagacgatcattctgcagttcttattatataggatgattacgaaggtaacatgtttgggacagtaacatttgcttgaaatgtatatagtctacaacaagaataatgccagcattcttgaaatgtaggtgtgcgagcacttttacacgaagtaatattgctctggtgtgacgaacgatctgttgtcggttgagatgaaaaggcgttcgccttctattaagaatgtaaatggtacaaaaggatgtaaatggtacggatattatctgttcgtatttgaatttaatccggtttgagat

SEQ ID NO: 93644 - DNA, 745 bp, Zea Mays
cagggttcaaatggacaggaccttggaggttgttaaggagaaagaaaatgaaaacacagagttgcaggagaagctgcagcagcttgaatctcagctaatggaagtgaacagaatcagagaggaaggcaacactgaaagtatctgatggaaggagaacatattagaccaagagaatgaattacagaacataaaacaggagaacgacgacctgcagacaaaggaatcagcggcttctgagaagattaaggaactctcttcctagcttactaatgcaaaatatggcatgataaatagtaacaccaaggaaggagataatgagaaggggggcactgaagaggacgatgaacctgttgtagtagttgccaaaatgtgggagaacaacaagtttgttgactatgattcatctaaggagaaggagaatgatggtgactcacaggttgatttggaatcaaacaagggggatgcaggtcttgacagcaacgggttgcactcaactaaagagaacagtggcagggcatcaccaactaaacagcaccagcagtataagaagcctctactaaagagattcggtggtctgctaaaaaagaaaagcgaaaattagcataaaaccgtctgatgatattctttattctatcatctgacatatttttttgtaaaccctctcagagatgctgaaagccaacttactattgagagtactatgaaacctcctgcgcagtgtgaaataaatgacagaaatgaagtg

SEQ ID NO: 93645 - DNA, 270 bp, Zea Mays
atgacacaaaactttccccaactctttccagtacgtctattgaaaatggaatatcaaatcaagttcaatgatgttcataattggttcatcctcatcaatcatgtgatatgtttttataagcacttaattcttgaagagcggatttctaccaaagtggaattcaagcttaaaggcctaaggctccctgatcctatatcacttgaagtcctggaggtttggactttcttctatgataccctcaacctcaatcacaccaatgtcatttcataa

SEQ ID NO: 93646 - DNA, 766 bp, Zea Mays
atgacgccgccgccgccgctcctcgcctgcctcctcaccctcgtccttgccgctgcggtggcgccaccggcgggcgccgtctgcgttccgcgcaagcccggaggccatagcaagccaggagcaccggccaagtctgcgccatcgaagccgaagccgaagcccacgcaggcgccggcgccgccgaaaccgacgccgatcgctccgggcgccgacatcgtgaggagcctgtgcctgaagacggactacccggacctgtgcatgtcggccatcgcgaagcagccgcagccgcagctgcccggcgggaagcggctggacggcgccggcgtgctgcggctggcgatgggcgccgtgcgcaccaaggccgccgaggccaaggccgcggcgggcgcgctcgccaacgaccccaagacgcagcagctggcgcgcggcccgctgcatgactgcgtggagtcgttcgacgacatcgcctatagcctcgaccaggccgacaaggccctcgccggcggcgaccgcgacaccacgagcaccatgctcgacaccgtgcgcaccgacgttgacacctgcgaccagggcttcgaggagcgcgaggagctcacgccgctcatggctaagcaggacgcggagctcgccaagctctccagcaactgcctcgccattgccaccgctgccggcttgcgctagaccccatgtatcgttcggtcatccatagctgtgcatgtgctagctcctaggcagcagcaacaacatatactgcccctataattaa

SEQ ID NO: 93647 - DNA, 2521 bp, Zea Mays
attctgggttttcctctacaccacaacgctacgaaactcttcatccatttgatccacatcaaacggctgatagggcccctcctatctctcctacatcttctccactcccctggattgagttggacaacttggcgcttcacctcgctcgctgctctcctctcagtcctctggttctccgtcctctcgcctcgcgcggccgcgcctgcgcctcgtcagcaagataaggctgcagcctgcaggccacagtgcaggcccatgcttccagaatcttccggaaccttgcgccgagcctgaactccccggcggcgcctggccctgtgaaggctgcatgagtagtcgcgccgccgccgccgccgcagcggagccatggggatgctcgccgccgccgttgcccccgctctcctcgcctcgccacaggcatccctcgtccgccgccgcctctccggtgcgtggacgctgcgcctgaagcccgctgctgcctcccacggcgtcgcggcgctcagggtacataattttctcccaaagtgttacattaccaacgttgaggttgatgttagtactgtaaataaagaagaaactttcgatgatcatccatcattggcaccaggacgcaacattccgcttgttaatcttcgaggagatattctagattctagtccttttccgctgcacgatagggcttcctgtccttcaggttttgaagagttgccggtcttgtctgaaggagagcaacatactttggcatccactcctgctcatcctgctggactatatgctctatatgctagttacttatttggtaacttggtggaacaactgtggaattttgcttggcctgccacactggcaattcttcatccaaatctattgcctgtggccattgttggtttcttcacgaagctttcagtgtttgttggggctcccatagttggcaaacttatggatcatttcccccgaatacccatgtacacagcattgaatgctgtgcaggtaggcactcagttgatatcagctgcaactgtcatctatgctctaagaaacctgagccatgcttctacaacagctgtggttctgagaccttggttcattgcactagtggcagctggagctatcgaaaggcttgcaggattggcgctaggagtttccatggagcgcgactgggttgtgttgttagcaggaacaaacaggcctgttgcattagctcaagctaatgctgtgctcaatcgacttgatctagtttgtgagacagttggtgcttctgtttttggccttcttttgtccaaataccatcctgtgacctgtttaaagattgctagtggtctaatgatatgcagtttccctgttctggtaaaccacatttatcatcactcctaaaacttgaatatggtagccagatgtagcgtactcacaatgctatatggtatttccaatttcaggtcatgttgggtcaactaatcaatagagtttcttgccatgcacttgattcctctagaactgccactgatgaatctatttgtgctgatcttttagatgtacgcaggatagttccaaatagcttgagggctatcaaacatggatggaatgagtataagcagcaaacagttctacctgcaagtgcagctaccgtgttcctaaatttcaatgttgcacttgctccaggtgccataatgactgcattattgatgcatcgtggtaccagtccatccattgttggtgctttcagtggattgtgctctatcatgggccttgttgcaacattcatctcctcaagcctggtgaaaagagttggaattctaaaggcgggagctgctggattgatatttcaagcttcactcttgtcaatcgcgctcacagtgtattgggctggttcaatttcgcaaacgacacctctacttatattcctagcatccattgcattgtcgcggttggggcacatgtcttatgatgttgtggggactcaaattgtccagacaggtgttcctgcttcaaaagcaaatctaattggaggaatggaggtttcaattgcaagccttgcggagctagtcatgcttgctatggctataattgcgaatgatgtctcccatttcggcttcctggcgatcctgtctgtgtcatcagttgctggggcagcatggatgttctgtcggtggttaacaaatccaacagatgagcagagggaactattcatggttgatcccctttatcaagttcaggcaatatagtggatgaggcaggaaacaaccaggaaaactgcaggcgcctacttgctggtggtgcttgttggatctgcaataccgttacgatgatactaagatacagtgtgacatttaggttcaatacgggatacacttagggtagaagcatttgctcctcgtggcctcagccatgcgcagaattcaatttgtatactcgttcatctcctcacctgtacaacacatatttgatctgtataagtgttacttgttatagctgatgtagaacaacattaacagccatcggtagcacacagtcaatgaaatct

SEQ ID NO: 93648 - DNA, 2418 bp, Zea Mays
attctgggttttcctctacaccacaacgctacgaaactcttcatccatttgatccacatcaaacggctgatagggcccctcctatctctcctacatcttctccactcccctggattgagttggacaacttggcgcttcacctcgctcgctgctctcctctcagtcctctggttctccgtcctctcgcctcgcgcggccgcgcctgcgcctcgtcagcaagataaggctgcagcctgcaggccacagtgcaggcccatgcttccagaatcttccggaaccttgcgccgagcctgaactccccggcggcgcctggccctgtgaaggctgcatgagtagtcgcgccgccgccgccgccgcagcggagccatggggatgctcgccgccgccgttgcccccgctctcctcgcctcgccacaggcatccctcgtccgccgccgcctctccggtgcgtggacgctgcgcctgaagcccgctgctgcctcccacggcgtcgcggcgctcagggtacataattttctcccaaagtgttacattaccaacgttgaggttgatgttagtactgtaaataaagaagaaactttcgatgatcatccatcattggcaccaggacgcaacattccgcttgttaatcttcgaggagatattctagattctagtccttttccgctgcacgatagggcttcctgtccttcaggttttgaagagttgccggtcttgtctgaaggagagcaacatactttggcatccactcctgctcatcctgctggactatatgctctatatgctagttacttatttggtaacttggtggaacaactgtggaattttgcttggcctgccacactggcaattcttcatccaaatctattgcctgtggccattgttggtttcttcacgaagctttcagtgtttgttggggctcccatagttggcaaacttatggatcatttcccccgaatacccatgtacacagcattgaatgctgtgcaggtaggcactcagttgatatcagctgcaactgtcatctatgctctaagaaacctgagccatgcttctacaacagctgtggttctgagaccttggttcattgcactagtggcagctggagctatcgaaaggcttgcaggattggcgctaggagtttccatggagcgcgactgggttgtgttgttagcaggaacaaacaggcctgttgcattagctcaagctaatgctgtgctcaatcgacttgatctagtttgtgagacagttggtgcttctgtttttggccttcttttgtccaaataccatcctgtgacctgtttaaagattgctagtggtctaatgatatgcagtttccctgttctggtcatgttgggtcaactaatcaatagagtttcttgccatgcacttgattcctctagaactgccactgatgaatctatttgtgctgatcttttagatgtacgcaggatagttccaaatagcttgagggctatcaaacatggatggaatgagtataagcagcaaacagttctacctgcaagtgcagctaccgtgttcctaaatttcaatgttgcacttgctccaggtgccataatgactgcattattgatgcatcgtggtaccagtccatccattgttggtgctttcagtggattgtgctctatcatgggccttgttgcaacattcatctcctcaagcctggtgaaaagagttggaattctaaaggcgggagctgctggattgatatttcaagcttcactcttgtcaatcgcgctcacagtgtattgggctggttcaatttcgcaaacgacacctctacttatattcctagcatccattgcattgtcgcggttggggcacatgtcttatgatgttgtggggactcaaattgtccagacaggtgttcctgcttcaaaagcaaatctaattggaggaatggaggtttcaattgcaagccttgcggagctagtcatgcttgctatggctataattgcgaatgatgtctcccatttcggcttcctggcgatcctgtctgtgtcatcagttgctggggcagcatggatgttctgtcggtggttaacaaatccaacagatgagcagagggaactattcatggttgatcccctttatcaagttcagatagtggatgaggcaggaaacaaccaggaaaactgcaggcgcctacttgctggtggtgcttgttggatctgcaataccgttacgatgatactaagatacagtgtgacatttaggttcaatacgggatacacttagggtagaagcatttgctcctcgtggcctcagccatgcgcagaattcaatttgtatactcgttcatctcctcacctgtacaacacatatttgatctgtataagtgttacttgttatagctgatgtagaacaacattaacagccatcggtagcacacagtca

SEQ ID NO: 93649 - DNA, 92 bp, Zea Mays
ctttttactggcagattaggaaagtttgagtggcacataaaccctagaacactcaaaaccctaataaggaccctagaaaccctaattagtgc

SEQ ID NO: 93650 - DNA, 726 bp, Zea Mays
tacacatcatcatgcccttttccagaaacacaagccccggattggatgttattgttaaccacgcatttgcattgccacgaatcagaagaacccaaatgcgccagcaatccggagctcagtcactactcactctatagtctctaccctacccttgggtgtcaggacccagagattacagtcacaattgccctgtcaaacaaagaagaacgtacccccgtctgtacaacaaacttcttccagccttggctgttccgcagaagcaaaaccatacagtacaggagggtccaggcccttctagagacctggggttcttcgttcgttcgctcgcaaaatgcttcgaagcaagccgctctgagaggtcgcattgtgttctttactcctcgatgctgttctttgtgttccggtgctggatggcgtagtgcctctgcagctcccggagcctctcaagaagctcctggaacgacggccgttgctgcgggtcgctgctcacagcaagggaaatcgttaacaggaatagttaagcacagtacaatagctttcttctacagggacagacagttcaagatcattagcgcttagcctgaaaatttacccttccctaaaagcagtacagacagaagggataagcattaagcagtaagtacctttcccagcagctcaggataattgatttccactgaggatctacttcacttgggatatccaacctttggttcataaaaccca

SEQ ID NO: 93651 - DNA, 2141 bp, Zea Mays
gttccacatactgtcaattcattagctctaaaaaaatatcaggatcccaaggcaaacagaaattgtactttgagcgtagtagtacaataaagattcagattcaaattactatgacagtatgaccattctgagccataaaatgaccatgtaatttactcttatgaactaatctcaaccataactgtcataattgcatttaaggttctccaaatgaccacactagttccacatgtaatactgtcaattcattagctctaaaaaatatcaggatcccaaggcaaacagaaattgttctttgagcgtagtagtacaataaagattcagattcaaaatactacgacagtatgaccattctgagccttaaaatgaccatgtaatttactcctatttgagtacgccatacgcagagtagaagataacctcccgaaatatagaaactggtccctaggctacattttatttctccactatgcaggtgacaatctccagaatcccagagccacgcaaccataataaacttaaactggacacaggcacacatcaattctgccacgtttcatctccactataaaaggaacagtaacaacatagctcagttcagccattgtgcaccaaagatattgtaccatgtattccaacatcattaagatcaatggctcataatccgccctcaaaggcttcaactcaatccaatggccagtgttctttgtatcatcccacgccctggcttcaacgttgctttccactcccctgcacaagcgaaacccgggttcaatcccccacagccgtctttgatttcccaccgaaaaaaaggttcctttcatcaggcgccgctccaccttcacgaaaagtcatggccgggcaccgcttccagctatggcgccaggccaccatgacaccccatggcagtttcagaacacccctgacgacaactggccacgatgcccagcgggaggcacagcatgtggagccccagcagcaagcggacgtgcgtgtgtcggaagtgctgaggcgaggggcgccattgcgcccttggcagtaatgaaaagcagcagcaggtgcttcgagcaggagcacgtgtggctcagggagaaggaccagcaggagtggctgagcagcgagaggtttctcaccggctgcaagcggtggggtcgatgttactcaccaggcgggagaggttccacagcgagttcctgtgccgcatcatgccttgggagatggggtcgctcttgtggcagaattttccctactatgtcagggattatggggaggattactcagaaagtgaggaggatgagcatgctgattgctgagtcagaggatgatggctcagaatctgaaagggaagacaaaggtgatgaagattggacaagcaacaatggaaaatatggtgaaagtgacgatgaggatgcctcaaatctgtggaagacctaaaaaatctggatgacctaataaggttggtccgttgtactattgagcatttgccaaggtaatttatcttatctccctgtcatgttgcataagaaaatgaatttcgatgcttttcgcagaagacacatatttggctgtttctaaaaagtttaccagtttcatttacagagaaaattatattgtgccacttttgtgcctctctaaaacgagtggacattttgaagtgcagtgcaaatgaatgtaaagacattatccctgaaggaccatatggcgtactttagcaaatctggtattagatagttgaggcgaaataagacttactattgccttgttatgcattataattggcctaggcttgtactttcatgtacctgaacttgctggtgacagagttttccagatttaaatgttcgcccgtttgtataattagatatatgagtataactagatatatgagacgtgaaccttaattaatctgattattcattttattttttgcaaattttatcttgttttgtattttactgtagcgttagcacgtccacactactatttattgtctgttacaaacaattgcgtgaaacttaaactatggaaataaatatcgtcatttggttgttttcatgtgcatccctgaaatactgccgtagcgttagcacgggcactctactagtggctgttaatggttttccactaggaatgaaaatgaa

SEQ ID NO: 93652 - DNA, 840 bp, Zea Mays
atgcagcgaggcacgcagcagcgacgacagtcgaatcggcaacagagcgttggtgaactcgatgaatacgaccacggacgtgggctggcgcggataggacaacggcgactggtgagcccaacagaggagcttgcgcaacgacaaccaaacagtgaagcacacgcgcgcagccagggactcaacgggacgctggttccagggagccgcgcgagagggagcaagaagccaatccaacggtggttcagcagcatgcgatggctgggtccgagggggcaagtacccaagccaagcggcatgttgaggtcagcactccgagcgtacatgctttgtgcccatgtccgcgatgaaccagccgcaggagaatcccggactcgggcatggaggaagcagatggcgcccgagctgggagggagctccggccggactcgacagaggaagctggggggttgcgacttccatggccgagtagagaaccggcatgggcgcggcgaccagcgccatagcggggcggagttcggggaggggctcggtagagcgcgagcaagcagagagcgcggcgcgcggcgacgggggctcgggaaaagggaagccgcggcgcgtgcgcagggaggagcggccgagctaggcatcagagagagagagagagcagcagcagcggcagaggaagagggaggagcttgggcgcgccatggctgggagcttggggaaaaagccgcgtcatgggggaagcaagggaccaggagcgagcaggaagggcacgcggcagggggagagaggagcggctcggaagatggcggaagcttgtgcgacgacgactggataaagctcctgcgcgtgtag

SEQ ID NO: 93653 - DNA, 1187 bp, Zea Mays
aataagtctaattatcatttttaccgtatgcattaggagtagttctagtttagccctagtttactcttcttctgtctcaaatcctcacctcttcggctctacttcgactagaggcgttttgtgttgtctgcggacgccaagacacaccctaggatctcttctccctgacggggtccctcccgtgagcgagattcaggcgctgccgacgaactccgccgccctgcgcacgcgtagaccgtccgactcgtcaggcaaaaactctagcctctacgccaggttgcggaccgtccgacccctagccgcggaccgtccgcgcctccgcagagagcaccgccgctgattcatctccagtgtttgacgtccgaatcggcgccaacacacgtcatttgaaataaacacaatagaaaatgttttgtgaaacaaattacaaaacagctctaactcctacagaaagggcaatgagccaaaggagcgagagccgaagttgtttttggaggagccgaagccctaccaaaggggcccttactgatgaggacatcacttctatatatacaataaatggaccgataacacgatctcgtgcacgacagctaaatctccaggtacgttctacccttgtcaattgtgttttagagcttacgcttggggccatggatgttttgatgattaggtaccttagagagaaccagtaaggacttgggaaaggccaaggtgttgaggaggagcagcaagggcgtccacaacaggaaggagatcaagtccgagtcggttgcgactctatctcgggttccaggaccagtctgcactaaaattgacgcccaagatgcatccggactccgattgcaacggactggatatggttggaaagataacgagattatctaaccaacccaactggttccaccctaaaattcatccggagtcaacgggaatcgtcgaaacaagtcagcgttcagattctgttttggtgctgcgacaccgtctgttgggccattgggccgtgtatcgcgtcggagcccattaggggcgagtctagggctacgcacgccctaatactctatttattcagcagccgccgccacatttaggtttgggttttgcttagatcaattctgtcatcgaacagtgtcgccgtcatcggcttatgagaccccctcccgtaatcaatacaagtttggttgcgtttc

SEQ ID NO: 93654 - DNA, 460 bp, Zea Mays
tccagaatataacacctcccattaccttaaaaaaacacctgcccaattcgctatctgttcccgtgattacaacagtccaatcaatggatgcaacgggtattcgcagagcacgtagattctgctccacgacgtcgtgccaggtctactaggtccggccgccgccacgggcatgacctcacgcacgcagccgcctcagctagctgcaggcggctcgcagctcatggccatgggcgtccgcagccgagccgcccctgcccatgttcatcagggtggtcaggtgcgagacctccttgggcaccgacgccgtcagcacctgcatgacgacaaggccaccgtcaccattcaccatttcattcatcgcatcacgctcatcttcaacgcacagcgttgttacgtatacgcacctcgtggccgtcgtcggtgatgaggacctcgtcctcgatccggatccccataccgc

SEQ ID NO: 93655 - DNA, 2221 bp, Zea Mays
gaacaagaaccggccaacaaaaatgaatgctagctcctcctgcatgcatcctcccattctcatcactccaaacctatgaacaaaatgcatgcctcagaattccattggctcaataattgccaaaatagagcggaataattactatcgtgtagaagaaactctactctgatctctttctgtcgccatggggcatcaaaactgccgtcgtcctccgcatgtcgtcgttgctcttgttgcgatagtcctgctgcaaccatgtttcgtctcggttgcatcctcgtccagctcggtggccatcgacggcggcgggaccaacgtaaaggtgccggcggtcgacggcggtgctggcagcttcgtcgagttcgtgaccgagaacgtggagctgtacagcaacgtgagcaatgagcacatgtacgggtcggcgggcaaggtgtgggatccgcagctgctggtggcgcagggcatggtggtacggtacgtggtgagccccgacggcaagggcaagttcaggaccatcaacgaggccgtcagggccgtgccggaggggaacaagaggagggtcatcctcgacatcaggacggccacctacagagagaaggtgctggtcccgtacacgaagccgttcatcacgttcttgggcaaccccaagaaccccccggtgatcatgtgggacgacagggcggcgacccacggcaaggacggcaagcccgtcggcaccgtcggcagtgccacggtggcggtggagtcggactacttcatggcctccggcatcgtcttcaggaaccacgcgccgatggctgcgccggggcaagagggcgggcaggcggtggcgctgcgggtgttcggcaccaaggcggcattctacgactgcacgatcgagggtgggcaggacacgctgtacgaccacaagggcctgcactacttcaagtcgtgccacatccagggcagcgtggacttcatcttcggcttcgggcggtccctgtacgaggactgcgccatcatgtcggtgacgaagcaggtggcggtggtgacggcgcagcagcggaccaagagcatagcgggcgccatcgagagcggcttctccttcctccggtgccggatcgccggcacgggcgccggccagatctaccttggccgcgcctggggcgactcctcccgggtggtgtactcctacaccaccatgggcaaggaggtggtgcccgtcggctgggacggctggaggatcgagaggcccgagaagagcggcatctactacggcgagtacatgtgctcgggccccggcgcgctgccgcacaagcggatcggctggtcgctcgtgctcaacgacgcccaggccaagcccttcaccggcatccacttcatctttggcgactcgtggatcctgccgccgccaagcctggtgggctagcgcggaacggagcggatcatgcagtgttaccaataccatatagcggctagcactactttattaatctcttcagagttcagacgttgcagaacgcgatccatcagttgttggcgtctttgctgtgtcctcctcagccgtttcttcttcttcctcctcctcgcccctccttagtccttacccaccacgtcgatcgaaggcctcgacggggaagctactggacagtccctcgatggccttgcagtgcagttcctcgacgcagatctcgtggagcgtcatccacagcagcatctccttggccttgacccccgtgatcttcctgagccggcccttgtcgccgaccgccgacacctcggcgccgtacatgacgtgcctgccggccttggagaagtagtggtccaccttgcggggctgcctgagccacacgaagcccgtctcctcgacgtagccgcactcgatgatgtcacgcagcgggagcaggccgctgggagaggcccgtctcctggaggagccgcatcttcccctgccccgccgcatcgcccacgtacacctccgccttggcgcgcacctcgtccgggatcgtcagcttcatcgatcggctagctcttttcctcgctgtggagacgaccggtacgtgaccgcagggggaggagctgagttgatgggcagcgagccaggtgcccatgtgtgtgtcgtttggttggtttgtttggagagactggagtgggctgacgaggcgagtgttgcgttgcgtgttttggagaaatgtcgcaaaggaaaccggaaatgaaaactcttgcaattttcattgatggt

SEQ ID NO: 93656 - DNA, 1175 bp, Zea Mays
atggccacgacacagagctgtcagagcaggagcagcgcctgcagcaaggctgctgcttgcttcccggccgccggaggagcgcaggaggaggctgagaacgacaataataagccggagctccggcgtggcccctggacggtagacgaggacctcaccctcgtcaactacatcgccgacaacggcgagggtcgctggaacaacctcgcccgcgccgccgggctgaagcggacgggcaagagctgccggctgcggtggctcaactacctccggcccgacgtgaagcgtggcaacttcagcgccgacgagcagctgctcatcctcgacctccacacccgctggggcaaccgatggtcgaagatagcgcagcacctgccgggaaggacggacaacgagatcaagaactactggaggacccgggtgcagaagcacgccaagcagctcaactgcgacgccaacagcaagcgcttcaaggacgccatgcgctacctctggatgccgcacctcgccgacgacgtcgataccatcgctgcggccaacgacgacgacgaagaccaccaccaccacctacgcctcctcgtcctgcaccaccaccaggcccagcacctgcagcaagctgctgccgcggccggcggcgctgccaacgaccttgctgcgggcgcctacgacgtccgccagctgcacgcgctgccgtcgtcgggcatggcggcgacgtcgtcgtccgactcgctcgcgtcggagtcgtacgatgacggaggcctgcttttcgcgaacttgcgcgccggcgagatgctgatggacggcggagattgggcggcgcagcaggaggccgaccaagggctgtggccgccgccgccgccgccgccgtctgatcttgatcagtcggtggtgcaggctgctggtgccggcgctggccagtttcaggacatggagctcagtggttgggtgcaaggcttctccgagagcattacagataacttttgggccttggaggaaatttggaagatgcaatgagcgagcaattttacatcttacacatccatccaaattaaagacaacatagatacacatatacatatcatatattctaacaacaggtgccatatacgatatacatacacaagttgttgtatagttgtattccgcttatatatatattttttttgcctctcaatgaa

SEQ ID NO: 93657 - DNA, 1315 bp, Zea Mays
cttctctagatcttctcatcataccgataccggcctcaacgccctctttttcccagcctcacaaccaattcctgtttcagtcgatcgcagttagcatggccacgacacagagctgtcagagcaggagcagcgcctgcagcaaggctgctgcttgcttcccggccgccgtagcggtcgacgaggagcacggccaccacagccaccagctgaagggaggagcgcaggaggaggctgagaacgacaataataagccggagctccggcgtggcccctggacggtagacgaggacctcaccctcgtcaactacatcgccgacaacggcgagggtcgctggaacaacctcgcccgcgccgccgggctgaagcggacgggcaagagctgccggctgcggtggctcaactacctccggcccgacgtgaagcgtggcaacttcagcgccgacgagcagctgctcatcctcgacctccacacccgctggggcaaccgatggtcgaagatagcgcagcacctgccgggaaggacggacaacgagatcaagaactactggaggacccgggtgcagaagcacgccaagcagctcaactgcgacgccaacagcaagcgcttcaaggacgccatgcgctacctctggatgccgcacctcgccgacgacgtcgataccatcgctgcggccaacgacgacgacgaagaccaccaccaccacctacgcctcctcgtcctgcaccaccaccaggcccagcacctgcagcaagctgctgccgcggccggcggcgctgccaacgaccttgctgcgggcgcctacgacgtccgccagctgcacgcgctgccgtcgtcgggcatggcggcgacgtcgtcgtccgactcgctcgcgtcggagtcgtacgatgacggaggcctgcttttcgcgaacttgcgcgccggcgagatgctgatggacggcggagattgggcggcgcagcaggaggccgaccaagggctgtggccgccgccgccgccgccgccgtctgatcttgatcagtcggtggtgcaggctgctggtgccggcgctggccagtttcaggacatggagctcagtggttgggtgcaaggcttctccgagagcattacagataacttttgggccttggaggaaatttggaagatgcaatgagcgagcaattttacatcttacacatccatccaaattaaagacaacatagatacacatatacatatcatatattctaacaacaggtgccatatacgatatacatacacaagttgttgtatagttgtattccgcttatatatatattttttttgcctctcaatgaa

SEQ ID NO: 93658 - DNA, 2928 bp, Zea Mays
ccaaaaaacaaaacaaagcgcctaaggtcccaagagtagagttggatctcgccttctccctgtcgtacccaacggcgttttcccctacattgtcctatcatgcttgccggaggattcgagctaccgcggcggcagcggtgacgtatcggtatcggcggcagcgatggcggcggcggagtgggacagccggagcgtggcgagccccaccggggattggccaccggcggccgccgcgtccccgataaaggggaaggcggcactgccggagtcggatggaggtgcctcggcgtccggctcatcggaggccaaggtcgacgatggcaacatccaggaggcggagtcgtcgctccgcgagggtctctccctcaactacgaggaagctagagctctccttgggagactggaatatcagagaggcaatgtggaagctgctctgcgagtatttgatggaattgaccttcaagctgctattcagcgcttccaaccttctctttctgataaaccactctcgaagcgaagtaacaaattacgggcagattcatcaaattcaggatcacagcatgctgctagccttgttcttgaagccatttacttgaaatcaatgtctcttcaaaagttgggcaaggcaatggaggctgctaaacagtgtaaaagtgtccttgatgctgttgaaagtatcttccaatgtggcatacctggtgttatggttgaacaaaaactgcaggaaactgtcagtaaatctgttgagcttctcccagaactttggaagcaagctggggcctatcaagaagcacttgcttcataccgccgtgctcttctaagtcaatggaatcttgatgatgaatgctgcacaaggattcagaagaggtttgctgttttcttgttgtacggtggtgtagaggcggcccctccaagcttggcttcacaaactgaaggttcatttgttcctaggaataacttagaagaggcaatcctactgctcatgatactattgaagaagtggttccttgggaagacacactgggatccatctgttatggagcatttaacctttgcattgtcactgtgtggccagacatctattattgccaagcacctcgaagaggttttacctggaatataccctcgaaccgagagatggtatagtctagcgttgtgctattttgcagtttctcataatgaagctgcattaaacttgttgaggaaatctttgaataagaatgagagtccaaatgacataatggccctcctgttagctgctaagatatgtagttccaataatcttctttcttctgagggtgtagagtatgcaaagagagcagtcagagatgccgaatcatcagatgggcatttaaagagtgtggccctccatgttctggggagttgcctgtccaggaagtctaaggttgcttcatctgatcaccaaaggtctgtcttgcaggctgaggctttgaagtcactcaatgaggcaatttctcttgaccgtcacaacccagaattattatttgaattggggatagagtatgctgagcagcggaatatgcatgctgccttgaaatgtgcaaaggagttcattgatgtcactggtggatctgtctctaaaggctggaggttgctattgttggttctttctgcacaacaaaggtattcagaagctgaagttgtaactgatgctgcattagatgagaccgcgaagtgggaacaagggccattgcttagaataagggctaaactgaaggttgctcaagcattgcctatggaagcagttgaagcatatcgcacccttcttgctcttgttcaggcacaacggaaggcttatggatctgtcaaaaatggcacagaggataatgaggataaagtgagggaagttgaagtttggcatggtcttgccaacctgtactctagtctttcctattggagagatgcagaaatttgcttacagaaggctaaagccctcaaaacatactctgcgacaacccttcatgtagaaggaaacaaacacgaactgcatgagaagatacaggacgcggtagctgcatacttcaatgccatctctatggaggttgagcacgtcccatccaaggtctctatcggtgctctcctctctaaacaagggcccaagttcctaccagtggcgaggtgtttcctctccgatgccctgaggcttgaacccacgaaccgcatggcctggttctaccttggggaggttcacaagcaggacggcaggctagctgatgccgccgactgcttccaggcggcctcaatgctcgaggactcggatcctgtagaaagtttcagatcactctgatgggtcatctgcaacagcgtgaggttccctttttttgtcggccggttttctcttcgtcttcccccattttcgaggcacagctgggcagagaccaggtgcccagctatctgtaacttgttgtatctacagttgtcagtgtgtaccaacagatgctgtaattggttgttgagtggcctacatgattcttcaaccgatagctccatcaggatcagagtggcactggaacagctatgcaatcatatgagccattattattacgtgtattacacagtatgaatatatgattataatgagtcatcagctaacttaaaactaccgttgctgatattgtaatgttttgtaatttttattcctgttttgtttatcaattaccagacgtgctgaacagtgagcacaccacgggtaaatgaaatggatgttatacaccgccagaaagagttctttcttcactaattaaggaaatgtctggcttctagggctaatttttaatctctacattttattacattttagtcaataagggctagtttggaaactacattttcttaaggaatttctatttttctaaagtaaaatcaactggtttttcttaaaaaatggaaaccccttatgaaaataga

SEQ ID NO: 93659 - DNA, 883 bp, Zea Mays
ctcccacaatctccagccgccactacgcctccctctagctccagccgccactacgccggtcgcagagtcgccagctgcctagacgcccggaggcccgcgggcgctccctcctgggctgctggcctccttcacattattggagccagaggagcgggcggcggcttgcactccatcccatcgcttggctagcgcgccggagccacagctggagcgctcgccggcgacgagtcgccgccccgcaaggagcctacgcaggcacgcaccgccacgtctaggcgccaggcggagacgttattaccacaacattaaaggagatgccttcactccagaaagcattgcctccagaacttgctgataatgtgctcaggttatatcgtgaatgcttacggagggcgaagtatattggccatcagaaacacaatacagaacttttagtcgccatggtgagacaacaattcaagaaaaacatgcatgaaactgatccagagaagatacagaaaatgaaggacgatgctgcaaggggccttatcaatcatattctatatgagtccgagaagattacaggacgcaagttttcaggttaaaaacagaagttgaaactggacttacagtgtgtcgtgctgtatgaataatagtaaaaataatttactttcttgcctttgaatgattccggttctattgtacaaggacctgcaaatgttttttccttcggattgctgagtactcgagctattgcagcaatgattttcagtaaccaagagtttggctgtctttttcttttgtgcatctgtccaataaatgctgactacaaatcattttggataccgtataaatgtaatcctactcatagccaggagacagaaatattcggtgcctttgaact

SEQ ID NO: 93660 - DNA, 1952 bp, Zea Mays
atgcctccgccctcgccctcccgccaatctcgtagcagcgcccgccccatccccgcagccgtcaccagcgcgtacatagaagctgaacaccggcaacgtgttcgcggcgctcgagtccctcaagaagaagaagaagggcggcaaaggcaaggcagccgggaggaggacggcgagggggccgcgcagcggcaagagccaccgcagaagaagcagttctgggctcccgcaccacttaccaccaagtcatgggcggacgtcgaggacgacaacgactacttcgccaccaccgcgtcgccacgcctcgtctggggcactgccggtgagcccgccaaggaagaggacgacatcgatgatgttgtgcgcgccgcccttcaggaggtagcaaccttgggcaacaaagttgagaaagagatggaggacatggccttcttctttgctgaattggcgctgatgcaatacggatacggcttggtgacacgtctgccttctctggttgctgcttctgctgtctacgcggtcaggctcactgtcaagagagctccctctggaccgacgccctcaagcaccacactgttgtgtaccaggtgctcggaggagcgacccgcgaagggcagcggcagctggtcttcacctgttggttcagtgccggctggagggcaaccaagagcagacaatggatccactacaattgaaattgctctgaagattgcatttcgtaaattttctcttgatcatggaattatggccagtagtgaaaatagtacaagaaatgaaagaaacattaagttgaaggtacttgttctaaatggttcctatcatggtgatactctgggtgttatggaagctcaagctccatcgtcttatacatctttttcttcagtagccatggtccacgttcagaggcggatctgcgcggcccagttactacagcgaataggcggcccatcaggtcacgttccgtcccgacgtagagtcgccagtcctcccacaatctccagccgccactacgcctccctctagctccagccgccactacgccggtcgcagagtcgccagctgcctagacgcccggaggcccgcgggcgctccctcctgggctgctggcctccttcacattattggagccagaggagcgggcggcggcttgcactccatcccatcgcttgggtgcgtcgccccgaatccaatcgcctggtcaagtctgttgctgccggaggtagacggacgccttatcgtgctcgtggccgcagctagcgcgccggagccacagctggagcgctcgccggcgacgagtcgccgccccgcaaggagcctacgcaggcacgcaccgccacgtctaggcgccaggcggagacggtagttattaccacaacattaaaggagatgccttcactccagaaagcattgcctccagaacttgctgataatgtgctcaggttatatcgtgaatgcttacggagggcgaagtatattggccatcagaaacacaatacagaacttttagtcgccatggtgagacaacaattcaagaaaaacatgcatgaaactgatccagagaagatacagaaaatgaaggacgatgctgcaaggggccttatcaatcatattctatatgagtccgagaagattacaggacgcaagttttcaggttaaaaacagaagttgaaactggacttacagtgtgtcgtgctgtatgaataatagtaaaaataatttactttcttgcctttgaatgattccggttctattgtacaaggacctgcaaatgttttttccttcggattgctgagtactcgagctattgcagcaatgattttcagtaaccaagagtttggctgtctttttcttttgtgcatctgtccaataaatgctgactacaaatcattttggataccgtataaatgtaatcctactcatagccaggagacagaaatattcggtgcctttgaact

SEQ ID NO: 93661 - DNA, 1948 bp, Zea Mays
atgcctccgccctcgccctcccgccaatctcgtagcagcgcccgccccatccccgcagccgtcaccagcgcgtacatagaagctgaacaccggcaacgtgttcgcggcgctcgagtccctcaagaagaagaagaagggcggcaaaggcaaggcagccgggaggaggacggcgagggggccgcgcagcggcaagagccaccgcagaagaagcagttctgggctcccgcaccacttaccaccaagtcatgggcggacgtcgaggacgacaacgactacttcgccaccaccgcgtcgccacgcctcgtctggggcactgccggtgagcccgccaaggaagaggacgacatcgatgatgttgtgcgcgccgcccttcaggaggtagcaaccttgggcaacaaagttgagaaagagatggaggacatggccttcttctttgctgaattggcgctgatgcaatacggatacggcttggtgacacgtctgccttctctggttgctgcttctgctgtctacgcggtcaggctcactgtcaagagagctccctctggaccgacgccctcaagcaccacactgttgtgtaccaggtgctcggaggagcgacccgcgaagggcagcggcagctggtcttcacctgttggttcagtgccggctggagggcaaccaagagcagacaatggatccactacaattgaaattgctctgaagattgcatttcgtaaattttctcttgatcatggaattatggccagtagtgaaaatagtacaagaaatgaaagaaacattaagttgaaggtacttgttctaaatggttcctatcatggtgatactctgggtgttatggaagctcaagctccatcgtcttatacatctttttcttcagtagccatggtccacgttcagaggcggatctgcgcggcccagttactacagcgaataggcggcccatcaggtcacgttccgtcccgacgtagagtcgccagtcctcccacaatctccagccgccactacgcctccctctagctccagccgccactacgccggtcgcagagtcgccagctgcctagacgcccggaggcccgcgggcgctccctcctgggctgctggcctccttcacattattggagccagaggagcgggcggcggcttgcactccatcccatcgcttgggtgcgtcgccccgaatccaatcgcctggtcaagtctgttgctgccggaggtagacggacgccttatcgtgctcgtggccgcagctagcgcgccggagccacagctggagcgctcgccggcgacgagtcgccgccccgcaaggagcctacgcaggcacgcaccgccacgtctaggcgccaggcggagacgttattaccacaacattaaaggagatgccttcactccagaaagcattgcctccagaacttgctgataatgtgctcaggttatatcgtgaatgcttacggagggcgaagtatattggccatcagaaacacaatacagaacttttagtcgccatggtgagacaacaattcaagaaaaacatgcatgaaactgatccagagaagatacagaaaatgaaggacgatgctgcaaggggccttatcaatcatattctatatgagtccgagaagattacaggacgcaagttttcaggttaaaaacagaagttgaaactggacttacagtgtgtcgtgctgtatgaataatagtaaaaataatttactttcttgcctttgaatgattccggttctattgtacaaggacctgcaaatgttttttccttcggattgctgagtactcgagctattgcagcaatgattttcagtaaccaagagtttggctgtctttttcttttgtgcatctgtccaataaatgctgactacaaatcattttggataccgtataaatgtaatcctactcatagccaggagacagaaatattcggtgcctttgaact

SEQ ID NO: 93662 - DNA, 1809 bp, Zea Mays
atgcctccgccctcgccctcccgccaatctcgtagcagcgcccgccccatccccgcagccgtcaccagcgcgtacatagaagctgaacaccggcaacgtgttcgcggcgctcgagtccctcaagaagaagaagaagggcggcaaaggcaaggcagccgggaggaggacggcgagggggccgcgcagcggcaagagccaccgcagaagaagcagttctgggctcccgcaccacttaccaccaagtcatgggcggacgtcgaggacgacaacgactacttcgccaccaccgcgtcgccacgcctcgtctggggcactgccggtgagcccgccaaggaagaggacgacatcgatgatgttgtgcgcgccgcccttcaggaggtagcaaccttgggcaacaaagttgagaaagagatggaggacatggccttcttctttgctgaattggcgctgatgcaatacggatacggcttggtgacacgtctgccttctctggttgctgcttctgctgtctacgcggtcaggctcactgtcaagagagctccctctggaccgacgccctcaagcaccacactgttgtgtaccaggtgctcggaggagcgacccgcgaagggcagcggcagctggtcttcacctgttggttcagtgccggctggagggcaaccaagagcagacaatggatccactacaattgaaattgctctgaagattgcatttcgtaaattttctcttgatcatggaattatggccagtagtgaaaatagtacaagaaatgaaagaaacattaagttgaaggtacttgttctaaatggttcctatcatggtgatactctgggtgttatggaagctcaagctccatcgtcttatacatctttttcttcagtagccatggtccacgttcagaggcggatctgcgcggcccagttactacagcgaataggcggcccatcaggtcacgttccgtcccgacgtagagtcgccagtcctcccacaatctccagccgccactacgcctccctctagctccagccgccactacgccggtcgcagagtcgccagctgcctagacgcccggaggcccgcgggcgctccctcctgggctgctggcctccttcacattattggagccagaggagcgggcggcggcttgcactccatcccatcgcttgggtgcgtcgccccgaatccaatcgcctggtcaagtctgttgctgccggaggtagacggacgccttatcgtgctcgtggccgcagctagcgcgccggagccacagctggagcgctcgccggcgacgagtcgccgccccgcaaggagcctacgcaggcacgcaccgccacgtctaggcgccaggcggagacgttattaccacaacattaaaggagatgccttcactccagaaagcattgcctccagaacttgctgataatgtgctcagggtaacgtttcttttgcaccttttgctttttgctgtggtctccttgtattatgggtcacggccaactttcaaatcaacttgtactgttgtactgttaatgaatagtcagtcatcaggcttcattcatttgcatcagttaccctaaattctagcttcagcttttccagaagacacatctaatatgcaccctgtagcctagttttttgttacttttattaaaaattgtcatgaatgaaacaaaacaaaatcatagtcgatgctggagaaaaaacattttttttccatttattgttctctcctttttcatgatgtagttatatcgtgaatgcttacggagggcgaagtatattggccatcaggtatgcatatttttatct

SEQ ID NO: 93663 - DNA, 505 bp, Zea Mays
gttctcattagcatcacaggctaacatttaaaccaagttctcaaacacaacaactctgttagtacacgttccaacattgcatcccaacaaaggcaaattcccacaatcacagggtccaggtgcccttgggacaaagactattatcattacaggatcctaatgctcaccaccagtagagtttagtcgtagaaggacacctgccgcgcatccaaacctgctaaccttaaaacattagccatcgaagggacagagatttgagaatgctccctgtacaggcctcaaagacacatttacctatctgttgtgaaacaccaccacaagcgcgagttcctgaagctcagtggatgtggcagccgcggaagattattcattttggtgagaattagtggtaggcgtagaagcagggtttcgctggacaaagcggcctgctgggcgtagccccctgttgtgtccacgctgcctgaacgcttgtccagaagcaggaggcccctcggttcgttcttcc

SEQ ID NO: 93664 - DNA, 1489 bp, Zea Mays
atgaccaaaatttccctcctgcctaatcctctcggctactcacctccgcgtccgcccccaccaccacgcgcccgcccccagaacccccacaaacccaagccgccgccagcaaggaatggccgccctcctgcggctcgccgcagcccgatccgccctcccccgacgcaccctcgccccacaccggaggctctgcacatgcaagttcatgaccaaccgtcttctctcccgcaagcagttcgtgctcgaggtcatccaccccggccgccccaacgtctccaaggtcgtgggtctcgtcctctcctagtttctcggttccctgccctccgtgatggccgtcgcggtcttgacgatatttcattgttcgcgcatgcggagctcaaagagaggctggcgaagatctacgaggtgaaggaccccgactgcatctttgtcttcaagttccgaaccaacttcggaggtggcatactatgccacggccggaggaggaaccgctgtcggcctactccacctccacggctccacctgtctgctctctgtctgccccgcgtcctcctccgcagcacaacgaccgcatcgcgttctacgttctccaccctccccgctccccctactctgcttggtttcccagaagatttgattggtttccccaaatctagtgactccattcctgttgttcttcacgtccctgggaacctcccaatccaggagctgcctgccatggtgaaggacagcgcctactacgacgtcctaggggtcagtgtcgacgcgtcctccgccgagatcaagaaggtgtattacatcaaggcgaagttggtgcatccggacaagaatcccgggaaccctgacgctgcactcaagttccaggaacttggagaggcctatcaagttcttagtgatcctgggaaaaaggaggcttatgataagtatggaaaggagggtattccccagttcgacgaagctaaagctgaacttgaggaaattgtttactacctacgagatcctaaggccgcacttgaagaaatcttatatcagtttgaggaaaaactccaagctgaaagagaggaagctgctaggaagcaggaagagttgcaagcacaactacaagctctacaggccgcacttgaagaaaaccaaagtttgctgcgccaggcccaagaggaagtgaaggggatgcataccaagtttgaagagaccaatgcactgctacgagctgtcctgaaactttagaaagattgaggtagggatgcataccaagtctgaggatgatgcctttgcttaaggtttttctaccttgctagaacatatctgtggttagaactttgtcagaactacgtgcaatctgtttgaatgcttcaaacctttgtggtggaacctttgtatgtttgaacctctattgtggaagaactagtgtgctggaattgtgtatgacttgtgatgagaatgttgtgtatgatggcttttctgtgtattatgattctgtgagctatca

SEQ ID NO: 93665 - DNA, 1513 bp, Zea Mays
tggaattacatattaacagttccttcagttcccagatttaactgtttgccgagttgcggcgaaagtctgaggacaagctccaactcatgagaatagctacaagatagtcaggccagtcatggttaggacttattaggaccataaacatacactgctacctcagctccaaaatgcctactactgcataaactgtggtggactgtgatcaacaactgtaccctagcctgtccattaggattgtcacaacaatagtcatcagccctatggatgattacaagctgccatcacacgatgaagaggtatatgagatcttccaccgtcaacttcgtagcagtgcctcttggaaccctcctcgccgaacgcagattccaccatctctctctttttctcctccccggaggaacattcagtaaaattgttactccaataacaacccaacaattgttaaatcttctatgcgacctaatgaagagtgttctctacgtacaaaaatacctatcatgaccacactggaaatgcaacaaataaggatgctactctctgcctcttcttcctacacctctctatcttttcccccagatttgttctaaccagagaagaaacatatggtttcctaagccggtgctgaatgcagcacctaccggcttggatgctcaaacagttacaggttcagtgcttactgcttctagatttcaagtctgttgttggtgctacagaccggatgcagcctacatatctactgctgcagaacaggaccacacaatctcagaacaacatagcctagcagaccagacatccatcagtctccatctccatcattcagagcaccccttccactgacacaacagaatgaacagggagcaaagactagctaacaacatcttcttactttaacttgacacgaccacaaaaacaaaacaattcaaacaccttgactctccaagtgagaaacttgagctcctccataacttgaaaaagtgaaaaaaattcagcaccccagtaaacaaaatcgcccagggccgctaagctagtcctcaattgacttgtttttcagtctttcatgtcatattagtgatgcaagtgaaaaagccgcagactgggggcaagatctgtgctcttcaaatcaataccggtcggttactagcgtgctggctgactgacgcgacctgaggcgctaggagccaagctatgaatcgatcgaacaaaatcagatgaacacaactgttggcgttctctagctagctacgaatcgatcggagctactcctcctagacttctctccccctctgaccaacacacaaaattagacgaacccaggcaagtaccgaacatgaatatcatagaagaggaaaaggggtggggagcaagcgacattaccaacagcagatctcgcgtcctccaccctgcattaagccgaagtgtcgggcgactaagagaggactagggtggaggtggcggcatagtggtcggggaggaggcgagtcagaggaaggaagcagtgcaacgctcggtg

SEQ ID NO: 93666 - DNA, 2281 bp, Zea Mays
tagtattccaaaacctgattttaaaatactttacttccaaacatgccgtcgaccaaatcagattcgaagacagcacaaaaatataataaccgaaactgcaagagtgaactcaaaaaaatctcatctcatttctccatccattcatcatcatgattataatacattgacgacagagaaaaccaagagaacggaaaatggaaacataacggactccaaaatcagtctctagcccgtctagtccaaaagtatggtatatgccccagtgcccgtatgcctgtatccttcaccactgcttactaaccatatcactccatcagaaacacatgctgtaagataccgacgactatgtcccactaaacctgcacctaaagaacaaaaatgatctcacaccaccatgatcaccgatatatctacacgccatctccagttaacacaacactaccaacatctccgactggcaaaacatcatgcagcttggatccaagggacacactatgttggtgtcagattcagctcgatgccacgctgcctcgcactctccaggatgctctcagtgttgctcccactggctttgcagtaattcagatgggcgtgccacagcttgaaggagaagggatagaccgatgccgcctgctgatagaacctcttcaaaatctctgtggcatgcagtttctccaggaggcctgcaccttctagccatactgattccggtgcgacaggtacagctcgaaagatggcattgatcagaacagagcttgcccagaacctggtcccagtggaggctgcgccataacctgtgaagtgcttagctacgaatccaccaacagccaagcccaggcgatagtttgcaggaagagcctccatgactgtttcaacaaaatcaaccaggtacttcacatcgctaatgctttttggaaggagggatgggccaaagcacacttcaaggacagagtttatcagagaagaatctgcaggaacagaaccaatagtatcatctataagctgcctaagcctatgcttcttaatattctggcaaaaccttcgtgacagcagctccctcgtgggcaagttgcaatgatcagcaaggtagccaatgattaaactgaatgtagcccgagtttgagcatctgtcgaagatgatgatttctccagctccagtgcatgaattgcagcatgttctcttatacagtgctcgtaccactccccatgagccaatttcaatgctttactcgcagccatttgtgcttcctgtaggttgttctccagtatcttatacagtgagaggtttagtaaccgaaagacgagatcttctgatatagatggaccagaaccaactgcctgaggtgaaacaagtgatgatgttccaggttcttcactgctcagttctatacaaatagcagcattgctttggatatcacagtcctttccatgttcttcaaaccagcaagtcagtaccttctcagctaactcggcatcagtggccagagcatgttcaacatattgattccacatatattgaattccttgtgcctctttaggccaattcaagatcaactcatcaaagcttttcagacctggacatgtaccatgctttctgtctaaccgagctgagatcagaagaatctgaggacacattgggtactccttcatgtaggtcaccagcatatcaacagaagattttaagcctccaatggccgctagacaactaatgtggttaacagcgaggaattgtgataacatcaggtaagatggatccccgtttttaacacactcactaatatcttcagccatcttacaagcagcaaaatttagaagatctgtaatcttatctctgttgtctacactgggatcaatagaaggccatattaaagcacgaggtaaagctttctgaaactccagctgatcaataatttcctctggaaggttcctgtaaattaagacatataggcacgaaatccaaaatatgcatctgtcggacatggtcaagcaagaaatgacatcagcaagcaacttgtcaccagaattatcaggcattgcagttggaagaattccaataatcctagaaactgccttgtctatatttccagacatgcacaggaagtaaatcatctgtaagaaaatgtctagtatgaaagcacttctttcttgtagatccttgtcagtctcagctgtcatttggcagagcatgctcaaagcatcgttataagcatccaatcgatcatcaacgcgtaacctactatttatatacataagccataattcataagaataaacattgtgt

SEQ ID NO: 93667 - DNA, 109 bp, Zea Mays
cttttagggagtcaggctatcgttgcagtataagcttcttcatgggggagcattcctacggaaaaaggccacggaaaatggtctcgaggagccgagagggcgaaccatc

SEQ ID NO: 93668 - DNA, 964 bp, Zea Mays
caccgcaacaccgccagcaatccttacttccattgatagacgatcgagtcgtgtgcgcaacaaccgagctagctaggatggcaggatgctgggcagtgttgctgccatcggcgctgctcgtgtggatcgtttgctgcaactgggtgctgatcatgagtgtggacgccgggtcaccgtacggcgcaaacatgactgatctgatgcgccatgtgcagttcttcgacgaggacagagacggtcttcttactattccggagagtactaaaggttttattgcgatcggattgacccctgccttcgcactttctttggccacagcgacccatgctgctttcggccctttgacaacccctcctggaaagttaccgagcataaatatctacgtgtcccacatccacggagcagttcatccaagtgactcgggagccattgataagaagggaaactttgtccccaaaaagtttgaaagaatattccagaagttttcacacagtgaggaggacgccttgtcatggttggagatagaggcgatgctcgtcgcaaacagggactttcttagacctctatcatggcccgaggctgagacggagtggcagctgatccacatgctaggcaaggacaggcacgggtacctccacaaggacaccctcagaggcgtctacgacggcaccgtcttccccaagatgcgcgaccacaccatcgaccctcatgcccgtcacagcgatgcctgatgatccgatgagctcagctccatggatgataacatgggttctcgtctactgccggtgcaataataaaacagtgtactgtacatcgtcgtatgtaatgtacagaacgctatatacaccacgtttatccactgccagtgttttgtcgagtgtcgcaggcactcgttaatggctcgataacactcgacaaatgctttactgagtgtgcttggtaaataggactcggtgaattatac

SEQ ID NO: 93669 - DNA, 210 bp, Zea Mays
atggcgctcggcctcgaggcgcgcagcctccaggcacgtagcttcttggcgggcagcctcgcggcattcttcagcagtgaaagcagcaacacgctgctccaaagcatgacgggcagcagcggcagcatcatcgtcggccatcgcgtcgaggtggcgtggcagcgtgggttaaagaatgcggaagctatggttcggaaagaacccgattga

SEQ ID NO: 93670 - DNA, 567 bp, Zea Mays
atgacagtcttggcagtgaagccaactgatgaggaaccatttgccccaaacaatccgaaaggttttgttgggaaggctctggggcagccaggcctgaaaagatctgtacgagttggtgagacaggcttcagggaggttgctgcgtaccttctcgactatgatcactttgcaaatgttcctcccaccatgctggtcaagataacacacaccatcttcaacgtgaatgactgtgttggctgcaaaagcaaagtattctgcaacaaatcagagtctgtgagcaagattgcatcactgcaggagttcattcctcatgattttgatgccagtgaccatgggacctcaagcttccctgtatctgcggtgcataggatcggaatacttgacattaggatcttcaacactgataggcatgctggaaatcttctggtcaagaaggttggtcctggggctgacaatttcggagagcagacagtgaatggtcttctaatgttttctactgaacatttgatcatgaaaattctcattgttcaaaaaagaggcttgcaacactggctgcacatgtactga

SEQ ID NO: 93671 - DNA, 2092 bp, Zea Mays
atgatttcagattctggttgccgtctaatgatccaaaatacctgttgtttaccttggataatgcgaggatactatccacttggaaagttttgggagatcccgaggccacgtggtggaccgtcctttttttctaaaaaaaatccacccgcaaacggcaagaaacatacaagaacacacggacaaaaaaacgcaggaaatcatcattcatcagccagcggccgcgcttactgacaagccagcgagcgactgcccagtggggcccgggcccgggctcgggctcggccgcatgcctcgtctcgtatcctctgctgccgctctcccgcgccggccaccggacctcccctccaggcctcccaactataagagcttctagaaccttctccctcggttcactgcacactcaactctcgcgccccacggcacgcccctcgctggccgcagccatgaacgcccaccgcgacgaggaggccgtctcgccgctcatcgcagcgcccggcggtcggagccacgccgccgacgcgcacgtcctctcggcagccttcctcttcgtcttctccgcctacagcgccgcccagaacctccagacctccgtcaacaccgaggacgacctgggcaccgtctcgatggggactgtgtacacctccttcacgctcttctccgtggcctcgtcgcccgtggtcacgcgtataggccccaagcgcgcgctcgtcgtcggcaccagcggatacgtgctcttcatcctcgccaacctcgtcccgtcatggtacacaatggtcccagcttcactctaccttggttttactgcatcgatcatttgggttgggcagggtacataccttacatcagctgccctcagtcacgcaagagaaaataatttgcccgagggtccaactttagggagcttcaatggggagttttggggaatgtttgctagcacacaggtgattggaaatttgatctcgcttgctctgctgagaaatggaaaggatggtggaagtatcacagggaaaaatcttctgtttgctgtgtttcttggttgtatgattgtgggcattgtattaatgtgtttactttcgaaaagagatgagaaaaaagataatactccaacgcattcctcatttggagctatgttgaagtacatcattgcgccacttaaggacaaaagaatgcttctcaccattcctcttatagcatattcaggtttacaacaggcatttgtatgggcggtattcacaaagagtattgtaacacccgttcttggcatcagcggcgttggtggagccatggcaatttatggtgcagcagatgtagtttgttctttggttgctggacgattgacctccggacttcgctcagcagcatttatagtgtcggttggagctattcttcaggccatagtcctgttctggctgcttcttttttacagtccaatggatggactgcttggcgcagcgataccattattcataggtgccttgtggggtgttggtgacggtgtcttgaatacacagttaagtgcattacttgggcttctgttcgaagatgtcaaggaggctgcctttgcacagctgaaggtgtggcagtcgggcgccatcgcagtcatcttcttcctgagcccaagcatcacgctgcaagccatgcttctcctgatggccgcggctctcgtcatctcctttggctcattcctgttccttacccttgttgttgagaagtcatcgcccgtcagagcctgaagtgcgaaaccatttcccgatgtccagaccggcgccagcgtgacttggtcagtgttaccagtggcctgggcagcgccatcgttgtatcccaatttcaccggaaacgcagcatccgtcgagtgcgatttgtggcacagtggtaccatttcaggcagccagtatctgaaccgaagctgtagcagctagcagttcgtgcaacggggaaaccgtcaatttgggcacgcttcttgctttgccagtagtggtcctttctccttttgcaatgtctgcactgcagcaatgttgttggaaaaaaaggatgttgtaagaaatgttgtttcatttgtaccacgtcctatcagagtggtcttttttttttt

SEQ ID NO: 93672 - DNA, 1817 bp, Zea Mays
atcacgaagaagaacacgagagcagaacctcgactttgggctgggcagacggcataccgcagagcgcagagagcacgccacccacctcgtcccctcaatttcgcctgttcgccccaacgcctctccatggcgggcgccgacgcagggctcgcgtcggccgccggcgacgtcgaggaggccgcgcccctggtcgccggccccggctcccgccgcgcgcccgcctcggtgatgggggcgtcccgcgacgtgcacctgctgagctccgcctttctcttcgtcttcctcgcctaccatgcggcgcagaacctccaaagcactgtcaacacggacgagaacctgggctccatctcgctgggcgtgctctacacgtccttcacggcgttctcggcggcgggctccgcggtggtgcggtggatgggatccaggcgcgcgctcgtggccggcacctccggctacctcctctttatcgcagcgaacctcctaccgtcctggtacacaatggtcccagcttcactctaccttggttttactgcatcgatcatttgggttgggcagggtacataccttacatcagctgccctcagtcacgcaagagaaaataatttgcccgagggtccaactttagggagcttcaatggggagttttggggaatgtttgctagcacacaggtgattggaaatttgatctcgcttgctctgctgagaaatggaaaggatggtggaagtatcacagggaaaaatcttctgtttgctgtgtttcttggttgtatgattgtgggcattgtattaatgtgtttactttcgaaaagagatgagaaaaaagataatactccaacgcattcctcatttggagctatgttgaagtacatcattgcgccacttaaggacaaaagaatgcttctcaccattcctcttatagcatattcaggtttacaacaggcatttgtatgggcggtattcacaaagagtattgtaacacccgttcttggcatcagcggcgttggtggagccatggcaatttatggtgcagcagatgtagtttgttctttggttgctggacgattgacctccggacttcgctcagcagcatttatagtgtcggttggagctattcttcaggccatagtcctgttctggctgcttcttttttacagtccaatggatggactgcttggcgcagcgataccattattcataggtgccttgtggggtgttggtgacggtgtcttgaatacacagttaagtgcattacttgggcttctgttcgaagatgtcaaggaggctgcctttgcacagctgaaggtgtggcagtcgggcgccatcgcagtcatcttcttcctgagcccaagcatcacgctgcaagccatgcttctcctgatggccgcggctctcgtcatctcctttggctcattcctgttccttacccttgttgttgagaagtcatcgcccgtcagagcctgaagtgcgaaaccatttcccgatgtccagaccggcgccagcgtgacttggtcagtgttaccagtggcctgggcagcgccatcgttgtatcccaatttcaccggaaacgcagcatccgtcgagtgcgatttgtggcacagtggtaccatttcaggcagccagtatctgaaccgaagctgtagcagctagcagttcgtgcaacggggaaaccgtcaatttgggcacgcttcttgctttgccagtagtggtcctttctccttttgcaatgtctgcactgcagcaatgttgttggaaaaaaaggatgttgtaagaaatgttgtttcatttgtaccacgtcctatcagagtggtctttttttt

SEQ ID NO: 93673 - DNA, 103 bp, Zea Mays
aacttgttctgcgtttcttattcccatgttctgtcattcccattcccctctccccgcaaagtccattcccattcccccgtacagtccacgtctagctaaaatt

SEQ ID NO: 93674 - DNA, 641 bp, Zea Mays
aggaatatctgtaattggaaagttacttatctactttgttttgcttagcatttaaatggaccaaataatttagacataatccccattttaaaaattgtattgcttgattaccatatttatgtttgcttagcatttcaagactaacatcctgatgcaattttcagttcagttgattactgctaatttgttattattgtcatgaatatgcaccttgaggatgataaacgaaaggtgcgcccaacaaagcactcttgtggatgcacgacaatctaaatctaaatctaccaaggctgcttggaagatcttgccatcagctccaccatccctcacttcccttccactgctgtcatgtagtctttagcaatcatgccctatgagtgatcctgctgatcatccagtaaaaaaagttaaaatgtcattcccttggactcagcttgcctggttcctgcccatgtgtgtgttttgtaccagcggtcatgtacaaggactatcattttaactattggtgtagtcataatcacttcgattggtttgtttccttacaacatttattcataccaaattcctcaaaaataatgctatcccaaagactctcgtttcttgaaccattctgcagtttttgtctcactacttgtatctac

SEQ ID NO: 93675 - DNA, 102 bp, Zea Mays
ctcgaacgagcagaagagttgcacatcattatattaagaaagaaaaggtcaaaaatggaccaaaatacaaagtcctagagggcagaaaacaaacactagacc

SEQ ID NO: 93676 - DNA, 1381 bp, Zea Mays
ctttatagggagctccaaatcacacccaccacatcagctggccaccaatacctccccctctcttacctataaatgagaggcaaaagccaccaaactagtaggcaactaagacaaagtggcgtactcttctctgtactagctttcttcttcctcctcctcttcctcctcccaaacagactggatttcatcaagataatcctgaaactggagccaacaagcagacagagaaagaagagcaagaagaccggctcccagccgatacacggtaggagtgagcagcgttagatcagttttcatcacaggatcgatatggtgacagtgagagaggagactcgcaaggggccatggacagagcaggaggacctgcaactggtatgcactgtccgtctgttcggtgaacgtcgttgggatttcattgccaaagtatcagggctcaaccggacaggcaagagctgccggctgcgctgggtcaactacctccaccctggcctcaagcgtgggcgcatgtctccccatgaagagcgactcatcctagagctgcacgctcggtggggaaacaggtggtccaggatagcacgccgcttgccagggcgcactgacaatgagatcaagaactactggaggacacacatgagaaagaaggcacaggagaggaagaggaacatgtctccatcgtcgtcctcgtcttcgctgacttaccagtcaggctacccagatactccatcaaccattggagttgagggacaggagcttcatggtggcagtggctgcatcacaagcatcctgaagggcacccctccggacatggatggctatcccatggaccagatatggatggaaattgaggcgccacagatgccctcggaggagagctttgttggggggaaccataatgtgtgcagcagccttgccaccccgctgccaccaccaactgtctgggaatactacccagatgcctgctggaaggttgacgatgagatcaagatggcaacacaatttcaatttggttatagtgaaggagttgggccctgcttctgatgccataaatattgggtcagattactaagttatacacctacctagcagaagtgaagtgcttttgtagaaacaagctttagcatggatctgaatatttatctccgcgcttagaattgcaggtctatggatctatgcatggttgctatgtatctatctagtgtgcaagacaagattatcttaatttgtccttgatgctatggaatacaagggcaaaggtactatatctgtttactcacagtataattagctaccctttgagacttttctgttggacatgatgccaacaatacatgttatattgatatagatggtcttaacttggaagggtttaaagtttcagtcc

SEQ ID NO: 93677 - DNA, 1475 bp, Zea Mays
ctttatagggagctccaaatcacacccaccacatcagctggccaccaatacctccccctctcttacctataaatgagaggcaaaagccaccaaactagtaggcaactaagacaaagtggcgtactcttctctgtactagctttcttcttcctcctcctcttcctcctcccaaacagactggatttcatcaagataatcctgaaactggagccaacaagcagacagagaaagaagagcaagaagaccggctcccagccgatacacggtaggagtgagcagcgttagatcagttttcatcacaggatcgatatggtgacagtgagagaggagactcgcaaggggccatggacagagcaggaggacctgcaactggtatgcactgtccgtctgttcggtgaacgtcgttgggatttcattgccaaagtatcaggtttgaggggtggggatccacaaattaggtagctaaattgaagtcacccgcgctaagtcgcaaaagcagctatcaacctctctgaccgactctattcttgcttcccctctccccttctgtatcttcatgcagggctcaaccggacaggcaagagctgccggctgcgctgggtcaactacctccaccctggcctcaagcgtgggcgcatgtctccccatgaagagcgactcatcctagagctgcacgctcggtggggaaacaggtggtccaggatagcacgccgcttgccagggcgcactgacaatgagatcaagaactactggaggacacacatgagaaagaaggcacaggagaggaagaggaacatgtctccatcgtcgtcctcgtcttcgctgacttaccagtcaggctacccagatactccatcaaccattggagttgagggacaggagcttcatggtggcagtggctgcatcacaagcatcctgaagggcacccctccggacatggatggctatcccatggaccagatatggatggaaattgaggcgccacagatgccctcggaggagagctttgttggggggaaccataatgtgtgcagcagccttgccaccccgctgccaccaccaactgtctgggaatactacccagatgcctgctggaaggttgacgatgagatcaagatggcaacacaatttcaatttggttatagtgaaggagttgggccctgcttctgatgccataaatattgggtcagattactaagttatacacctacctagcagaagtgaagtgcttttgtagaaacaagctttagcatggatctgaatatttatctccgcgcttagaattgcaggtctatggatctatgcatggttgctatgtatctatctagtgtgcaagacaagattatcttaatttgtccttgatgctatggaatacaagggcaaaggtactatatctgtttactcacagtataattagctaccctttgagacttttctgttggacatgatgccaacaatacatgttatattgatat

SEQ ID NO: 93678 - DNA, 978 bp, Zea Mays
gatcgatatggtgacagtgagagaggagactcgcaaggggccatggacagagcaggaggacctgcaactgggctcaaccggacaggcaagagctgccggctgcgctgggtcaactacctccaccctggcctcaagcgtgggcgcatgtctccccatgaagagcgactcatcctagagctgcacgctcggtggggaaacaggtggtccaggatagcacgccgcttgccagggcgcactgacaatgagatcaagaactactggaggacacacatgagaaagaaggcacaggagaggaagaggaacatgtctccatcgtcgtcctcgtcttcgctgacttaccagtcaggctacccagatactccatcaaccattggagttgagggacaggagcttcatggtggcagtggctgcatcacaagcatcctgaagggcacccctccggacatggatggctatcccatggaccagatatggatggaaattgaggcgccacagatgccctcggaggagagctttgttggggggaaccataatgtgtgcagcagccttgccaccccgctgccaccaccaactgtctgggaatactacccagatgcctgctggaaggttgacgatgagatcaagatggcaacacaatttcaatttggttatagtgaaggagttgggccctgcttctgatgccataaatattgggtcagattactaagttatacacctacctagcagaagtgaagtgcttttgtagaaacaagctttagcatggatctgaatatttatctccgcgcttagaattgcaggtctatggatctatgcatggttgctatgtatctatctagtgtgcaagacaagattatcttaatttgtccttgatgctatggaatacaagggcaaaggtactatatctgtttactcacagtataattagctaccctttgagacttttctgttggacatgatgccaacaatacatgttatatt

SEQ ID NO: 93679 - DNA, 1303 bp, Zea Mays
ccaatacctccccctctcttacctataaatgagaggcaaaagccaccaaactagtaggcaactaagacaaagtggcgtactcttctctgtactagctttcttcttcctcctcctcttcctcctcccaaacagactggatttcatcaagataatcctgaaactggagccaacaagcagacagagaaagaagagcaagaagaccggctcccagccgatacacggtaggagtgagcagcgttagatcagttttcatcacaggatcgatatggtgacagtgagagaggagactcgcaaggggccatggacagagcaggaggacctgcaactggtatgcactgtccgtctgttcggtgaacgtcgttgggatttcattgccaaagtatcaggtttgagggggctcaaccggacaggcaagagctgccggctgcgctgggtcaactacctccaccctggcctcaagcgtgggcgcatgtctccccatgaagagcgactcatcctagagctgcacgctcggtggggaaacaggtggtccaggatagcacgccgcttgccagggcgcactgacaatgagatcaagaactactggaggacacacatgagaaagaaggcacaggagaggaagaggaacatgtctccatcgtcgtcctcgtcttcgctgacttaccagtcaggctacccagatactccatcaaccattggagttgagggacaggagcttcatggtggcagtggctgcatcacaagcatcctgaagggcacccctccggacatggatggctatcccatggaccagatatggatggaaattgaggcgccacagatgccctcggaggagagctttgttggggggaaccataatgtgtgcagcagccttgccaccccgctgccaccaccaactgtctgggaatactacccagatgcctgctggaaggttgacgatgagatcaagatggcaacacaatttcaatttggttatagtgaaggagttgggccctgcttctgatgccataaatattgggtcagattactaagttatacacctacctagcagaagtgaagtgcttttgtagaaacaagctttagcatggatctgaatatttatctccgcgcttagaattgcaggtctatggatctatgcatggttgctatgtatctatctagtgtgcaagacaagattatcttaatttgtccttgatgctatggaatacaagggcaaaggtactatatctgtttactcacagtataattagctaccctttgagacttttctgttggacatgatgccaacaatacatgttatatt

SEQ ID NO: 93680 - DNA, 1322 bp, Zea Mays
ccaatacctccccctctcttacctataaatgagaggcaaaagccaccaaactagtaggcaactaagacaaagtggcgtactcttctctgtactagctttcttcttcctcctcctcttcctcctcccaaacagactggatttcatcaagataatcctgaaactggagccaacaagcagacagagaaagaagagcaagaagaccggctcccagccgatacacggtaggagtgagcagcgttagatcagttttcatcacaggatcgatatggtgacagtgagagaggagactcgcaaggggccatggacagagcaggaggacctgcaactggtatgcactgtccgtctgttcggtgaacgtcgttgggatttcattgccaaagtatcaggtttgaggggtggggatccacaaattagggctcaaccggacaggcaagagctgccggctgcgctgggtcaactacctccaccctggcctcaagcgtgggcgcatgtctccccatgaagagcgactcatcctagagctgcacgctcggtggggaaacaggtggtccaggatagcacgccgcttgccagggcgcactgacaatgagatcaagaactactggaggacacacatgagaaagaaggcacaggagaggaagaggaacatgtctccatcgtcgtcctcgtcttcgctgacttaccagtcaggctacccagatactccatcaaccattggagttgagggacaggagcttcatggtggcagtggctgcatcacaagcatcctgaagggcacccctccggacatggatggctatcccatggaccagatatggatggaaattgaggcgccacagatgccctcggaggagagctttgttggggggaaccataatgtgtgcagcagccttgccaccccgctgccaccaccaactgtctgggaatactacccagatgcctgctggaaggttgacgatgagatcaagatggcaacacaatttcaatttggttatagtgaaggagttgggccctgcttctgatgccataaatattgggtcagattactaagttatacacctacctagcagaagtgaagtgcttttgtagaaacaagctttagcatggatctgaatatttatctccgcgcttagaattgcaggtctatggatctatgcatggttgctatgtatctatctagtgtgcaagacaagattatcttaatttgtccttgatgctatggaatacaagggcaaaggtactatatctgtttactcacagtataattagctaccctttgagacttttctgttggacatgatgccaacaatacatgttatatt

SEQ ID NO: 93681 - DNA, 1229 bp, Zea Mays
caaaggcgcggtaaaaataaaaaacgtgtgtgccgtgccgggccaaacgcacaaacagcgcgcgggcggcgtacgacgtcgcgcccaccgcgtgccgctcccagactggatttcatcaagataatcctgaaactggagccaacaagcagacagagaaagaagagcaagaagaccggctcccagccgatacacggatcgatatggtgacagtgagagaggagactcgcaaggggccatggacagagcaggaggacctgcaactggtatgcactgtccgtctgttcggtgaacgtcgttgggatttcattgccaaagtatcagggctcaaccggacaggcaagagctgccggctgcgctgggtcaactacctccaccctggcctcaagcgtgggcgcatgtctccccatgaagagcgactcatcctagagctgcacgctcggtggggaaacaggtggtccaggatagcacgccgcttgccagggcgcactgacaatgagatcaagaactactggaggacacacatgagaaagaaggcacaggagaggaagaggaacatgtctccatcgtcgtcctcgtcttcgctgacttaccagtcaggctacccagatactccatcaaccattggagttgagggacaggagcttcatggtggcagtggctgcatcacaagcatcctgaagggcacccctccggacatggatggctatcccatggaccagatatggatggaaattgaggcgccacagatgccctcggaggagagctttgttggggggaaccataatgtgtgcagcagccttgccaccccgctgccaccaccaactgtctgggaatactacccagatgcctgctggaaggttgacgatgagatcaagatggcaacacaatttcaatttggttatagtgaaggagttgggccctgcttctgatgccataaatattgggtcagattactaagttatacacctacctagcagaagtgaagtgcttttgtagaaacaagctttagcatggatctgaatatttatctccgcgcttagaattgcaggtctatggatctatgcatggttgctatgtatctatctagtgtgcaagacaagattatcttaatttgtccttgatgctatggaatacaagggcaaaggtactatatctgtttactcacagtataattagctaccctttgagacttttctgttggacatgatgccaacaatacatgttatatt

SEQ ID NO: 93682 - DNA, 2253 bp, Zea Mays
ctcagcttgacctcgtctactagaaggaaggcagaaggcagagccaagttctagtagatagaatttcaaaggaagtaaagtagtcagcagagcgcgtcttgcgcgccgaggcgaactgaattgactgaaatcggaagagcctgccaccagtccagacttgctccggcgatgtctccacctagcttctcctactcgcagtcgccgccggtcgcgtattattttccggcaatcatatgttcggtcatatatccttcgctcccctgccgtgcgtacgtcgtttcagcctctacaagtagttccaagccagcagtacctctactaccccccctgacgatctcaaccagcaactcaacaccgtcgctttcgttccattcctacgtatctgtggttgtggttgtcggcttgtcgctgcagctgcactcgccataccatatgacatggcggattccatagccggagctgtggcgtcagcccttgcgcaggagatggtgagcagagccgtctccctcgtgctgcaggtcggcctcaagcgcgaggacaaggcgccggcgccggcgcaactgcaagcccaggcagcaggtgctgcaggccacaacgcggagcggctcaagatggccgtcagccagctggagttcgccttagagaggaccgggaagctgcccatcacggacgtgtcactccttgaccagaggaagatgttcaagctcgctttcatcgagggcacgagcctgctcatcaccgagcagcggctgcggcggcagagcacgcaagcccgccaccagcacgaggaggtagaagaagaagcgaaccaccagaaaggccaagcgaagccgaagcgcaggcgacgatgggttcttgcggccatggcgcgcccgttcctcacctcctcctcctcgtcgccgtcgtcgtcgtcaccctgcatcgacgccgccgtcgtccggaggttcgagtggatggcggacagcgcgggcaggttcgtgcgggacgtggccgagtccggcagctcgctgcggcactgcaccttctgcaacccggtcgtgaggcgtctcctggaaggcaagcacctcaggtacgaggcggagcaaggagccgtgctgcggttcctcgacctctggccgctgtgcgtcgaaggccgcggcgtggagacgatcctcgagtacgggtacgaggaccgcggggcgccggagaagaacctcctcctgcacatcgtgctccggctctccgagagcatggacgtgttcgggacggccatacggtgcctgcaggcgatggcgtcccagctgaagctgctggtgagcgaggccgcggtcggggagctcgcgctgctggctgcgtcggtggacatgtgccgttccagcgcgcctccgtgggctcgcatcgatgaaggcgagtacgctagggccagccaggcgttccgtcgggatccagtgtgttgcagagacagagagagagggcagcagctaggacggcctcgggctaccagcggtggtggcgtcgctgacgctgcctcgtcgccggagttgtcccggatattgccggagcagatcatcgtgctggcgttttggtgccgcgttccggcggcaccggggtgcggcttgttgcctaccaggccacctctgaagatgacggttttcttctcgccccatgcgtgctgccatgatgcagaagaggagaggaggagcagttgggcgctggacctttctgccggagagaatggcaacccactgcttagagatgttagcgtacagcaagtcgctgagatggtaggacccaaggcacttgatcgtttcttgcgccagccacacctggcagtatatgcaatcacctggggctctgaacatggcaaggccatctttatcctggagagaccaaaagagcaggatcatagaagaagaaccgaaaggaatgcaaaccgcaggcacatgaaagaaggccagttgcaggtagtgaggtaggtcgtttctgttttgctagcttgccccatcagggcaccgagtgtgtatgtgtttctgacatggaaagaaaattcgggatttcttatcaaaaggagaattagagtaatgtgttacaaactcacagtagacgtgtacctcctttgtttcctagtgctgcgatgatttgtaacatgtacggtgtatgttaacttgtgctcctccttttattacttgttctagaaaatcgactttgcgtctttgaaccgcgggatgggatgggagtgcttttgctagtaaagtttgattgaccccttttaaa

SEQ ID NO: 93683 - DNA, 259 bp, Zea Mays
atgtgtggcattgtgacatgttatctcttcgattagctttttatgctacaacttttgcgcttatttcccctctctctttttgttctctgggaacacacttcaagcagggtttaagtggagataaatcttcgaaaatgggatctgagggactcataaatgactctatgccacccaaggatcctgaagagggaggtttgttacttcctgaatcatcatgcactgcagtaatttcagttttcttcttttgaatccttgtttg

SEQ ID NO: 93684 - DNA, 659 bp, Zea Mays
gggaaaggaaaagaaattcagataccgaacttgtcaagtggtcaggtgcacctgcagggttgtatgaggtccgttggacaaggacaactgtaggtgggcctaattacttgggaggttccatcacagggtgggagggatctgctacagatgctagagttctgagatctgcaatgaacaatggattccatgtacctccagaaaagttctatttggttgatggtgggtatgccaacaccacatcattccttgcaccttatcgtggagttagataccatctaaaggagtatgggcaaggtcaccgtagacctcataactataaggaattatttaaccatcgccatgccataccgaggaatcatgttgaaaggactttgggggttgtgaagaagcgctttcccgtcctcaaagctgccacatttcataaaataagaaatcaagtgaagataccagtagcagccgctgtacttcacaatagtattcgatcactcaatggggatgaggaatggttagataatcaaccagataatatctcaccacaaaactttgttgatctactggatggcgatcaaggcaacgatcaaggaaatgtccaaggaaataatcttagagatgcaatagcacatgaaatgtggaatgattaccaacaacatagaaattag

SEQ ID NO: 93685 - DNA, 1972 bp, Zea Mays
accgttatctggccacgtgatatttttgccgctcgatgccgcgtctccagctccaagcgcgtccggccacccacacctctgcccctccatgcatcttcctagtcctagccgcagctcctcatcttcctgcgcgcgctccttctctgtctcccatggccgagcgtcctccctgctcctctctcctttatctccctctccatgccggcgcttccctagctcgttttcccatctccctgctccttcccatggtgcgcagggcgtcctcccctcgactccctccctagctccccaccgctcgccttcctctccttcctagtcgcccgtctccagctcggtctgcactcgccgtccctgccccctcgctgtttttgtgccagccgagctcgcccagcccctcgcctctccacctcatcaacgccctcagccatggatgtcgaatcccctctctttagtgcctttctttgcagcccctgcgtcgccgtgcatgtaaggtgtttgtctaaatgctcaagaggagtgtcgtgtcgtggacagcccttttggcgtcgtcgggtgtttgatgttttgcgcatcccgtctacgacaccgtcgaccctcagtgatatttcgttcttgctttgtcgttttatcgatcgacgtctatttgctaatgtgaagtgtgtgtatgtgcctatgtgtgttgaggagcgacatctgtggaatctgggtgaagaagaaacagagcacgtccgacgcttactagctgctggtgaaaggattgaatcggctatcatggtcgtttagtgtcgatcgagtcaaccttagtcgtggtaagctaccattatttctgctatttagccgatgtatgagttagatggataaaatagttacgatgattttcttatctctagcttagatatgttgtatgttcctctattttattgtggtaattgtgcttatacgaggtggtgtctaagcgatacgatgcgatgcgaatggtaattgtgcttggatgaatatatgtgtatgcataatgtgtttaaattgatttttttttgtttgcatgtatgtgatggtaggtttaaaatactaggttatgagaaataaatggattcatatatgtgattaactaggtggttttagctctaatttagaaggatgtgttagaatagttgaagtatcaaacatatgaaaattttagaagtaactaggagctaagttaaaattattgttgtctagacctgcatgtccaattttaattatgcagtgaagtaaatcatgttttctgtaaaagtgttatatataaaagttatagctaacttctttaacttgcttgtgctaaaattttatggccataggtttagtagtttaggagttatgatttttccaagtccagtttcagaatctgtccaaattctgtacatgtttcgaaaattggattctttggctaagctaaactgagaatcagccctcagtaattctataagaattgtagtactttttttaagatttccaacaaattttggatcaccctttttggtgatttgtaagttaaattacagtcgtttgaagtacgatatctaaatctgtccaaatttagatagcagagcatttcttatatcttttcaccttgatacgtattgaattaagctgagatatttataaatgaattgtaaacaatcctattagctttctaaaaagtctaggatcatctgaattggatgactgagactccagttatgaatttttgaagtgaagagccgaattctgtccaaatttggacagaatttaagtttagcactgtttgacctttcaaaatgtctaatcatgttgtgatgataatacaaaagttatagaggactttctaagcttctcagaaagttctagtttactatttttggatgcctattttgtgagttatgggctaaacaaatagttgttgttctgctgtccaaattcaacgagtattaaaatgactatatggagtttcttt

SEQ ID NO: 93686 - DNA, 78 bp, Zea Mays
gagacatatgatttggtgcagtgtctcaaggagacagcggcacgcaattatgtatgttgttttctttctcacttgata

SEQ ID NO: 93687 - DNA, 1427 bp, Zea Mays
atactgcaacaagctctagcgttacttttaatatgcttcagccatttgatgctcccctgcctccacacgtgcgctagcacagttccaatgctacatcaaagtaacgcttcttgattactgataatgccaaatcctagctttttagcgtttcttttctcccctaaaaatgagttcagggtgtagtattttcctaaaggatgggagatccattctccgatacaaaaaagtgagtctaaggatgcaatattttcctaaaaaaggaagagttcttgctaacatttcttatcttggtcttacgaaggaggtattcctttttcataaagtcacataataattatgtaatttcatcttattgtattggcttctataagtattttatccatgttccagataatatgagcaagcaacttttataagtctttaatatgtgatttccatggtcatatctcatttaaaaggaaaacttcatgtattcatattacaaatgataatttaagagccctggcaaaagggataatgattaaaacttgaatgatcataattgccatggttacattgctatgtcaatcgtgcgttttttgcttactatttcccctctataattgtatgcatctatgtggctatattttttatgctctttttgatgcttccactttgcttctgtagttgtttgtgttttggaatcaaggtgcacatttgcatgaattggatcttttagcgaccagaccatataggtacaaacttagttccatggcttccgatgacactgctgaaatgtgaatgttctgtttcgacgacgttgccaagaaaattgttgggaaatcatacaactctcctatcatcagttacagggacttcaactatcctactagatttaacattgatcgtatctcttaaattcacatttgtagttgtgtacaaccaaatatcatttgtggatttagagaaagaactcttcatgaagtcattcatagcatcatatggaagaaatgtcattgccatcacccagatgaaacattccactatctgtcaactccaacaaaactattgtctagaccaaaacaatcattctccaaattaacaggatagtcctggagatgaaggccaggacctaccgtcgtttgagtcaccataaaaaagaagcaacattcgattggttggttggctaacggacccagcgcattgtccaaagctcaaccgcagcatggcgggaggcagctcatgcacatcagccagtcaccgatcgagcatcggcttgcggtaccggatagagcaagtgatacatttggcggatagatagccagcttttgtctaatactatagtttacaatgttgtatctaaacactatttatcaaaaccatggtatgtttggagctaccaaaactacggtattatcatagcaattgcaaagtataatattataaaa

SEQ ID NO: 93688 - DNA, 1027 bp, Zea Mays
ccttccagttcccacgaaaaaggaaaaaagaaaactcaagagcccaggcttatctagaaacctcgctaaccctcgaggcctcgagtagctatgaagcagcgaggcgacgacggtgccgacggcgcagctgctttcgccggctgcctggattgcaggtcctccgaccattgctttttgcggtaaagagaccctttccatactatccttcgcttttcgattgtgtcgatgttgtagctttcgtgccggcagggaggcaacgccgccgccgccgccgacagtgacgacgctgctgccgccttcggtttctaactccttcgatcatcgcttttctgaggtacaaacttagttccatggcttccgatgacactgctgaaatgtgaatgttctgtttcgacgacgttgccaagaaaattgttgggaaatcatacaactctcctatcatcagttacagggacttcaactatcctactagatttaacattgatcgtatctcttaaattcacatttgtagttgtgtacaaccaaatatcatttgtggatttagagaaagaactcttcatgaagtcattcatagcatcatatggaagaaatgtcattgccatcacccagatgaaacattccactatctgtcaactccaacaaaactattgtctagaccaaaacaatcattctccaaattaacaggatagtcctggagatgaaggccaggacctaccgtcgtttgagtcaccataaaaaagaagcaacattcgattggttggttggctaacggacccagcgcattgtccaaagctcaaccgcagcatggcgggaggcagctcatgcacatcagccagtcaccgatcgagcatcggcttgcggtaccggatagagcaagtgatacatttggcggatagatagccagcttttgtctaatactatagtttacaatgttgtatctaaacactatttatcaaaaccatggtatgtttggagctaccaaaactacggtattatcatagcaattgcaaagtataatattataaaa

SEQ ID NO: 93689 - DNA, 1020 bp, Zea Mays
cccgatgaaacaaagctaaattattgaactcggtgacagactgacagcagtgaacacgaacaaagcagacacgcatctcgatcctctgctgcctacaatttcaaacacatgagacgagacaggacgacgactcatgtgacactcacgcgtgcagtggctcacatcacatgcatgcgatgcgagtgataatacactggagagcgaggctactgagcgaagcaaacggctaatcaacaacaacctaacgacaatggcggttggacacacgacggcgacggcgacatgaaagaaagcacaacacaggtcgcgagatggcgcgacgaccccatgtccgcatcgcatcacacgtgcgggttgcagtagatgatcttcatctcctggacgttgcggcagtcgccgctgggcacctggtgcacggagcagcggccctggatggcgcagccgacggcggggcagcggccctgcagcggcgagccgtgcggggtgacggagaccgggacgcgctggcccggctgcgcgttgggggccaggtagaaggagccgccgtcgacgccgacgtggaactccacctgggcggcgtcgggcgcgcgcaggcgccccgtccaccagcacacggggaactcggcgtggctgcgcgggtgcagcgtgtaggtgcccgcgaacagcggcgggctgttggccagcggctccagcgtcagcgtcacgtcgtggctgcacaggttctgcaccgtcaccttcttgttcttcacgcagttgtcgtgcgtcaggtccgcgcgcgccagcgccagcacggccgccgccgccaggaggagcagggccgccgacgagggcttcggtgacgccatcctctcgctctcttctactgttgaagcaagctgctggtagtaacttcgagtagtagagtgggtgattaatgttactgcttggttcggttcagcccttgagggtgtgtggttatttataaccgtggcccgtgccgtgccggtgcccgtgcccgtgcccgtgcccgtgcgagatgca

SEQ ID NO: 93690 - DNA, 89 bp, Zea Mays
tcttttttcagctcaacaaatcattgagaagatttattaaaatgagctcaaagtggatgattattttgcctcctgtactcatgtggaga

SEQ ID NO: 93691 - DNA, 627 bp, Zea Mays
atgactactaccatttatttatttcaccggccgatgcattggagcttccttttcctcaaaatcctggggctcaacccgaacacaagacgcgcacgactcacaggagttgacgaggttgtagcccagaaagaacaaggaaaattggcgaggatgaggatagcgaacgatgacattgcagcacacacggtatgcgtgctgcagcgattgattgtcgagacgaggtcagaaaaggcatgcggtgaggcccgagctggaaatcgggcgagggagaaggagctcgcaggggcgcctaggcgagggagcagcacgccgaggaggccgagcagggagcatatactgcggcgtccggcgagctcgtgcgtagaggcggccatgggagttgagacgcgacagaagatgaaggagaggccctcggcgagcgccaaggaacaggggacggaggagctggaggaggtcgagacgggacggtcgtgcgccatggccaagcggcagtgctcggccagcgctgaagacgaacaggaacaacacgacggccggggtacaggcgagctgcaggccgagcgagctccagatacgagcatgaagggacggagtcgtgatgctggagagacacaaccagaggagtga

SEQ ID NO: 93692 - DNA, 1211 bp, Zea Mays
gaactaatagtacttggagatgaacaaccatgtttccatcctagcggttctcatcgtctatgtctctgttgttctcctgctcaattcccatgtagggttatgcagctgctacaagcgcatcttcagttttggtgatgataccatggacactggcaatttcgtacacttgattgggaaggccccatctaagtacaaggaagctccctatggcaagacattttttagacatgcaactggccgcatttccgatggtcgtgtcctcattgatttctatgcggaagcactcaagctaccaatgataccaccaattttacctgagaagaactctgggtatttcccgcatggcgccaacttcgctgtgttgggtgccacagcacgtgacagactcttctactcagggagcccatggtgtctaggggcacaaataagttggtttaatgaaatggtggatcgtatagctcctggagacgctgccaaggagcaatttctaagcgattctcttgtcgtgttgggtggaattggtggcaatgactactactcatatttcatcgatggtgaacctcccaaggatggaaatatcatttcagatgtcatcgcatacataagccatatgatcgaggaacttattctcattaatggtgcgaaagcattcgtggtccccaataacttccccattgggtgtttggcatcatacctaagtagattccatagtgacaaccatgaggactacgatgagcacgggtgcattaagtcattaaatgagttctcccaaaagcataatgaacaactttattctgatatcggacgactcagattcacttacccaaatgtgaagctaatatatgctgactactacaatgccaccatggaattcatcaaaaaccctggcagatttggtattggtgatcctctagtagcatgttgtggcggcaatggaccttaccacaccagcatggagtgtaatggaacggcaaagctttggggtgatccacaccactttgccaattgggatggcatgcacatgacagagaaggcatacaacatcattgtggaaggggtgttaaatgggccatttgccgatcctccattttcccttagttgctaggattaattagacttgcatttctttacaacatgtagcctacattttataataatggaagtattttttatttatactacttgaaggaagaaatgaacatgtaactttc

SEQ ID NO: 93693 - DNA, 205 bp, Zea Mays
cattgctttctcgacattttggcaaagataaattgtaatgtttgtttttatcagttcaatatatggcatgtggactttatggtcactttgattttaaatttattttttatggctattttttatgaggagtgtccaccatactagcttactaggcctttgtgtattgctcagcagttgcactgctggtagggcctggcctacccca

SEQ ID NO: 93694 - DNA, 312 bp, Zea Mays
atgggcgagcttggagaacagcgcacgccaaaaaaaagccctaggcatgacttgacagctactgcggcgcaggggaacgtcgccctgggcacggcatttggaggagagctcgaggtggtgctaacagagacgagcgggagttggccggcggacagtactcatggtgagctcaacggcgaggaaatccactccagggagccgagcgcgagaggcagagagaagtgggcttcacctgggcacgcacgaccagttgccatgaccgagcaggggggcgagcaggggaagacagagcgacggccacgggtgagctga

SEQ ID NO: 93695 - DNA, 858 bp, Zea Mays
atggagaagagccgggtgctggtggtgggcggcactgcgtacatcgggcagcggctcgtgcgggcgagcctggcgcaagggcacccgatgctggtgttgctgcgggcggagatcggcctggacatcgacaagctccagatgttgctctccttcaaggcccaaggcgcgtggctggtggaggcgtcactggaggaccacgcgggcctcctcgccgccgtggcgcagggcgacgtggtggtctcggccatgtccggggcgcacatccgcagccacaactcaccaaaaggcgacatgggaagggtcagaactctgggtggcatgtggggttcgacgcaattaagagggcagcaaggcggatggggtagatcaacgacgccgaggtatagccgtgtcccccctgatctgccaccgattcgatccgaggaagcgattcattgtagacaggacatcaaggaaaaacttgcctgcagtgcccttgattatgaacaggagctggagactgccaggaccagctccagtgttgagaagggctacgagctgcccgatggcgaggttatcacaatcagtgcagaaaggtttaggtgccctgacgttctattccagccatccttcattggcatggaatctgctggcatccatgaagccacgtacaactccatcatgaagtgtgacgtcgatatcagaaaggatctgtacggtaatgttgtcctcagtggtggttccactatgttctcaggtattggtgaccgcatgagcaaggagattactgcacttgcccctagcagcatgaagatgtggatctccaaggaagagtatgacgaatctggtccgggcatcgtccacatgaagtgcttctga

SEQ ID NO: 93696 - DNA, 366 bp, Zea Mays
acaaaccacgcgagatctgcagcgaactttcccccttttccgtcggcgtcgttgctggcgagttcatactccgcttgccataaagctgtcatgcgccacctctcctctagtaaccctaaccatccgaatcctctaacctacgaagaaccaagagcctcaccccagctggaggccgccgccattgacttccccgtacaccgccgtagaaacctattggccgtggtctgggcttccccagagacatcgtgtgactacccgtgggaattctagggctggattgccgatccagccgcggcaatttcttgtcggagcaccgtctccgcacctcttcgtgtattgcgccatcatcatcacggactcgggtga

SEQ ID NO: 93697 - DNA, 762 bp, Zea Mays
atggcaaagtactcctccagcaagtacaagtccaatggaggatttgacaaggaggcgcacaagaagaagtaccttcagaaggaaaagattaaggagtgtgccttcctcccctccctcagcgacctcgaccatgactccgacgatgttgtatcttcctcgagtgatgaggagactgagaggagggtcgaagacaagctaaacgggctatgcttcatcgccgacgccacaggaggcttctgcaccatggcacttggtgaggacacggtcggcaccggcgatgacaaagacatcggcgacgacactgcttctgaggtactacttttcgccgatgatctcgtcgctgagatagaagagctgaatgttgctttggctagttaggataagttgctttggaaggctgctcgtgagaggagagagtttagatccaagtatgagagcacgcttagggaacttgagtctactagagctttagttgtggtattcgacgagactgaatgtgatgagtgtgctctacacatgtcgaacatcaccactttgtagaccaagtactccaccttgctagatgagcgcgatgagttgagatctaggtctatcctattggttgcgtgtaccgtttgtcctagcttgcagtctgagctagcagagagagacgctagaatagctttgcttgagaaggctacctcagtgagtgcccctgcacttgcgcaatgtgcattttgtgagggtttgtagtctgcccttgagtcctgcagacacgacaag

SEQ ID NO: 93698 - DNA, 1273 bp, Zea Mays
atggtgacagcgagcgatcacgcgcgtgagggggaaggtgatggcttgggtccacacagcagtgagcacatgcgagatatgggttcttgggaggaacaagttagacaatttttgttagatgaggaagaagacgactatgagttgttctttgttattctccctgctataattccatacctctcagaagagaaagagcccatccacacctcctcactaactagtgctaaaaaggttagagaaatccttgaaggacatgagagttggtgcaaatctgagttccgaatggagccagtaatattcagaaccacaacaaattttcttagaagagagaatttactacgagacacacgaggagttaccattgaggagcagcttgggatgttcatgtacatgatctcccacaatgctagtaaccaaatgctacagaaggcttttcaacatagtggagagactatccatagaaaaatatccgaagtatttgatattgttcccacactaactcagtgttttgtgaagcttcctagctctatccaaactcataccaaaattgcaacagattctaggttcatgccattttttcagaactgcattggtgcaatcgacggcacacatatacccatcaccatagcagaacatagggcccctccatatagaaacaggaaaggaactctttcacacaatgttatcgtagcctgcgactttgaccttaatttcacatttgtttcatgtggatgtgaggggtcagcctcagatgcaggggtgctttgatctgctattagcaaaggatttagtgtgccagaaggaaagttttatctaatagatggtggttatgcaaatacatcatccttcattgcaccatatagaggggtttgataccatctcaacgagtttaggaggcgtcgttcatcacaaagtggttatgcaaactacaaagagttgttcaaccaccgccatgcaattctccgtaaccatatagagagggccattggtgttctaaagaaaaggttcccgattctaaaagtaggcacatttcatcccataaggaaccaaattaaggttgcagctgcaactgttgcatttcacaacataattagagagcaaaatggagatgaaagatgacttgacaaccaaccagattacatctctccaagtcaatatgttgatgttccagagggagatatcaactatctcaatgacacagaatcaagtgatggaagtgctctaagagatcagatcgcactacagatgtggactgcctacaatagctagatgt

SEQ ID NO: 93699 - DNA, 739 bp, Zea Mays
accatgtgaatgcatttcctacaacatctgatgtcagttctgcacattgtttgctcagagctgccacttgcactctacctcggacgccaaaggagcattcacagcgcagaggcggtccacggagtcggagaacgccggtttcagtttttttaggtgcgagtcgaccggcacaggagtcgccacggctatcctagggcggccatggggcccttacgcccgggtcgtgtttgccctctgcaacatgtctaacacggtggcgcccgagggctggaacaactgggacaacacggcgaatgaaaagacggcgttctttggacaatttcagtgctacggccagggatccggaacacaaggccgtgttacgtgggcgcacaacaacctctctccaaatgaagctgcgcctttcctcaccaatgcttgggttgatggccaagattggcttcgtccgcagtagaacaaatttgtcccatgatcagatatctcgtcatcggtcaattgaacttcttaggactggtttggcggcaatagggaaaaaacctatggaaaaatccgccaagggaatttaaatgacacttcaatttactgagaggatttcccccactagggtataatttcctgccaccctttggcaaccaagggtttagtccaaagctgttttattcccaaaacatagcaagcagcaactgtatactactatattggaggagaactttatccatcatcagaaaatggttcatcc

SEQ ID NO: 93700 - DNA, 297 bp, Zea Mays
gcggggcgggattggtggcggcgcgtccgcggatcccgccatcacaaagggcagcgccgtcgagggcgagggcgaggacagggggcgcggtttggtggcgggcgggatacccggcagcgagattggtgcgcgggcgagctcgagggcgggggctcacgggcgatggcgggcgcgtgcggcatgcgggggcgatggctggcgcgtgcggcatgcggggaggaagacgtgcggggggcggcgggggcacggtcatgcgtggggcggcggcggtcgcggtcgcggaggggagagaggggt

SEQ ID NO: 93701 - DNA, 411 bp, Zea Mays
atggccggctgggcaagaataacacgcacgcgtgggggctccagtgctccacgcggtctgcgttgcagggagcagggaggaacgagacgaggcgtggccgctggggtgctcgccggtgctgggcgaatcgtcggccagcgcagtggcgcgctcaggcttgcagggagagaagatgaaaaggctacaacgacaacacaactcggcaagggaggccaggacacggccggggctgccgcgctgcgcgctgaggaggagcgcggggatggggctgcaggggcatgcttgcccagccaaggcagccacgaggatgcagcgcggcacgacgaggagcagcgcggcacggctccctgcatggtgatgcgcagcgcgggtggccggagctgggcgaggcgcggttgtgggtggttctag

SEQ ID NO: 93702 - DNA, 1203 bp, Zea Mays
ggagaactagcaatacttgaagatgaacaaccatatttccattctagtgattctcatcgtcgatgtgtctgttgtcctcctgctcaattcccatgtagggttatgcagctgctacaaccgcatctttagttttggtgacgataccatggacactggaaatttcattcacttgattgggaaggccccatctaagtacaaggaagccccctatggcaagacattttttagacatgcaactggccgcatttctgatggtcgtgtcctcattgatttctatgcggaagcactaaaactgccaatgataccacccattttacctgagaagaactttgggtgtttcccacatggcgccaacttcgctgtgtttggtgccacggcacgtggcaaagtcttcttttcagggagcccctggtgtataggcacacaaatgtactggtttgatcaattggtagatcgtatagctcccggagatgctgccaagaagcaatttctaagtgattctcttgtcattatgggtggaattggtcaaaatgactactactcatatttcatcaaaggtaaacctcccaaggatggaaatatcatttcagatgtcatcgcagacataagccatttcatcgaggagcttattgtcgttaatggggcgaaagcattcgtggtcgccaataactttcccgttgggtgtttggcatcatacctaagtaggttccacagtgacgaccatgaggactacgatgagcatgggtgccttaagtcgttcaatgagttctcccaaaagcataatgagcaactttattctgccatcggacaaatcagatactcttacccaaatgtgaaggtaatctatgctgactactacaacgccaccatggaattcatcaagaagcctagtagatttggtattggtgatcctctagtagcatgttgtggcggcaatggaccataccacaccagcatggagtgcaatggcacagcaaagctttggggtgacccacaccacttcgccaattgggatggcatgcacatgacagagaaggcatacaacatcattatggaaggggtgttaaatgggccatttgctgatcctccatttccacttagttgctaggattagttacgctaggaattccttacaacatgtagccaatattttttataataatggaagtattttggatttatactacttcaaggaagaagtaa

SEQ ID NO: 93703 - DNA, 1317 bp, Zea Mays
ggagaactagcaatacttgaagatgaacaaccatatttccattctagtgattctcatcgtcgatgtgtctgttgtcctcctgctcaattcccatgtagggttatgcagctgctacaaccgcatctttagttttggtgacgataccatggacactggaaatttcattcacttgattgggaaggccccatctaagtacaaggaagccccctatggcaagacattttttagacatgcaactggccgcatttctgatggtcgtgtcctcattgatttctatgcggaagcactaaaactgccaatgataccacccattttacctgagaagaactttgggtgtttcccacatggcgccaacttcgctgtgtttggtgccacggcacgtggcaaagtcttcttttcagggagcccctggtgtataggcacacaaatgtactggtttgatcaattggtagatcgtatagctcccggagatggtaacaatatataattcagtccaaacacatccataataaattcatgcatgatgtgtataatattcttattgataattcattcatccattgcatgattgttctcttatatatcagctgccaagaagcaatttctaagtgattctcttgtcattatgggtggaattggtcaaaatgactactactcatatttcatcaaaggtaaacctcccaaggatggaaatatcatttcagatgtcatcgcagacataagccatttcatcgaggagcttattgtcgttaatggggcgaaagcattcgtggtcgccaataactttcccgttgggtgtttggcatcatacctaagtaggttccacagtgacgaccatgaggactacgatgagcatgggtgccttaagtcgttcaatgagttctcccaaaagcataatgagcaactttattctgccatcggacaaatcagatactcttacccaaatgtgaaggtaatctatgctgactactacaacgccaccatggaattcatcaagaagcctagtagatttggtattggtgatcctctagtagcatgttgtggcggcaatggaccataccacaccagcatggagtgcaatggcacagcaaagctttggggtgacccacaccacttcgccaattgggatggcatgcacatgacagagaaggcatacaacatcattatggaaggggtgttaaatgggccatttgctgatcctccatttccacttagttgctaggattagttacgctaggaattccttacaacatgtagccaatattttttataataatggaagtattttggatttatactacttcaaggaagaagtaa

SEQ ID NO: 93704 - DNA, 2014 bp, Zea Mays
cgtcctcgcataacctccctacatatatcttcttcacctgacctctcttccttaccctccctcgtagcagtcggctgtcgtggtccggtgacctccccacgatgcctcccgggaagagatccacacggccctcacggaattccgaagaccctcgtattgaatacgagaaaatgagggctgtgaatatgatgaagaacaatcaattgtttcaacggctgggccttggacaattaaaaacaatgatcatcgcaacaactgcaaacaacaaaacaaggcagtcctcaggaatcaggttctttatatgatggtgagaacgttgaggattctggtgaagaggatgttggcatggaattccaagctcgtaagggtgtccctacccacatctccaatgatggtgaacatatgtcaacaaaagtaacaagaggaaatataaaaattatggcacctgtgcaggaacgaccagttagagtcactagacaaatagttgttgaagtaaaccaaatgtctacccatagcctaaatgattctacacaaccgagttcaagtgccgccacaaaccatgatttgacccacaaccttattgttcctacacatcctagttccaatactgccacaaaccatgagcccatccaagacatggatactgttgcacaacctactttccagatacaggagggtgataaccacactgggaatcaagaaatcataccaaggaggaaaagtatgggcaggcaacttgaatcgttaagcagaggactgagaatcaagattccaatccaaatcactgaagggaacaaaaggctagagccacctattcaagctgctaagtttgcatcagagggtggaattacattgaggcaacccattccaatatttaaccattggatggaatacaaaaagagagagaatgaacctataataagaaactacattggcaaagttactgctaatttcatcgtggacaatgatagcaagacaatggaagatgcatgtctagacatgctaaagagtggacaacgccaaatgaggtatagactaaaacagatgtacttcaatgggatacttgctaatcaagtgaggactacatcacctattccaagcatgtctgacaacgactggagaaagttggtggagaagtggtctaccccaaatcataaggaaagttgtgtgaagaacaaacttaatcgtgaaaaagtacagtatcaacaatgcacaggctctcagtcctacattgcaaaggcttttatattgaagcaagaaaaatataaggacgtggaacctagtgcaattgatcttttcaaggacatgcattgtagcaaaaagaaaggttttagtgaaaatgttcagaaagctattgttgacatggaagaaatggtagcagcaccagttcaggatggacaacaaccaaaatctcctacagaagttgtttctaatgtgctaccaggctccagtgtgttcctacacaatgtaggtcttaagtccgcctccaagaaaagctccacaacgactgtttctgcaaaggttcaacaacttcaggatgaactagaaaccgagaagcaagaaaaagatggccttcgggaagaagtggaaaccttgaaggctcaagcacaagcatctcaggagaccattagtagtatgaagaggtcgatggaagaaaataacaacctccttcgtcaactattaagcttcaatcgaggccaagtgcctccatcataagtctggttgaccactataggacctgcagccttatggctgttattgtggctagttacagtagctctagatttgaagttataggatcatttttcaattatgcttaatgtttaatactttgagttgaagttattggatttgttttggatttaagttaaaggattgcagatatatgttttaaagttatattatctcttctagatgaaatatttgtgttgaacaaattcatatgatattttggttctgatgtgtaatatttctatgatgatatgaatgcatatgatgtattccttgcgatgat

SEQ ID NO: 93705 - DNA, 401 bp, Zea Mays
acgccatcaattgacgctggatttggagccgatccaagagccatagtaaacaaagagaggagggaaacaacgagagagaaacagacagatcgccaccgcagactcgccgtgctgcatggccagactagcctcttcctgacgcgtcgtatggttggacggaatggatgccgccgccatgggcacgaaccttcatcggtgctcagtgttcatggaccagttggtgggattgtgggcaggctttgcgagaccccaattcgacgaggtcagcctcggaccatggggaatctcttgccgcgatgccgcaactctgatggggaccgagcctcggtgcgcacgactcacgtgaggtcacgagaatctgaagatcatcctggtacctggaatctcaagtcccaggcaag

SEQ ID NO: 93706 - DNA, 108 bp, Zea Mays
acaattgtactttttcatcatgctgggattcttgctcgtgtatttaataaaaagtatgagaattcagactcatgtttaaatttgaatcggagaacggaaacaaactga

SEQ ID NO: 93707 - DNA, 2601 bp, Zea Mays
gactagtcacctgttggcagggtccggttcacgccgcggcggctcgactggactcccctcgtcatggccggcgtcagcggccgcggggccgcggagagggtggccgccgccgtggaggcggtgggatccggtggctgggagttccgaaacgcgtacaggcgccagctgctcgcgctgtcgcggcggatccggctccttggcccctttgtcgaggagctccgggaggtaccctgtgtacccgcggtggaaccggagcgggcgctggcggtgctcgccgacgcgctggaggaggcgctcgacctgctccagctcggccgcgacgggagcaggatattcctggtccttgatagggataaagtaatgaagaagtttcatgaatcaattgttcagctggagcaagctttgtgtgatttttcatatgataaattggacatatctgatgaagttagagagcaggttgagttagtgcatgtacagctcaaaagagccaaagaacgggttgacatgcctgatgatgagttctacaatgaattactttcactgtataacaagagccacgacccaagtgctgaattggatatccttggaagattgtcagaaaagctgcacctgacgaccatcaccgatctcacacaagaatcgcttgctttgcatgagatggtggcatccggtggcggtaatgatcctggagaacacattgaaaaaatgtcgatgctactgaagaagatcaaggactttgtgcaaactcagaaccctgaaatgggcccgccgatgactaccaagctaatggatcccaatggggagccaagacccagaaacatccctgatgagttccggtgtccaatttctcttgagctgatgaaagaccccgttattgttgctactggccagacccaggaacgtgctgtgactgcacttctgaacctctctagtcacgaatataacaagactagcatcatttcatccggtgccgtcccgggcatagttcatgtcttgaagaatggaagcatggaggcacgggagaatgccgcagccacccttttcagcctgtctgtggtcgatgaatacaaggtaacaatcggaggaacaggagccatccccgctcttgtagttttgctgagtgagggcagccaacgcgggaagaaggatgcagcagccgccctgttcaacctgtgtatctaccaggggaacaagggccgtgccatacgagctggcctggtgccactcatcatggggctcgtgacgaaccccaccggagctctgttggacgaggccatggcgatactctcgatactgtccagtcaccccgagggcaaggccgcgattggggcggccgagcccgtccccgtgcttgtggagatgatcggaagcgggtcgccgaggaacagagagaatgctgcggctgtgatgctgcatctgtccgtgcagtccgtgcatctagcccgggcgcaggagtgcggcatcatggtcccgctacgggacctggccctgaatggcacggagagggggaggagaaaggcggtgcagctccttgagcgaatgagcagattcctggttcggcaacaagagggtatcagctcccatgagcagatgttggacgagctcgaacgtcaacttgatgccttcggacctggtgttacagaggccgatatccttgaacaatcgggacttctttaacccacggttgcatgatgatgatgaatctatcttcgccataatactatcaaaagaggtcttcttttggggatagtactaccaaaaaagttcatgctgaaccagagttctttcatggcgacgttctatcggtactgatgctgatctgtccgtccggtttggcttcttccatgcttgtgtgctgaagctcccatcgctccatcagtttctgggaacgtaaggtagcacagaatgatgagatgtgtacagtctactatgtatgctgctccagacgtcatatagctatgtacattttttttcactatggtactataaaaaatgaggagttttagcggcggacttgatcagtaatacttatttcgtgcatgcgtacttgttggcgttagttccagattccagaattttttttggggacacgtatgcatttgggattccaacattggtagtgcgtggtattggaatctagtatggcagtgctagttgcaaccagaatgctattcatgcctctgaaatgcagcaagtgcacacgttcatgtcgatttcttttcttttttacccaaggagaaacatttcatctctgcttttgagaaagcaattatcatggaagatggaacagtttcgtatcgaattcacgcgaaatgtttccaagaagagcacgtatacacgtttggcagctctggtgaaggaagcaagaagactgcgtctgttggcagatctggtgaaggaagcaagaagaccgtcgtctacaagtgctgatgggccacgtcgttcgaataggccgaggaagagcaatgcaaacatgtatgggctggcgtgggtgaatgtgatagaaggtccatgtaatgtctattccttagactttgttcttttaatttcatgtggattgaagtgtattgaaataaattgcaatgaatttcaacttctatg

SEQ ID NO: 93708 - DNA, 1119 bp, Zea Mays
gactagtcacctgttggcagggtccggttcacgccgcggcggctcgactggactcccctcgtcatggccggcgtcagcggccgcggggccgcggagagggtggccgccgccgtggaggcggtgggatccggtggctgggagttccgaaacgcgtacaggcgccagctgctcgcgctgtcgcggcggatccggctccttggcccctttgtcgaggagctccgggaggtaccctgtgtacccgcggtggaaccggagcgggcgctggcggtgctcgccgacgcgctggaggaggcgctcgacctgctccagctcggccgcgacgggagcaggatattcctggtccttgatagggataaagtaatgaagaagtttcatgaatcaattgttcagctggagcaagctttgtgtgatttttcatatgataaattggacatatctgatgaagttagagagcaggtaatgtgaacaactaaaaagtatcatttgtggttgttgtcaagctcttaaatccagtagatgcttagccgaaatcactctgcaggttgagttagtgcatgtacagctcaaaagagccaaagaacgggttgacatgcctgatgatgagttctacaatgaattactttcactgtataacaagagccacgacccaagtgctgaattggatatccttggaagattgtcagaaaagctgcacctgacgaccatcaccgatctcacacaagaatcgcttgctttgcatgagatggtggcatccggtggcggtaatgatcctggagaacacattgaaaaaatgtcgatgctactgaagaagatcaaggactttgtgcaaactcagaaccctgaaatgggcccgccgatgactaccaagctaatggatcccaatggggagccaagacccagaaacatccctgatgagttccggtgtccaatttctcttgagctgatgaaagaccccgttattgttgctactggccagacatatgagcgggcattcatcgagaaatggctagcttctgggcaccagacttgtccaaatactcaacagaggatgccaaacacaacactgacaccaaactatgttcttagaagccttattgcacagtggtgcgaggccaacgg

SEQ ID NO: 93709 - DNA, 609 bp, Zea Mays
ctctccctagtaaccaactcaattaacggcgttaatggcaccgtcatcggcctctccctctccccagcgccctccctgtggtccctctctctataaagcccgacgtcgagcccatggagccggttcccctttttcactcgagctcatccccactcctctcctccttgtcgcgcgagaccgccctgcgtcgaccccgccgctcgtcgtggagctcgccgccgaccggagccgcgccgccgagtcctgctccctccccgccgaccccctgctgcgacctgtcgatcccatgctcgttgattcctccctgcgcaagaactactggagcaaggttgaagatgacacaaattttgtgttctattttcaaaactatgtttaatttagtttagatctcctgcagcgatttgttgtttaaatttgtatatgttgcgagatcggaatcatgagaatattgagtgattaatatcgagtatatgcgatagggtattttttattattgtttctattttctagcgcatgtgaatattaattggtttatgtcgtcatagaaaaaattggtttagaagtagtagtttagaataaagataaaagaagagagtagaccacgttttc

SEQ ID NO: 93710 - DNA, 918 bp, Zea Mays
atgcccgtgatccatactcgaccggtgcccgtgatccatcctcgccagaatcgcgaccgtggatctcaccgcccccgcgcccacgcgacatctcgaccgcactcgtggatctccccgacgcaccccaagacttccgctgcgcctcccatggctgtgctcacgacctgttctgcatgcgtcgtctcccctagatcgcgcaaggcccgtgtccatgccatcaccgaccatgtccatgtcgtcatcgaccttccgccccatcttcaaacccacctccaaaaccctagccacctccccgctgcccaccccttcgtctaccttctgcaccatcccatggaggacaacgccatctcgacgctcatggacatcgacaactcgccgctcagtgtcgcgggggttaggttcctcaccccaccccgtcctactaggagggcgatatgttcctcgccccacaccatgcaggccacgacggctctagcgaggcccgtgggctcctcctcttctctgggttcttcaatagcttcaatagcgccgacttcgaggccatgctgtgcatgcagaatgctttttagctttgcagataaaatcttcagcaaaatgagagaagataaaatcttgagcaaaatgagagaaggtttggaatgctgggaccgtgaaacacgtgaatatgttgccataaaagttgttcgcagtacccgcaagtaccgtgatgctgcaataattgagatagatgtgctcaatcgtctggcaaaaaatgaaaaatatagatctctatcattcgtattgtatccttcctcggattgcttcttttgttctactacaaatatgctcaacatgacagggagaggtctcgaggtcaagcctggacccactgtcaagtgtgtgcttggacatgactttatcctgcactttctagtgtaa

SEQ ID NO: 93711 - DNA, 2154 bp, Zea Mays
gggtgcctgtgctcatgccattgccattgccattgccatgctgcgtgccgctgttgcccgtgcttcacctgcgctgcgcccccctgctccactccatcctagtagctctacagcttcgagtagctcgctctcactcgcgctctctaccgctccggctcgctgagaccctgaccctgtgtccctgtctatatatacacgcgcgccccctttccgggcatcccttttcctcccgcccgcgcccccgtcttttcctttccgcgtgccctaatttctcgctgcgccttgtcccccacacctccctccctccgccgctggtgctctctcctcctatacatacaaacacatacacacaagctcgctcgctcgctcacgggctgtgagagaggccgtggaaaggaatctttcagctcacacctccctatccctccctccctccctcccttctcctcctactgctactgctcgccaggtcccctcgctcgctcgtcgtcttcaacctcacacaattatttgtgctcccgctccttccgtccgtccttcctcccccctcccctctcccgctcctgctgccttgcctctcagccgagggacgccaaggtctctgccaggatggtgtaggccgtgcctctcgcgcattatgaggtgtggtggtgagggatgggcgatggcctttgcagatgaaggagcgacagcgctggcggcctgaggaagacgccgtcctgcgcgcctacgtccggcagtacggcccccgcgagtggcacctggtgtcgcagcgcatgaacgtggccctcgaccgcgacgccaagtcgtgcctggagcgctggaagaactacctccgccccgggatcaagaagggctcgctcaccgaggaggagcagcgcctggtgatccgcctgcaggccaagcacggcaacaagtggaagaagatcgccgccgaggtgcccgggcgcacggccaagcgcctcggcaagtggtgggaggtgttcaaggagaagcagcagcgggagctgagggacagccgccgcccgccgccggagcctagccccgacgagcggggcaggtacgagtggctgctcgagaacttcgcggagaagctcgtcggagagaggccacagcaggctgccgctgcgccgtcgccgctgctcatggccgcgcccgtgctgccgccctggctgtcgtccaacgccgggccggccgccgccgccgccgccgccgtcgcgcacccgccgccaagaccgccgtcgccgtccgtgacgctcagcctcgcgtccgccgcggtggcgccgggcccgcccgcgcccgcgccatggatgccggatcgcgccgcggccgacgcggcgccgtacgggttcccgagcccgtcgcagcacggcggcgccgcgcccccgggcatggcggtcgtggacgggcaggcgctggcggagctcgccgagtgctgccgcgagctggaggaggggcggcgcgcgtgggcggcgcaccggcgggaggctgcgtggcggctgaagcgcgtggagcagcagctggagatggagcgcgagatgcggcggcgcgaggtgtgggaggagttcgaggccaagatgcgcaccatgcggctggagcaggcggccgccgcggagcgcgtggagcgggaccaccgggagaaggttgccgagctccgccgcgacgcgcaggtcaaggaggagaagatggccgagcagtgggccgccaagcacgcgcgcgtcgccaagttcgtcgagcagatgggggggtgctcccgttcatggtcctctgccaccgacatgaactgttgaactggacaaacgagccgctgaccacaccgtcgctagctatcgcgtgctacgtgctccggttcacggctttcttgcattctgggacgcgacttgtaaacgccatggattttcttgctcacgttcacttccgctttctttctttctttttttcttttctttttatttacaactgttgttacggtcggttcagtgcttctctctctatctactagtagttgatcagagtcaagaaatgtaatgctgccgttactgtcgtagtttcatcctctctaaacatgcgttctgtctgtttttgatcatgccaagcttcaaccttagcactgaataaatagaacgagaaaaaaaaatcagacaaagtttcaaa

SEQ ID NO: 93712 - DNA, 1163 bp, Zea Mays
gggtgcctgtgctcatgccattgccattgccattgccatgctgcgtgccgctgttgcccgtgcttcacctgcgctgcgcccccctgctccactccatcctagtagctctacagcttcgagtagctcgctctcactcgcgctctctaccgctccggctcgctgagaccctgaccctgtgtccctgtctatatatacacgcgcgccccctttccgggcatcccttttcctcccgcccgcgcccccgtcttttcctttccgcgtgccctaatttctcgctgcgccttgtcccccacacctccctccctccgccgctggtgctctctcctcctatacatacaaacacatacacacaagctcgctcgctcgctcacgggctgtgagagaggccgtggaaaggaatctttcagctcacacctccctatccctccctccctccctcccttctcctcctactgctactgctcgccaggtcccctcgctcgctcgtcgtcttcaacctcacacaattatttgtgctcccgctccttccgtccgtccttcctcccccctcccctctcccgctcctgctgccttgcctctcagccgagggacgccaaggtctctgccaggatggtgtaggccgtgcctctgtaagttcttcgtttcctagctttactatcaacgcgcacgtattagttcactcgttcgttcgtctctggttgtgtggattattggggaggagtagcagtagtggcagtctgatctggtttagcatgtcttcttgcattcgggttgttttttacggcacctcctacatagtagcagtagcagtactgtggtagagatgttgatttgtgacaaggattgaccttggactgaaggttgatggacaatacagaggctagtacattttttacagtgaaatctactgtgtgggttaaactcgggtggttactcactgctctgtcgtagtattaactggtcaagtaaggaactggaggaattaactccttttcttctgctcatactggagtaggtcatgcacggcagtgtaaatgttgcctggagccagctgcagatcatcctgtcacctgagtaaattgtggcctaacaactgcacgtctctatcccaccgtttattatttcaaacacatgtcagggtcagaacagtgttgtgtacgtcc

SEQ ID NO: 93713 - DNA, 1221 bp, Zea Mays
tagatatacttttgtaattagatggaatgtttgagtgcttaccgtggagcctgtttatgccttccgtagtttaatttattctgctatggttagtccacttcatcaaaatgagaaacattaacttgtttttatgtgacaaggcatgattggtcaggacatattagttagccttcatgcgccatttctcttgtgcaccttattagttttacatatcatttttacattttcctgctagtcttctggtactatgatgactgctatcaagtgcctttatcaaatatcgctgtaatacatgggactgatatgtctgcaccaaccaataaaattctagatctgtttccgcttttcatagatgatgtgtgtatgttaaagccctctttctttaaaaaataaaaaaatgcttcatgcacaagtgccttcgaaaatcacgaatagcatctcaggattatgtatccaatatgaaaattttcttgtgaaaagttgaagcatgaaatttcctcttgccgaggtaccaaaagtactgatagcttctcatcttccatgtaggtcggtctcgttctcgctctcctcgctatcggggccgtcctcggtcgagatcatactctcctgctccaaggcgggggaatgactactctgcctctccaaggagacaggaagcccatcgctcatctcctcccaggcgcctgccaaaggagcatgatgaagataagaagcggaggtcctactctcctgccagtagagatgatgctgacaatgtttatgagaagaggtcgcccccagcagacagcgatggatctcctctgcaccgcaggtcccccaaggagtactcgggctcacctcctggatcccgctccaggtccgccgacgattctcctgttgccagtgactgatcgaccgatggatgctacaatatgaatggtatgcgcatgcggtcatcagtcctatgtctttgtcagaccgagctcactaaacttacccccctttgggggtcgatgttgtattgctaagttccgtttgtgctaagtattagcgcatactgctagactgccactgtcgtctgtgctatgcatgcttttgatctcgagtgatgtttgaggaaccagtgatcgtgttgatggtgctgaacattggaacctgcagtacagtgtagcatgatgcttgcttgctgggccacggcccgttcactgggacctgttgcgtttccgtctttcgagtttgatt

SEQ ID NO: 93714 - DNA, 1060 bp, Zea Mays
acggcccatcacccatcacgtatcgctccctccctcggccctcgatcgtacggcgcgagcgttgcgctccacgccttcctcttcctcgtctggcatcgcgaaccgccgcaccccacccacccgcccacaggccacagcccacccccttctccaggtctctccccggcggcggcgggtgcggttctccggccatcaccgtgcgcaccaggaaaaactatgaggaggtacagccccccttatcgcagcccccccaggaggggatatggtggcagaggaagaagcccccctcctcccaggaggggatatggaggacgcaaggagggtagtggaagccttttggtccgcaacatcccattaagtgtcagagcggaggatcttcgagttccttttgaaaggtttggccctgttcgggatgtttacattccaaaggactattactctgggtaagttgtactaaatcaccatattctgtgagttatgtcttaattcctcaaaaagatagctattgctgtttctataatgtttggagctttaaatagttggagacctggctagtttttcttggtcataatcaacaacaagaagaacatcaaagctttttatcccaagcaagctgggtatgctagagttaaaaatccaatagaacccacaagtcaaggttcgggcacatggatgggtatatcctatcatctcaagtctcttttcattgcctctttccatgtcaactttggttttcctcttcctctcttctcgttgcttcgtgccttaggatcccactacgtactggcgcttctagagggtctctgttggacatgaccaaaccatctcaaccatagttattaaggcggtaaggcgaccgacccccttttacctttcatcgggtaaagtgtaaggtgaggcaacacctcatttatatagatataaatataaataaaaaatagaccaaatattatatatatcaataattcaaagttaataagcaatctagcacaattgtaaagtctattaggcccatttcgacatagtagaagagagaaataggaaaacagaaaaagaaaaa

SEQ ID NO: 93715 - DNA, 602 bp, Zea Mays
acggcccatcacccatcacgtatcgctccctccctcggccctcgatcgtacggcgcgagcgttgcgctccacgccttcctcttcctcgtctggcatcgcgaaccgccgcaccccacccacccgcccacaggccacagcccacccccttctccaggtctctccccggcggcggcgggtgcggttctccggccatcaccgtgcgcaccaggaaaaactatgaggaggtacagccccccttatcgcagcccccccaggaggggatatggtggcagaggaagaagcccccctcctcccaggaggggatatggaggacgcaaggagggtagtggaagccttttggtccgcaacatcccattaagtgtcagagcggaggatcttcgagttccttttgaaaggtttggccctgttcgggatgtttacattccaaaggactattactctgggatcccactacgtactggcgcttctagagggtctctgttggacatgaccaaaccatctcaaccatagttattaaggcggtaaggcgaccgacccccttttacctttcatcgggtaaagtgtaaggtgaggcaacacctcatttatatagatataaatat

SEQ ID NO: 93716 - DNA, 2306 bp, Zea Mays
agctacactgggcttaagacatcagtagggcaacgtgatttctgctccagtaatctttctgcacaagggcctaagagtaagagccaatatgttccaaaacaagcacaaggttcaaagtttgtgcctcggaataatcattggccgaagcatgattacactcgcaaaatttttgttggaggactcccaccttcagtagactcagaataccttattgaattcttcaatgctgagtttggtcctgtggaggaagcagtagtcatcggcataccaattggcaaccgagttcagtcccgaggttttggctttgtaaaatttgagagagaagaggatatgataagtgcaaaggaagctcatcatgtttacatgcttgggaagagagtggaggtaaaggatgctgttgctagagcatacttgcctttagaagaccaaagatatacttctttgaggcaattcatcaaggagcggccaaagatccacagggtgctggatggtgaactgactgaggaacacaacatccagaagcggcgaccattgccagaaaagtgtcttccatcctggttctttatattcaggaagtggttacctggatttcttgaagatgaaacagcacgacttagaggagagaggtatccgttgagctccctgaagggtgatttcagagcgacttgcaggatggagcttgatcacaccgcacttggttatcctaagctaagtgactttatccgctccctccctggcatctgcagaatgtgtgtagttcctgttggaagtggacctgcaacgcacatggtcctccttccaccgctctcacgaccgaagtatgtacccctgctagagccttgttcctttgatcatgacgagcttgcagaatcagtatcagatcagcactccccacgatcaccacttaacactaacatcgcggatgactccccacgtaacactgacagccagcagggtgatgatgcatgcagtgagaccaatgttcagatccagcaagttgatgatgcatgcagtgagacttgtgttcagagtcagcatgactatgggaaaagccagcaggatggaagttcctccgacaatggtagcttactggacgatattcctgccagtactacaaagcttgatctgattgagtctgtaacttcagtaaagcctgctttgattgaacctgtacttccaagaaagcctgatctaattgactctgtacctccaagcaagcctgatttggttgagtgtgtacctccaaggcccaaattgattgagtccgggtttcttcctcaaaagaatgaatccgggcctgtacagaagcctaatttgcttggttttggaccttcaagaaatcttgagttgattgagtccaggccttcagcatgcttcattgatagtccttttgaaaggacagcagttactcctagcagctgcgaaggtgaaatgagattctctttcttccagtctcagtgggacaagtacctggcaccatatcccaggagtgactcctgcatcatatgtcgatcttgtgaagctgggatgcaacttgttccctgctttcataagatatgtgttgcgtgcatgatgaggtgcaatgtcagagcatgtatggtttgtggcacttctgtaagtggagttaagtcatcccctgcagtggatgcgacatacagatacatgggactcaccgagcgtgttttagatctgagatgccagttgatggtggtctgccgtggagctgaggcaatagtcagatgctcaccatgtatgcacaccatcgcttgccggggttgcttccttgcctcagtgacactactgaaatcctgcaccacctgtggctgcatggttgaacacttcaagatcgtttgacaagacttatctcccaatacacagtagtattactaagcaatctaaggtatagaataaagcaagcagtcctacgacctgaaggggagatctgattactctcgttcggttttgccacacttgtgggatgcgctaacaggctattttggtagtggtataggcaccctcgctcttgtgagcctgaggtgctctcttttgctccctttctgttcttccgtagaaacactttttcagtatcagacatgctcgatttatatgctattgctatttctgcttctatgagcttgttatggtatggcactagcaagttctcggtaatcttccatgtaaaacccctcatctctgttatatggcactttttctatgtaaacctgtgtaagtactactagtatcaaaaatggatcttttatgcatcacctctggggttgcagtgcttataattcgctccttttact

SEQ ID NO: 93717 - DNA, 279 bp, Zea Mays
atggcgcgcgacccgcgtgcatcccctcgtcctcgccgcaatccacacccttccttccatggagacgacaccaacccgcatgcatcccctcatcctcaccgctatccatgccctgccttccatggagacgacgtcgacccacgcatcctgcagtcaccgaccaacctgcacccaaatcctccactgcttgggtataagaatgacgatgcctctgaagggaagccataccaggtcgttttaggtaccatggtgcagttcaaggtgatccgatccccttag

SEQ ID NO: 93718 - DNA, 458 bp, Zea Mays
aggtgtcaggcgatcctcgcattgaatgcgcctgtgatacggtcggttggagaggcgatttggccaaggttgcttctcgacgaagcctgctcgagctgggcctcgggcgtgccgagggtgcacccactgcctgaggaggctctcgggcgagacgtaacttcgcccgggactatagttcccgcccgaggctgggctcaggcagggcgagatcgctccccttgggtagacgaagccttgacctgaaacgcgtccatcagtctttgcggtttgtgctgatggtggttaccaaccgtgtttaggagtgttgggggtacccctaattacggtacccgagtaagataagataagatttagctttttattacttaaaaaatatttttagtagttttctttaatttatttgttatatattatattagtcgtaggtatatattggcatgttccttgtttttcttttt

SEQ ID NO: 93719 - DNA, 130 bp, Zea Mays
gaaaattcaattaaaagaacaaaatctaatagttatagcaaacaattttataattatgctaaaatggtacatgtaggtctacatagtgtagcaacataccacaaaaagtttggtaaggaaaataaaaaaa

SEQ ID NO: 93720 - DNA, 309 bp, Zea Mays
atggaaaaatgtgttagggaagggacaacctctcttgacgactccgacaacatccctgaggcactcccagctcacttgtgtcatgtcctaggtgtgatcgctaccctcgtggcctgtggccatattcccacgatcgatgacttagagttcatagggatggttgatggcaatagggatcttatctttgacgccctctactcagacttgggctcaaatccttgctccctgacgagcagcaaggatagtcccctacgacaaagaaatcgggggccgcccgacccccatggccctaacggcccttacgtgtga

SEQ ID NO: 93721 - DNA, 264 bp, Zea Mays
atgaacatcaacgcgaacggcggcatcctgtcgtacgggaacatggaggggtacgcccgttgggtggccacgggcgtggcgtcggccttcttcgcgtccctggagcgcttctcctgcatccacctccacaccgccgaggacgacggcagcgacgaggaccccgacgaggccaaggaccgccccctcatcttctcccgccccgacgccctccccgagtactactacagccgttccgcatcctccgtctccttcgccaagatgtga

SEQ ID NO: 93722 - DNA, 1818 bp, Zea Mays
tgcatgcgcgtgcactcagcactctggacggccgagcccgacatggaccgcgacgaggaggtgggccacggcgaccgctcgctcctattcatcggcgatgaggacgatctcggcgtcgaccgggacggcggatccccgccgacctcctccgacgatggatcattctccgaccggagcgacgccgagacacgcgccggccatgtccggcgtcgcgacggcggcgagcgtgaggacacgcccgaggacggccagaatggcgcgtggccgcagagttacaggcagtcgatcgacatgctgagcgcggtgccgtcgccgacgatgaactcgatcatggcagcgagcccgagcctgaccagattcggcagctccttcctcaaggccgggagctccttcttcctgaggaaaggcgagggctcggggctgccgctcaccaggccgctgctgccgccctcgctcccgcagctgtcgcagtcgtcgttgcacccgcagccgcggcccgtgaagcagtccacggacagcctcgcccaggcgccgcggtggccggctgcgcacgaggcggagctgcccgagagaccctccaggcaatgcctgaaatccgattatatcgagcttcctccgcctgctagcaagtgcagcaggaaccaatcaatcatcaatgggttcaatgtgctgtgcggcgttggaattctcaccacggcttatggaatcaaggaagggggatggctaagcctcctgctgctccccttgctgggtggcagctcgtgctacacgggcttgcttctcaagaggtgcatagacagttcgcccaacattgagacatacccagacattggacaagtcgctttcggaatctttggtcggatctttgtatcggttgtcctgtacatggagctttatgcaagctgcgtggagtacattacgctgctaggagacagcttgtcgtcagtgtttccctcagcgcatttagctttcactggcatcgacctgaacgcgcacaatctctttgcaaccacaatggccttggcaatcctcccatcagtctggctcaggaacctcagtctcctctcatatctttctgctggaggcgtgatcgcgacgatcacggtcatcgtctgcctatgctgggttggcatcggagaaggaattgggtttcgcttttccggtgctgtagtgaacgtgacccaccttccagtggcactcggcctgtatgggtactgctactcaggacactcggtgttcccaaacatctactcgtccatgaaggagcgctcgcagtttccattcgtgctcatgttctgcttcacggtggtaacgcttgtgtacgccggagttgcggtctcagggttcctgatgttcggcgagtccactatgtcacagttcaccctaaacttgccacagcagtacatcccatccaagattgccatttggatgacggttgtgaatccttacacaaagtatgcactgacgatgacgccggtcgccttgtcgatagaggaagccctaccaaagaagatgcagagttacctggtcggaatgctcgttaggacatgcctcgtcctctcaaccgttgcggtggctctgcttttcccttactttgccctggtgatggcactgcttggatccgtgttcacaatgctcgtggccttgatactcccatgcgcatgctacctctccatcaagaagggcgcagtgcccttgtgggagatcatcctgtgcataatcatcatagcgattggcgttgtgtgcgcgtgcatcggctcatttacctcgatcaaccagatgattagcagcagatagtgtctgcgtagctgttgcaga

SEQ ID NO: 93723 - DNA, 273 bp, Zea Mays
gatcaactcttttgcagattgagcctcaatggaagtggtcgtcgtaatgagaatcatcctggtggtacaggtacaggccaaaaccgaaccgtgcgcaggctttgctgaatgcagcttcctctgcggatgcaacaacatcttccctgcgcccctcatggaactgtgttgtgcccgtcgcatctctgtatgcctaactcaaaaagatgcaagcgcatcagttaataaagacgattgttttcaatgtattttagttgatttcaaaagaaaaaaaga

SEQ ID NO: 93724 - DNA, 241 bp, Zea Mays
gttcttagttttggtagaattctttgtcttaaagctgactggaaatctcagcttaggggccctgatgctcggggaatcaaggaaatatggcacaactattgcccctggtctgtatgcaccagttcatctgcatttctttgttgctcgtatggacatggctgttgattgcaaactgaatgaggctcataaccaggtgggggttaccatctatttgcacatcttttaattgatcagattgccc

SEQ ID NO: 93725 - DNA, 2559 bp, Zea Mays
cctcgtgttactatctgtccagtgccattaataataactttatgttgttggtgagccgcagtgaggcaatcaaagccacttccagtctcagagtcagacccaccactcctctccctttcttcctctacctacaaagccaccagtccacctcctcctactccattcatggttcatctccatccccattaattcctcccctcactccatcactcccatgtcaagctccaggaaacccaagactcccatcctcctcttcttcctcttccttctcgccagcctcgccttctcccaagagttcacctacaagggcttcagcgccagtggccgcggcgggagcccgaacctgaacctgaacggcacgtcggcaaccgagatcttgcccagcggcatcctccgcctcaccaacgagacgtcccggctcttcggacacgccttctacccgaccccgctgcgcttcctggaccagaagaacggcaccgccgtgtccttctccacgcagttcgcctttaccgtggtgcccgagttcccgacgctcggcggccacggcttcgcgttcgtcgtcgcgcccgacccgcgcatgtccggtgcgctgcccagccagtacctgggcctactcagcgccgccgacgtcggcaacgccaccaaccacctcttcgccatcgagttcgacaccgtgcaggacttcgagttcgacgacgtcaacggcaaccacgtcggcgtcgacctcaacagcctcatctccaacgcgtccgccaaggccgaccctttgaacctcaagtccggggacaccaccgcctgggtcgactacgacggcgccgccaggttgcttaacgtctccatcgccaacggcacgttggggaagcccaccacgccgctcatctccttccgcgtcgacctctctgggatcttccgcgagcagatgtacgtcggcttctcggcgtccacgggagtcctcgcgagctcgcactacctcaggggttggagctttcgcctcggcgccggcgccgcgccggcgctggatctctcgtccctgccgtcgctgccccagctcaagagctccaagaaccggacctcgctcatcctcgccgtcgcgttctcggcgttcgtggcgctcgtcgtgctcgccggcgccggcgcgtacggtgcgtaccggtacaagaaccgcgacatcatcgagccgtgggagctggactacggcccgcatcggttcaagtacgccgaactccgccgcgcgacgcgcgggttccgcgagcgcgaggtgctcggatccggcggtttcggcaaggtgtaccgcggcgtgctccggaaatccggcgagaccgtggccgtgaagcgcgtgaaccacgagtcccggcagggcctccgcgagttcgtggcggagatcgcgtctatcggccggctccgccaccgcaacctggtccagctccagggctggtgccgccgccgcggcgaccttctcctcgtctacgactacatgcccaacggcagcctggaccgccacctcttcggcgaccacctcaaagcgtcgcgcctgacctggccggtccgctaccgcatcctccgcgacgtcgcgtcggcgctgctgtacctgcacgagggatgggagagcgtcgtcctccaccgcgacgtcaaggccagcaacgtgctcctcgacgccgacatgtcggcgcggctcggcgacttcggtctcgccaagctccacgagcgcgggaccaacccgagcacgacgcgcgtggtgggcaccctggggtacctggctcccgagctgacgcggacggggaaggccacgacggctgccgacgtgttcgcgttcggtgccctggtgctggaggtggtggccgggcggcatcccatagagccccgcgcgccgcccgaggagctggtgctggccgagtgggcgtgggagcggtacgcggcgggggaggtggagaaggtggtggacgcccggctcgccggcgcgtacgacttcgcggaggccgccgcggccgtgaaggtggggctgtggtgctcgcacccggcgccggcgacgcggcccaccatgcgggaggtggcgaggtaccttgacggcggggatgccagcgaggtgccggagcctcctcccccgcctcccatgccgccggcatactctggcgaggtcgggttcgacgatttcgtgcactcgtacccgtcgtcgtcgttcgagcgcgccgccgcagctggcggcggctgggacggcgggacccagatgtcggtcgccacgttccccttctcgtctctgtccatgcggtcatctcacgtcagcacgtgatgcatcgaaattcctgggcccgcttgccagtaagatgacgacttcgtcaaacataatagtgtgaccttggagctaacttgtttatatctgagctgtctattcttttactgcactcagtaacggcaaatggctgagtgacagttggtagcctcttatttaatctttttctttggagtttttgaggagtgtttggttcgaaattaagtatatgtaaaatcgaattttgaagggtaaggataagtattaaatatagtctaattacaacactaact

SEQ ID NO: 93726 - DNA, 4607 bp, Zea Mays
gcacactcagaccagaccgccgccgccgcgccggtgatcgagtctcgtcggcgctaccttcacgccacaagacaataagcatcgacagccaggttcggctccaccaaacgtccttgctgcaaaaacatcatcttttatacagtcattgtgcgcactggcccctttccactggcaagaagaccctgaagtcatcgatgtgcggtattgcccttgtcctcgccagtgaccgccttgtcatcgttccctgtgccactgcaactactgccgcattggagacccagcactcctgcaagaggaagggcgtgccagatgagctgaaggaggccctgcgccggcggggccctgatagcctaggctacagaagtcgctgccttcttgctgatggcacggttgttgttggtgatggttgcaatgatggagtagagggtaaaatcggtgtgagtgactctagtgttgctgatttgttcttcatcggagcaacactgcatcttaggggagctaagctggtttcgcagccgctggtggcccccagtggaagtgtctttctgtataatggtgagatatatggaggaattcaggttgcggatgatgaaaatgacacccaagctcttttcaactctctggaatcttgttgttcatgtgattgccatgctcttggtagagataaaacatgtacttgttgtggtactgggagtggtgccaaatcagttttgcaagttctttccacaatcaaaggtccatgggctttgatatactggcagatgaagtcaaatacgatttggtttggccgggatgcatttgggagaagaagcctcttggtacattggcccacagctgatgattctcacttcatattatcatcagtatcacccccttcatttgcaaagattcactctgatcaaacagtgtcagatcgtgacatgtctaaccatactaaagctagctactgggaagagcttccttgtgggatatacagcatgcatatgaaagacattggaaagcatggtgcatgcatgaaggaagggtggattgtggaagttaacacacataaatggatggcttcttcattgaatggattgatcaaatgggagaggaaactcacagttcctaccatggagaacattcctgttgacagagggaaccatcagttgtctcagagcttcataagctcaagagaacctgaagaaaatacgaataatgggatcacaaaggcagattttctgtcagattctagtttatgtgatgcaaattgcataacacagtcagcacatagagtattggttgcattaagggaatctgtaatgctgcggactaaaatgaacacactctttcagggtactctggatagatctgaggacggagagtcagccccaatagcagtcctcttctccggtggcttagactccatgctacttgcagcactgctagaccagtgcattgattccaaatggataattgatttgttaaatgtcagttttgatgggcaacttgcccctgataggatttctgcaatagctggactgaaggagcttcagaggatatctccgtgccggagatggcgtcttattgagattgacactgctttgacagacttgaacggggaaagtgaacatgtgatgtcactcatacacccttcaaatacctttatggtggaacgcattggatcaggagatgagactagatgtgcagagaatatggaaaaggaatatgggaagagatgataggtgcatctctgatcatggcaaggaggcccgtttcccatttcttgacgagaacgtgataaaaactttgttggaaattccgttatgggaaattgctaagcttgatgaacctgttggaaggggtgacaagaagatcttgagagaggttgcaaggctgctgggcctacaagaagctgctcttcagccaaagcgcgcgatccagttcggttcaaggatagcgagggagtcgaaccgcaagaacttcggcagcaacagagccgcgaaccaggcatcagcaggcagcgtgcagattcaccagagtccagcttctccagtggcgtcggccacacgccagccatttcttaccaacaatcagccatgaacacgcttagctgtgacaagtgccgcatggtttggttgatggagcatcattatcagttgttacggttcatcacaaattttcaaacgattcattgtcagctggatggagcatccatcatttgttatgtatactagccctgaatcctgatcatgtaacagcaacttggacgtggttgaaacctaaaagtggccggctgctttgtgtcaggctgatgtggcgcctgcgttgggccggtttagacgagtaggtccaacctggatctgaccccacatgtcagtgactcaactgcaggggatctttctccggtctggacctgaccaaacaatgctggatgtaaagcagtcgtcggtgtcaatattttttaaaaaatcctatatttctttagaatcagctcgtacttctataatctcttatctactactataataaaaatatttatataaaaaataagtatataaaaataagtatttaaacattgatggttggctccatatttatacacttaatcaatagaaaatatatattttgtgttaatgttataccccggagtcgagtggcgagtccaatctcagactagccacgtgtacggcgtgcagtccttgctacgcgcacccctcctaccgcacacgcgaatccagccagcccacccaccgccgccgcctgctcgtccgcctctataagatgagacctgcccaccgccatggcgccatcccctccgtctctgacccgcctacccatccccaccatttgccgcccaatccgccccgccgcgctccgccttgcctcgactcgaattcttaccaaccgtttgtggcttgaatttgaattccagctcgaatcactcaggcggccagccgggagcgagagcgagctggaggagctcgattcgatgcgttgctgagcgtgggtcaatcgattcgggtcgggcggtggcgcagtccgagagatctgaaccctagcggccgtctgcccgtccggatctgtgaccagccctgctcggtgcttcggcggcatgagtgcctggaaggcgtggggaggagaagcggcggagatatgagcggaggaggcagcggcagcggggacgagttcgggcgggcggtggcacgcgccgcggttgcgcaggcgctggaggccgcggggttcgactgcgcgcaccgctccgcggtggacgcggtcgtcgacgtcctcttgcgctacatcacccacctgggccggtccgccgccttcaacgccaacctcgccggccgcgcgctcgccaacgaactcgacgtcatccaggtgctcgaggaggtcggcgccgacacggacggcttcgcgggcgcggcggacacgggccgctgcctcgttggttccggcgtcgtcagggacctcatggcgttcgtcgactccaaggacgaggtgccgttcgcgcggccgctgcctaggttccccgtccagcgcgtgcagccgcagccctctgccagcccggctgcggcggcggcggggagggagactgggttgaagcacgtgccggagtggctgcctgcgttcccggatccgcacacctatgtgagcacggaggtgtgggatgagccttcggcgaccaaggacagggtggacaaggtggagcaggtgcggcaacggaggaaggccgagaaatccctgctcagcttgcagcgaaggctggctatggcaggcgcggatgggtttcatccagcggttgcattggcggaggatagcgcagagaaggggaaggagatacaggcagctgggacaaagagaaacccgtttcttgagccagcattgccgcctggggagaaggatgtatctgaggttggtatgcctccggaaaagaagaaactatctgtcctcgaggcatttgcgccagctatgcaatctagaaccatcgtcagggatgttgatgctggggcaggattggatgaaaaccaaaggagcattgttcccaaagagagggctccggtgcaccttaagattggatttggaaagaagccgttggcagcagctctgaattcaagaaccctggacctgagagaagatccatccttcttgaaagaggaagcaaaggatgacaagaagcggagagcaggcatgatattaagggcatcaatggagaacccacaagagcttcctcagctctaaagttgtttgcggaggaagtgccgtacccagagtggagttgcatcatggtgtaattgtggaacttcagtttccagaatcttgaggccatgttccctgatacaaccttctcaggatcaccatgccctgatacaacctgcaccggactctcctgcctccacctaccgttttcctaaaacaccatgcgctgatagattctgcagcactgtaactgaagttggaagttccaccatctcactgcgttgaagttggtggttgtgctggtatttcacctttaactgtaaggactaatttgggaacccaatttttccactggattttcattttcctaaggaaaattagttcattttcccttgagaaaataggaatcccttagaaaaatatagttt

SEQ ID NO: 93727 - DNA, 4798 bp, Zea Mays
gcacactcagaccagaccgccgccgccgcgccggtgatcgagtctcgtcggcgctaccttcacgccacaagacaataagcatcgacagccaggttcggctccaccaaacgtccttgctgcaaaaacatcatcttttatacagtcattgtgcgcactggcccctttccactggcaagaagaccctgaagtcatcgatgtgcggtattgcccttgtcctcgccagtgaccgccttgtcatcgttccctgtgccactgcaactactgccgcattggagacccagcactcctgcaagaggaagggcgtgccagatgagctgaaggaggccctgcgccggcggggccctgatagcctaggctacagaagtcgctgccttcttgctgatggcacggttgttgttggtgatggttgcaatgatggagtagagggtaaaatcggtgtgagtgactctagtgttgctgatttgttcttcatcggagcaacactgcatcttaggggagctaagctggtttcgcagccgctggtggcccccagtggaagtgtctttctgtataatggtgagatatatggaggaattcaggttgcggatgatgaaaatgacacccaagctcttttcaactctctggaatcttgttgttcatgtgattgccatgctcttggtagagataaaacatgtacttgttgtggtactgggagtggtgccaaatcagttttgcaagttctttccacaatcaaaggtccatgggctttgatatactggcagatgaagtcaaatacgatttggtttggccgggatgcatttgggagaagaagcctcttggtacattggcccacagctgatgattctcacttcatattatcatcagtatcacccccttcatttgcaaagattcactctgatcaaacagtgtcagatcgtgacatgtctaaccatactaaagctagctactgggaagagcttccttgtgggatatacagcatgcatatgaaagacattggaaagcatggtgcatgcatgaaggaagggtggattgtggaagttaacacacataaatggatggcttcttcattgaatggattgatcaaatgggagaggaaactcacagttcctaccatggagaacattcctgttgacagagggaaccatcagttgtctcagagcttcataagctcaagagaacctgaagaaaatacgaataatgggatcacaaaggcagattttctgtcagattctagtttatgtgatgcaaattgcataacacagtcagcacatagagtattggttgcattaagggaatctgtaatgctgcggactaaaatgaacacactctttcagggtactctggatagatctgaggacggagagtcagccccaatagcagtcctcttctccggtggcttagactccatgctacttgcagcactgctagaccagtgcattgattccaaatggataattgatttgttaaatgtcagttttgatgggcaacttgcccctgataggatttctgcaatagctggactgaaggagcttcagaggatatctccgtgccggagatggcgtcttattgagattgacactgctttgacagacttgaacggggaaagtgaacatgtgatgtcactcatacacccttcaaatacctttatggatttgaacattggtattgcactctggttggctgctggtggtgatggttgggtggatggaagtatatgtcgtatgcaagatggttctcgctataagtacaggtcgagatctagagtccttatagtgggttctggggctgatgagcagtgtgctggttatggtagacatcggactaaatataggcttggagggtggaacgcattggatcaggagatgagactagatgtgcagagaatatggaaaaggaatatgggaagagatgataggtgcatctctgatcatggcaaggaggcccgtttcccatttcttgacgagaacgtgataaaaactttgttggaaattccgttatgggaaattgctaagcttgatgaacctgttggaaggggtgacaagaagatcttgagagaggttgcaaggctgctgggcctacaagaagctgctcttcagccaaagcgcgcgatccagttcggttcaaggatagcgagggagtcgaaccgcaagaacttcggcagcaacagagccgcgaaccaggcatcagcaggcagcgtgcagattcaccagagtccagcttctccagtggcgtcggccacacgccagccatttcttaccaacaatcagccatgaacacgcttagctgtgacaagtgccgcatggtttggttgatggagcatcattatcagttgttacggttcatcacaaattttcaaacgattcattgtcagctggatggagcatccatcatttgttatgtatactagccctgaatcctgatcatgtaacagcaacttggacgtggttgaaacctaaaagtggccggctgctttgtgtcaggctgatgtggcgcctgcgttgggccggtttagacgagtaggtccaacctggatctgaccccacatgtcagtgactcaactgcaggggatctttctccggtctggacctgaccaaacaatgctggatgtaaagcagtcgtcggtgtcaatattttttaaaaaatcctatatttctttagaatcagctcgtacttctataatctcttatctactactataataaaaatatttatataaaaaataagtatataaaaataagtatttaaacattgatggttggctccatatttatacacttaatcaatagaaaatatatattttgtgttaatgttataccccggagtcgagtggcgagtccaatctcagactagccacgtgtacggcgtgcagtccttgctacgcgcacccctcctaccgcacacgcgaatccagccagcccacccaccgccgccgcctgctcgtccgcctctataagatgagacctgcccaccgccatggcgccatcccctccgtctctgacccgcctacccatccccaccatttgccgcccaatccgccccgccgcgctccgccttgcctcgactcgaattcttaccaaccgtttgtggcttgaatttgaattccagctcgaatcactcaggcggccagccgggagcgagagcgagctggaggagctcgattcgatgcgttgctgagcgtgggtcaatcgattcgggtcgggcggtggcgcagtccgagagatctgaaccctagcggccgtctgcccgtccggatctgtgaccagccctgctcggtgcttcggcggcatgagtgcctggaaggcgtggggaggagaagcggcggagatatgagcggaggaggcagcggcagcggggacgagttcgggcgggcggtggcacgcgccgcggttgcgcaggcgctggaggccgcggggttcgactgcgcgcaccgctccgcggtggacgcggtcgtcgacgtcctcttgcgctacatcacccacctgggccggtccgccgccttcaacgccaacctcgccggccgcgcgctcgccaacgaactcgacgtcatccaggtgctcgaggaggtcggcgccgacacggacggcttcgcgggcgcggcggacacgggccgctgcctcgttggttccggcgtcgtcagggacctcatggcgttcgtcgactccaaggacgaggtgccgttcgcgcggccgctgcctaggttccccgtccagcgcgtgcagccgcagccctctgccagcccggctgcggcggcggcggggagggagactgggttgaagcacgtgccggagtggctgcctgcgttcccggatccgcacacctatgtgagcacggaggtgtgggatgagccttcggcgaccaaggacagggtggacaaggtggagcaggtgcggcaacggaggaaggccgagaaatccctgctcagcttgcagcgaaggctggctatggcaggcgcggatgggtttcatccagcggttgcattggcggaggatagcgcagagaaggggaaggagatacaggcagctgggacaaagagaaacccgtttcttgagccagcattgccgcctggggagaaggatgtatctgaggttggtatgcctccggaaaagaagaaactatctgtcctcgaggcatttgcgccagctatgcaatctagaaccatcgtcagggatgttgatgctggggcaggattggatgaaaaccaaaggagcattgttcccaaagagagggctccggtgcaccttaagattggatttggaaagaagccgttggcagcagctctgaattcaagaaccctggacctgagagaagatccatccttcttgaaagaggaagcaaaggatgacaagaagcggagagcaggcatgatattaagggcatcaatggagaacccacaagagcttcctcagctctaaagttgtttgcggaggaagtgccgtacccagagtggagttgcatcatggtgtaattgtggaacttcagtttccagaatcttgaggccatgttccctgatacaaccttctcaggatcaccatgccctgatacaacctgcaccggactctcctgcctccacctaccgttttcctaaaacaccatgcgctgatagattctgcagcactgtaactgaagttggaagttccaccatctcactgcgttgaagttggtggttgtgctggtatttcacctttaactgtaaggactaatttgggaacccaatttttccactggattttcattttcctaaggaaaattagttcattttcccttgagaaaataggaatcccttagaaaaatatagttt

SEQ ID NO: 93728 - DNA, 427 bp, Zea Mays
atcacggttctgtaagactccacgcactcgtcgacacccggctgtcgatctccaccatgcagcaccacttcagacctctagcctcgtcctactctgctccagcttgcgtctaagaatagggtcgagtttgtacgccacctgctcggtaaaataaagtgaaccggtgagtgccattgtttttgtgaagtttgagttgaattactagctgttgatattgtgtggtggttgcaagcgctctatatcgaaggagggaattagatgaagaagaaagcgaagccgcacgacactcgtcacatattcgacgacaagctcgagccaggatttatcagcattctcgcgagtattgagtcacgtttgattatgttgatcacgtgatgtgaaggacaagaactggattaatctcaaggtgatgccgatgatgaacctg

SEQ ID NO: 93729 - DNA, 1014 bp, Zea Mays
gtaataaaatggtcctcttacacatttccaaattctagcctcgatctccagctgatatttaagtttttatttgaattttcgagtaaaaaaagaagagaaaaatgaaaggaagtgagagaaaataaaaatatcttgttgaaaatatcatccccaccgctgaacgcatctgcttcttatccccatcgcgtcttcttcctccggccgacagctctccccaccccgcgcggcagcttccctgctccctggccggctcttggcctcctctccatctcccgggtcgagctccttcccctccctcatttccctcaactctgctcactccatggtcgtcgatgctccctggccggcgctcgggcaccttcaacctccaaccttggagctctcacggccatctcccgccctcagcttcccatggcgcctgcccgacccctactcagatttcgtccgtgccgagctccctttgtcgcgcccggatctggtcaccgtcagccgaggaacaaccatcgggtcggcctcaccgtggccaagtctgtcaaccatgccctgtgcctcgttctcaggtcgccggacttcgacgccctgtgccccttgctcacctctctggttgtgctcgctgggacgtcgtgagctcgcaagacctctgcctcatcatcgtcctcgcctccggtcgtgcccctagtgcgcgtgccgccggttatctctacccatgcgcccctgttctcctctagttgagctcaatcctaagtgctcgcctaagttgtgtggccaagttccttttcctggtcgccgttggtgaaagccctgccatcgatctcgcccagcgcgcgcccagccgaggtacacgcgcgcggcctcctgctcaccagaatggtcctcctctgcttgaccctgcgtgccgccacccggagtcctgccccgacgcgtgcgctcctctgctcgccgcgcccctgtgagcttcctccgtcggccatgttcagacggcaccaacatcaagcgctcgtcctcggttccatg

SEQ ID NO: 93730 - DNA, 411 bp, Zea Mays
atggacttggtcggaaatactagaacaggctcccggcagttaagaacagactcacagaaataccagaacatgctctattctattcttttaaaaaggatcagctcaagaatgttcttcctggaaactataaggttaaggctggtctgggatagagcaaatgagttcattccagagaggtttaatttacagagacctgttccaaatgagtcaaacacagatttcaggtttattccattcagtgggggtcctcggaaatgtgttggagatcaatttgctctcctagaagcaatagtggcacttgcagttgtgttgcagaagatggatatgcagcttgtgccagatcaaaagattaacatgactactggagctacaattcatacaaccagtttgatatcaattggagttaaataa

SEQ ID NO: 93731 - DNA, 1086 bp, Zea Mays
acgcgccactctttctggcagccgccgccaggatgcctccactctttctccctcttctctcctccccttgctcttctctggccgccgccacttgccaggacttcctgcagcagagcgcccctgcagctccttgcacctgcatcctacgcgcgctccagccgaccacgcccaggaaccagtgcagcgctccatcatcagtaggtgactgacggcacatgcgccaccatgccaatcatccatatgatccgtctcccacatgcctgcccgccgtaggctgcaaacgggcagggtcgttgtgtctacgctgcggctgcggctaccgacggcgtcctgattggactattggagaggagaggaagccgtcgtgccgcgtgacaacaatgctgcggctggacggacgtgtcggcgagcagtccagcttgccgctgcgtgtccaaccccaaggtcaaggccggccgaggctccacaacctctcaactccataacagccagctgctcctcgtgacatgcgtgcacatgtgctgttagttgcactgcattatatgttgcatgtacgcacacaagccattgctgccattcctatcaataatctgcggttgttggatggagggtcgtctcctggggttattctatcgtttagccgtcctcttggcgagttcagatgaagccatggaatgtatatcggaagatgccagctgaatgtctccatgcttatttggatttccctctaaagtgatgaggaacaagtttgctaccgaggatgagtaagacaatgaagaatattgtgcttctgaagatgaggaattagatgatgaggatgatcaaatatttcattagatgcaaggtgcaaactcaccaaaatctacaaggcactttgctgaagcttcacactctaaacatgatgatctagctagctatctgtaaatgatctagttgtgaatgatattataattgtgatgcttttgtgaatatataattgtgttgcttttgtgtttatgtgatggatctatgactatggtataccgattaactgtgtgtctttatgatttgtgtataaaaaattgtgatttgtggtgcttaattaaa

SEQ ID NO: 93732 - DNA, 1135 bp, Zea Mays
acgcgccactctttctggcagccgccgccaggatgcctccactctttctccctcttctctcctccccttgctcttctctggccgccgccacttgccaggacttcctgcagcagagcgcccctgcagctccttgcacctgcatcctacgcgcgctccagccgaccacgcccaggaaccagtgcagcgctccatcatcagtaggtgactgacggcacatgcgccaccatgccaatcatccatatgatccgtctcccacatgcctgcgtatgttctttgcagctctcttgcctgacctgcctatctatctatgtttctttgtatatctgctaagtatctgctcggtcgtcagccgccgtaggctgcaaacgggcagggtcgttgtgtctacgctgcggctgcggctaccgacggcgtcctgattggactattggagaggagaggaagccgtcgtgccgcgtgacaacaatgctgcggctggacggacgtgtcggcgagcagtccagcttgccgctgcgtgtccaaccccaaggtcaaggccggccgaggctccacaacctctcaactccataacagccagctgctcctcgtgacatgcgtgcacatgtgctgttagttgcactgcattatatgttgcatgtacgcacacaagccattgctgccattcctatcaataatctgcggttgttggatggagggtcgtctcctggggttattctatcgtttagccgtcctcttggcgagttcagatgaagccatggaatgtatatcggaagatgccagctgaatgtctccatgcttatttggatttccctctaaagtgatgaggaacaagtttgctaccgaggatgagtaagacaatgaagaatattgtgcttctgaagatgaggaattagatgatgaggatgatcaaatatttcattagatgcaaggtgcaaactcaccaaaatctacaaggcactttgctgaagcttcacactctaaacatgatgatctagctagctatctgtaaatgatctagttgtgaatgatattataattgtgatgcttttgtgaatatataattgtgttgcttttgtgtttatgtgatggatctatgactatggtataccgattaactgtgtgtctttatgatttg

SEQ ID NO: 93733 - DNA, 1143 bp, Zea Mays
acgcgccactctttctggcagccgccgccaggatgcctccactctttctccctcttctctcctccccttgctcttctctggccgccgccacttgccaggacttcctgcagcagagcgcccctgcagctccttgcacctgcatcctacgcgcgctccagccgaccacgcccaggaaccagtgcagcgctccatcatcagtaggtgactgacggcacatgcgccaccatgccaatcatccatatgatccgtctcccacatgcctgcccgccgtaggctgcaaacgggcagggtcgttgtgtctacgctgcggctgcggctaccgacggcgtcctgattggactattggagaggagaggaagccgtcgtgccgcgtgacaacaatgctgcggctggacggacgtgtcggcgagcagtccagcttgccgctgcgtgtccaaccccaaggtcaaggccggccgaggctccacaacctctcaactccataacagccagctgctcctcgtgacatgcgtgcacatgtgctgttagttgcactgcattatatgttgcatgtacgcacacaagccattgctgccattcctatcaataatctgcggttgttggatggagggtcgtctcctggggttattctatcgtttagccgtcctcttggcgagttcagatgaagccatggaatgtatatcggaagatgccagctgaatgtctccatgcttatttggatttccctctaaagttagctttaaattatagcttatatctcacactaaaattttagagtttatttttgaagttctttaaatttttagagctctaaaatttactatgctatgaaattgtgtttcttaaggtgatgaggaacaagtttgctaccgaggatgagtaagacaatgaagaatattgtgcttctgaagatgaggaattagatgatgaggatgatcaaatatttcattagatgcaaggtgcaaactcaccaaaatctacaaggcactttgctgaagcttcacactctaaacatgatgatctagctagctatctgtaaatgatctagttgtgaatgatattataattgtgatgcttttgtgaatatataattgtgttgcttttgtgtttatgtgatggatctatgactatggtataccgatt

SEQ ID NO: 93734 - DNA, 1134 bp, Zea Mays
acgcgccactctttctggcagccgccgccaggatgcctccactctttctccctcttctctcctccccttgctcttctctggccgccgccacttgccaggacttcctgcagcagagcgcccctgcagctccttgcacctgcatcctacgcgcgctccagccgaccacgcccaggaaccagtgcagcgctccatcatcagtaggtgactgacggcacatgcgccaccatgccaatcatccatatgatccgtctcccacatgcctgcgctgcaaacgggcagggtcgttgtgtctacgctgcggctgcggctaccgacggcgtcctgattggactattggagaggagaggaagccgtcgtgccgcgtgacaacaatgctgcggctggacggacgtgtcggcgagcagtccagcttgccgctgcgtgtccaaccccaaggtcaaggccggccgaggctccacaacctctcaactccataacagccagctgctcctcgtgacatgcgtgcacatgtgctgttagttgcactgcattatatgttgcatgtacgcacacaagccattgctgccattcctatcaataatctgcggttgttggatggagggtcgtctcctggggttattctatcgtttagccgtcctcttggcgagttcagatgaagccatggaatgtatatcggaagatgccagctgaatgtctccatgcttatttggatttccctctaaagttagctttaaattatagcttatatctcacactaaaattttagagtttatttttgaagttctttaaatttttagagctctaaaatttactatgctatgaaattgtgtttcttaaggtgatgaggaacaagtttgctaccgaggatgagtaagacaatgaagaatattgtgcttctgaagatgaggaattagatgatgaggatgatcaaatatttcattagatgcaaggtgcaaactcaccaaaatctacaaggcactttgctgaagcttcacactctaaacatgatgatctagctagctatctgtaaatgatctagttgtgaatgatattataattgtgatgcttttgtgaatatataattgtgttgcttttgtgtttatgtgatggatctatgactatggtataccgatt

SEQ ID NO: 93735 - DNA, 430 bp, Zea Mays
ggatgcctccactctttctccctcttctctcctccccttgctcttctctggccgccgccacttgccaggacttcctgcagcagagcgcccctgcagctccttgcacctgcatcctacgcgcgctccagccgaccacgcccaggaaccagtgcagcgctccatcatcagtgatgaggaacaagtttgctaccgaggatgagtaagacaatgaagaatattgtgcttctgaagatgaggaattagatgatgaggatgatcaaatatttcattagatgcaaggtgcaaactcaccaaaatctacaaggcactttgctgaagcttcacactctaaacatgatgatctagctagctatctgtaaatgatctagttgtgaatgatattataattgtgatgcttttgtgaatatataattgtgttgcttttgtgttt

SEQ ID NO: 93736 - DNA, 1047 bp, Zea Mays
cactgattgggttggcagcgcgccgcggcagcagagggggagagagagaggcagagcgagcgagcgagagagcgctggtcatggcgtcactgtctgtcgccgccgtggcggccaccatagcgatgccaagcagcagcggtgggagagggcgccgtctcagggtcgcgtccatggccacccagaagggccagaagccgacgcccaagaccgtctccggcacgagaagatcgggcacgacgacggtgttcccggtgggcgagccgggcccgcggccggcgacgacgagcggcaaagcgccggttaagctgctgacgaacgtggagaagctgcggctgctgaccaaggcggagcgcgcgggcctgctgtcggcggcggagcgcgcggggctgtcgctgtcggcgatggagcggctgggcctactgtccaagctggaggagctgggcgcgctgtcggcggccacggaccccggcacgcccggcgcgctgcttgcgctcgcgctcccgctgctggccgcgggccccgccgtcgtgtacctcgtccccgaagagcaggcgtggcaggtggcgctgcaggccgtcgccgcgctcgtctgcgtggtcggaggcgccgccgcggtggccgcgtccacgtttgtgtccaggctgcagggctcctccagctgacgagcgcatttgcagccgtatctaatttcccgtgcatggctaagcagagaattgctctatgcttataacgtaataaatagtgcgtgcgttgcaacgggaacatataatatcacgataacttatatataaaatgtgtgttatactgttattagaaaagatttcataatttatttatgatcctaaccatacataaattttgttattttaatctagttgtttcaccactacattgtgaccatcagtgccatgtagatttctatgtatgctatgatttgcatggccttgtcgttggagagcacgtcccacacctgacggaagaagtttcctcatacatcgtcagtcatcaggcacgcaccaacgtacgtttttgcttaaacaaaaagac

SEQ ID NO: 93737 - DNA, 1136 bp, Zea Mays
cgatcagctgcaatgaagtgggtagagtgggtagccgctgtcgaggatcgccatcgagagggcgacggccgcgctctcgacggttcggccagcatcagtgctcaccccacggttcttggcctcaaggtttacctcctctgccctccctcaccttatcttcttcggtatgcacttgtgttgtgttgtgttgcagggccagagcagcaactgggtggtcgtcgagttcaggcatccgaacccctccaacgacgactgggtcggcgtcttctctccctcgggtttcaggtactcgacggactatggcatgtttaggctctgcatagcgaacacggaggaggactgggggccgggaacggagcagtacaagttcatcgatcgaagcagccctggctcgtcttcctcgcgcaccgtgttctcggctactcgtcgggtggctggtacgagacaatgatgggctcgtacggggagccgatgggccgggacgggcttcaagacctctggcagaggtacgatatagcggtcttcggccacatccacggatacgagcgcacgtgccccgtctaccaggcaaaggcaagactgagcttgcatctctgcatcagagccggtgagtccaagatgatatggatcattacggcgggcggggcggttcaacgcgacgacccatgtcaccgttggctgcggcggcggcgcgagcctgtctacgttcagagacagtgtgccgtactggagcttcttcagggacgccgacacttgatgttcggcaagctcacggccatcaacagctcgttcctcttgtttgagtacaagaagagccgcgacggccatgtgtatgaccgtttcagtctcgcacgactaccgtcacctggtggcctgctccgtcgacagttgcccccgaagcaccttggccgtctgatcgagctccggactctggagacatgtgttgatagatacactgtttgatatactttcagcattgtttttagttaccattggttctgaatgcactgaaccttctacctcgacactacatgctacatatcaaaagggcaatggtgtagaacaaatcatgtgcttctcactttcatctggttctggtttccagcgcagattctggctggatctttagcatgttc

SEQ ID NO: 93738 - DNA, 2544 bp, Zea Mays
caggctccgtggcttttgcctgtcctgtggcagcgaatcggagagcggaggggaggggaaagcgcagcaacgccggcgagcgagcgggccgttcgaggatcgcaatgtgagcacgagcagggacacacaagatgcttcatcctagctgggtcggtgtctcggcacacgtctcggagtattggtctgtgataatcgccactgttgttttcgcatttgttggcgcggtgacaatttactatacagtcaatcagttgaacaagaacatcagcttgagcctgataagggctatcaaggccagggccaagaggtacaagaaatcgaaggacaaggtgcccgctgcatcccacatctggaggaaagaagttgtctcccgcagcaaaggcctgaaatgctgcgtgtgcttgaagtccgtttcacctcctcagtactctggggggaccatccatcagtgcgatatctgcggggccgctgcgcatccgagctgctcggggaatgcacacaaggattgcaagtgtgtatctatggctggtttgggccatgtgcttcaccagtgggctgtacaatggattgacagcgcggatcactctgaagaagactctttctgttgccactgtgatgaatcttgcaatggagctttccttgcaggctcaccagtttggtactgtatgtggtgtcagcgactggtgcatgttgattgtcacagcagcttggccaaggaaactggtgatatctgtgacttgggaccattgaaacgattgatattatcacctctttgtgttaaggagcttcattggacaggtgctgggattttgagttctatcacaaatggggctaatgaattggcttccagtgtccgagagacaattcggattcgtagtaaaaggtacaaaaggggtagcgcttctgctgattcagatagctctggggctattgagctaccatctgatgctgaaggagattcacaagaagtaaacagcaaagcaaaggtgagggatgatcatgccaattgcaaactcaatgaggtacaccaaagctctgaatcagagaaagataagcaacttgtaccagataacgcagcaacaaccaatatgtcagatgtacaacgtgaaaattctcatgtacagaacaatcagaagtacgaaattatcaatgtgccttctgattctaggccacttctagttttcattaacaagagaagtggggcacagagtggtgattcactgagacagcgtctgcaaattcttcttaatcctgtgcaggttttcgagttgagcaaacagcaaggtccagatgttggtttagctttatttcggaaggtaacccatttcagagttcttgtatgtggtggagatggcactgctggttgggttttggatgccattgagaaacagaagtttgaaaccccgcctcctgtagccatccttccagctggtactggtaatgatcttgcgagggttttatgttggggtggtggccttggtgttattgagaagcggggaggtctattctcagttttgcaagatgtagagcatgctgcagtcactgttcttgacagatggaagatcacaataaaggacaaccaagggaaacttatgagaccaccaaaatttatgaacaactactttggggttggctgtgatgcaaaggttgccttagatatacacaacctgagggaagagaaccctgaacggttttatagccagtttatgaacaaggtgctgtatgcaagagagggagcaaagaacataatggataacacatttgattgttttccttgggatgtcaagcttgagatagatggatccaaaattgatattcctcaggactccgaaggtatccttgttgccaatatcaggagttacatgggaggggttgacctttggaagaacgaggatgatgtctctgacacttacctccctcagtccatgcatgacaagaagctggaagttgttagcttcacaggaatgctgcatctcgggaaactgcaggttgggctttctcgtgcaaaaagattagcccaaggccatcatataaaggttgaagtcagtactacaatgccgatccaagttgatggagagccatggtcccaggagccgggaaccatagaggtttctcatcatagccaggccttcatgcttaagagagtctccgaagaaccgctgggtcatgccgcttcggtaatggccgacatcttggaaaacgctgagagcagtggcattatctcagccttgcagaagaggactttgctccaggagatagcgtctaggcttttgtaggacacagttctaacgccagtagttgtgtgtagctcaccctatagctctctcacgtcttcagcagccagaggcttgcttctgggctactagagaattgcgcctggtcgttgtacatacaccatcatggtattttaccctgattcggattgtgttgtgtatgattctgtaaaattttgtacaccctattgggtgagcacacactgacactgttgcggtcggaaattctggtaccagttgtctggattgctgaaacttagacaacagtctt

SEQ ID NO: 93739 - DNA, 2709 bp, Zea Mays
agctatcagcgcccttccccaggccggcttcaacgctgatggagccatcctcgcctcgaatcctcgctgcagttttcgttccaaagttctcgccccgaatcctcgcccttccccaccgcaccttcggtgtctccaccacaatcaccgcggtggcttcaccgtgtccccgcaatcaccgtggcggccagatccactacctcgccttcctgccgggcgacgtcctcttcatcgcgcaccacctcgccacgctcttcgtcttcctgacctgctgccacctcgtccgccacagcgcctacgctctcctcgtcctcgccgaggtcaccagcctgctgcagaacgctggacgctcgccgggatctagcgggaccagtcccccgccgcggcccgcgtctacagcgccctctcgccgtccttctacgcgctctacacgctcgtcaggggcgtcgccggcccgctcttcctcctcaagatggccgccttctacctgtccagccaggccgtcgacgccatcccgtggtgggtgcggatctcctggatcctggttgtcggcaccgccattgcggtcagcaacctgtggatttggaacctctggaaggagctcatcagggaatggaagcagcaggcccctcccaagtcaaagaaagacacataggccgccacctccaagccgagtgccgagaagtagaaggacaagatctacatcctcatgccggtcatggccagttgcccaccccggcgcctacgctcgagaagccacccatcttggccgcttcggtgcgaggaggcgctaccgtcctcttcctccgatccacctctcctgccaacccgccaggttgccgctgccgagagcgagcggaggcctccctccgccgacgggggaggaagatgctcaccaagttcgaaaccaagagcaaccgggtcaagggcctcaccttccactcgctcagcccatggatcctgtctagcctccacagcggcgtatccagatgtgggactaccgcgtgggcaccctcctcatccgcttcgaggagcacaacgggcccgtcaggggcatccagttctaggtcacgtagctgctcttcgtgtccagaggtagtatcgctccccttgtcgactggatcgtactcctagcccactagcgtcggtcttaagcatgcacagaggtgacttcatagccgagtcagctgctctacgtctattgcttccctttctcaagttatttctagatacaaattggtctccttgttgatacaatatgatgacggttatttcttagaaaaaagatttgttcatttctactccctaaattcgttatttgctgaaatcatcatgctctggttgggattcactgaaccttacatctgttaatgttgtctctgtcaacttgctgccttacccaattagccactgacatccatagtacactgggaaatgttgccttcaccatgattcatgttcgaattataaagattcagttgcttagaatgtgatgagtgatgacaacattaattttagttttttgtgaaattttttgttgtcacatcgttatgctgttacagaactgtcacgagctcacaatcataagaattacgaaacaacaattgatccctagagcgtggacaacattttctcccgacagacatttatgcttattttgttttgagaacaaactatacatactaccttatttctcccgactgattaaatcaatagtaattaatgtagcatactaaccgcgtctgcagatgtccctcgttaccttgtgttgtctgtttggatttcagagaatttgggtcatacggttttggtgatcaaggacgctgatgtattgattttctgtttgatggatgtgctggtattggattgggcagtttagggggcagtcgttatgcgtctgtagtgtcagtgatcagcttggcctccatcttttgtgtcgtgctgtcggcagttgttctgaatggtttatgatttggattatattggatgtgtctcttcatctagaattgctggttgctgagaatttgaaggcgacaaacttaaatgggacatctgatccgtatgcattgatcacttgtggtgcagaggagagtttcaggttggggacctcagggattctcccacgcgattccgacggcctccttcctctcgcgcggctgcaggcctcctccccccacctccacctgaatccacaacacgtgagaaaaagcgacgatgacgaagaacaacgtggttgacatcgggcggcctctcgattggtggtcgtgctcggatccgcacctcgatggggccaccctatccctcaccgccccatcgcgtcggattgagttcccttggacgggcgacagtgttatggcctgtaaataaactacattgtcatgttagttagagggaagtgggtctacatactgcttagctagattaattgtgatagtaaggtgtattttgctgctttgtcaacaatttcaatttagacacttgttttttgggatgagctgctaaaaacgagctgaaggctgctactgcagaaagtgttgtggtcatgcttgtacaaagaatatttgtaaacaatgcttccgataccgtttccttagatggagcgcataaacctgctcctgtatggctgagtacattggttgttgtctaaactgtaattcttactgaagtactgtataatcttcttttgaatgtattaagtgtactgggagccag

SEQ ID NO: 93740 - DNA, 1496 bp, Zea Mays
agctatcagcgcccttccccaggccggcttcaacgctgatggagccatcctcgcctcgaatcctcgctgcagttttcgttccaaagttctcgccccgaatcctcgcccttccccaccgcaccttcggtgtctccaccacaatcaccgcggtggcttcaccgtgtccccgcaatcaccgtggcggccagatccactacctcgccttcctgccgggcgacgtcctcttcatcgcgcaccacctcgccacgctcttcgtcttcctgacctgctgccacctcgtccgccacagcgcctacgctctcctcgtcctcgccgaggtcaccagcctgctgcagaacgctggacgctcgccgggatctagcgggaccagtcccccgccgcggcccgcgtctacagcgccctctcgccgtccttctacgcgctctacacgctcgtcaggggcgtcgccggcccgctcttcctcctcaagatggccgccttctacctgtccagccaggccgtcgacgccatcccgtggtgggtgcggatctcctggatcctggttgtcggcaccgccattgcggtcagcaacctgtggatttggaacctctggaaggagctcatcagggaatggaagcagcaggcccctcccaagtcaaagaaagacacataggccgccacctccaagccgagtgccgagaagtagaaggacaagatctacatcctcatgccggtcatggccagttgcccaccccggcgcctacgctcgagaagccacccatcttggccgcttcggtgcgaggaggcgctaccgtcctcttcctccgatccacctctcctgccaacccgccaggttgccgctgccgagagcgagcggaggcctccctccgccgacgggggaggaagatgctcaccaagttcgaaaccaagagcaaccgggtcaagggcctcaccttccactcgctcagcccatggatcctgtctagcctccacagcggcgtatccagatgtgggactaccgcgtgggcaccctcctcatccgcttcgaggagcacaacgggcccgtcaggggcatccagttctaggtcacgtagctgctcttcgtgtccagagaattgctggttgctgagaatttgaaggcgacaaacttaaatgggacatctgatccgtatgcattgatcacttgtggtgcagaggagagtttcaggttggggacctcagggattctcccacgcgattccgacggcctccttcctctcgcgcggctgcaggcctcctccccccacctccacctgaatccacaacacgtgagaaaaagcgacgatgacgaagaacaacgtggttgacatcgggcggcctctcgattggtggtcgtgctcggatccgcacctcgatggggccaccctatccctcaccgccccatcgcgtcggattgagttcccttggacgggcgacagtgttatggcctgtaaataaactacattgtcatgttagttagagggaagtgggtctacata

SEQ ID NO: 93741 - DNA, 2368 bp, Zea Mays
ccccgcccccgccagtccgtcaccatcgcgcggcgccaccaactacgcccgagcccccgcctccacaccccgtccccacgcgcggcgcagcggagctatcagcgcccttccccaggccggcttcaacgctgatggagccatcctcgcctcgaatcctcgctgcagttttcgttccaaagttctcgccccgaatcctcgcccttccccaccgcaccttcggtgtctccaccacaatcaccgcggtggcttcaccgtgtccccgcaatcaccgtggcggccagatccactacctcgccttcctgccgggcgacgtcctcttcatcgcgcaccacctcgccacgctcttcgtcttcctgacctgctgccacctcgtccgccacagcgcctacgctctcctcgtcctcgccgaggtcaccagcctgctgcagaacgctggacgctcgccgggatctagcgggaccagtcccccgccgcggcccgcgtctacagcgccctctcgccgtccttctacgcgctctacacgctcgtcaggggcgtcgccggcccgctcttcctcctcaagatggccgccttctacctgtccagccaggccgtcgacgccatcccgtggtgggtgcggatctcctggatcctggttgtcggcaccgccattgcggtcagcaacctgtggatttggaacctctggaaggagctcatcagggaatggaagcagcaggcccctcccaagtcaaagaaagacacataggccgccacctccaagccgagtgccgagaagtagaaggacaagatctacatcctcatgccggtcatggccagttgcccaccccggcgcctacgctcgagaagccacccatcttggccgcttcggtgcgaggaggcgctaccgtcctcttcctccgatccacctctcctgccaacccgccaggttgccgctgccgagagcgagcggaggcctccctccgccgacgggggaggaagatgctcaccaagttcgaaaccaagagcaaccgggtcaagggcctcaccttccactcgctcagcccatggatcctgtctagcctccacagcggcgtatccagatgtgggactaccgcgtgggcaccctcctcatccgcttcgaggagcacaacgggcccgtcaggggcatccagttctaggtcacgtagctgctcttcgtgtccagaggtagtatcgctccccttgtcgactggatcgtactcctagcccactagcgtcggtcttaagcatgcacagaggtgacttcatagccgagtcagctgctctacgtctattgcttccctttctcaagttatttctagatacaaattggtctccttgttgatacaatatgatgacggttatttcttagaaaaaagatttgttcatttctactccctaaattcgttatttgctgaaatcatcatgctctggttgggattcactgaaccttacatctgttaatgttgtctctgtcaacttgctgccttacccaattagccactgacatccatagtacactgggaaatgttgccttcaccatgattcatgttcgaattataaagattcagttgcttagaatgtgatgagtgatgacaacattaattttagttttttgtgaaattttttgttgtcacatcgttatgctgttacagaactgtcacgagctcacaatcataagaattacgaaacaacaattgatccctagagcgtggacaacattttctcccgacagacatttatgcttattttgttttgagaacaaactatacatactaccttatttctcccgactgattaaatcaatagtaattaatgtagcatactaaccgcgtctgcagatgtccctcgttaccttgtgttgtctgtttggatttcagagaatttgggtcatacggttttggtgatcaaggacgctgatgtattgattttctgtttgatggatgtgctggtattggattgggcagtttagggggcagtcgttatgcgtctgtagtgtcagtgatcagcttggcctccatcttttgtgtcgtgctgtcggcagttgttctgaatggtttatgatttggattatattggatgtgtctcttcatctagaattgctggttgctgagaatttgaaggcgacaaacttaaatgggacatctgatccgtatgcattgatcacttgtggtgcagaggagagtttcaggtgatcacattgattcaatactttaaacctgttatttggacgatttcagttgttttattaactatatatagctttcgaaatagtttcatttctagcttatttatcaatctgagaattattggacattgtaattggtttcagttctgggcaacttagttggatctgcttgtttgatgtgtc

SEQ ID NO: 93742 - DNA, 462 bp, Zea Mays
atgcatgccatcaatcgaatcacatcaatagtaaatcataaatccatcaacctgtcaaactcggattcgagttgcgcatgcgtccacggtttaggcgcttcatcgaaccatgcgtcgcgcgaggcgccgcgacaacatctagcagtatttgacgtcgtagcagctggggctgcacagatccagcgaagcacgcgattcggaggggatccgggacttgctgctgcgtgcaaggtctcggctcggggagcaacgcgagtacaaggccgccgcgggggtcgacgctgtcgcggatggaatgcgcacacccgattcgagcccgacgacgagtgcgacgaggcaactctcgcaacagggagaccatggggacagcagcgccatgggatgttgtcgatggacgatgagggcgccagcgaggtgcttcagaagaggagtgcgctgctcctacagaaggctgggcgctaa

SEQ ID NO: 93743 - DNA, 1524 bp, Zea Mays
atggcctggtcctggacgcggtcctttctcacatgggctacagtgccgctgtgtatgggtgaggcagccaggcaggggttcaagggttttctcgatttgtgtgagttctttctagagttgatgaaggtgccgagggttgaatctaagcttcagatattcgctttcaagattcagtttcagtctcagattagagatgttagaaagaatttgcagactgtgtcatctgcttgtgaggagctcagaagctctgagaagttgaaggttatcatgaagaacattttgttaattgggaatacattaaatcaaggcacaccaagaggccaagctgttggttttcgcttggacagcctcctaaaacttatagacacccgtgccactagtggcagaatgacattaatgcactttctatgtaagcgaactgaaatccaaaaattgaaaaacagaaaagtagcaagcattcaaaacttctgtattttttctatgcatccatgtgctgcaaatgagcctaggatggttgaggttgtggattcccttgcagagaagtcaccggaagtaatggattttcatgaggaacttgtcaacttggaagcttcttcaaagttgcaactgaaagcattggcggacgagcagctggcagtcgtaaaggggctggagaaagttgaacaggagctaactgcttcagaaagtgatggtccagtttctgatgttttccgtaagactttaaaggagttcattgattgttccagtgctgatgtacgctccctatcagcattctattctgaagtaggtaaaagcgcagatggacttgctgtttattttggagaagaccctgcaaaatttccttttgagcaagttgctacaacccttctgacctttgtggggttgttccggaaagctcatgacgagaacctcaagcaaattgaggctgaaaagaagaaagcccagaaagaagctgaaaaggaggcaaaccaggacaaaactcctgtaaaatcaaaaaatgggaatgcagataaatcgccaagatcaccatcaaccttctaatgatgtacggcagaacttcacatggtcatcatttcttcctcaacgaatgcccgcctttgctggcctgggcacaatttcgcaagcatgaacagtatacaaatccataaattccttgtggacaaatgcttacaagacaagatggttttggttcaacatctatgcatgtatctcatgacactgtacaaagctcacaccccacacaaaaaactaggttcttctgtacaaaatccatactagatccccccccttctgtctatactagcagcaggagtaggtcaatgtttgtaaagtacaaataggagtgtaggtagtgatcagtagcaggtcagaagcaggattagtgctaccacaggcaggttcctaagcagataaagatgagtatcatagccatgtcctttgactccttgactagagcaattgtgagcttcagtgtttcgcctcattattgtcaagagaaaaaagtggccacctgttgcttatttg

SEQ ID NO: 93744 - DNA, 1063 bp, Zea Mays
cgccgccgccaccaccaccaactatgagtgtatttgtagaggcttccatcccgctgccacctcaaacaggatgcagagaggctccaccaccaccgccaccatctcctggaggacatgtagagtttccaccgccacctccaggggaatgtgcattagctctgccacatcccaaagcaagtgtaggggctccaccaccaccgcctcctcctggaggacatgtagagtctccaccaccaccgccacctccaggggaatgtgcattagctctgccacatcccaaagcaagtgtaggggctccaccaccaccgcctcctcctggaggacatgtagagtctccaccaccaccgccacctccaggggaatgtgcattagctctgccacatcccagagcaagtgtaggggctccaccaccaccgcctcctcctggaggacatgtagagtctccaccgccaccgccacctccaggggaatgtgcattagctctgccacatcccaaagcaagtgtaggggctccaccaccaccgcctcctcctggaggacatgtagagtctccaccgccacctccacctccaggggaatgtgcattagctctgccacatcccaaagcaagtgtaggggctccaccaccaccgccacctcccggaggatatgtaggagctccaccgccaccgccacctccaggggaatgtgcattagctctgccacatcccaaagcaagtgtaggggctccaccaccaccgccacctcccggaggatatgtaggagctccatcgccaccgccacctcctggaggatacataggagctccaccaccgcttccatatggaggaattggaggtgttcctcctcctccaccaccctttggaggactaggaggaactccaccgcctccacctccagcagggtttcgaggtggagctccagcacctcctcctcctcctggaggtcatggaggtccgccacctcctcctcctagaggacatggaggagtaggtggtccccctccccctcctggtgcaccatctcctccaatgcctcctggaatgcctggtggccctcctcc

SEQ ID NO: 93745 - DNA, 274 bp, Zea Mays
ttgccccagcctagagaacatatgaaacctccatctccacctcctcctccaccacgaccaccaccttgtcatgcaacacttgtaccttctttgtgtttatcttcaaatccaccttctctaagagaactttatgaaaatcaaccttctacttcccctccaccttttcctagagaatcatttgttgctctacctccacctccagctccacaccctaatcatctatctcttcctggaaaacatattaagccatctccacctcctccacctcctccac

SEQ ID NO: 93746 - DNA, 296 bp, Zea Mays
ctcccaaaacattacaacatggtgaaccaccactgccgctgccaccttttcctccagtaacaccaccaccagaattaccagtgccaactatatgcagtgatagtggatcagttccactggtacactcaaatccatcttcagattgtccatataaagaagcagcaatgctaccagaacacaaatctgctgttccacctactctcgaaggacatgaagcaagtgaagttcaattgctgcaatctgatattactgttgaattatcttcatcaaaacattctgagtatacagttcagcat

SEQ ID NO: 93747 - DNA, 1712 bp, Zea Mays
atggcgctgttccggaggctcttctaccggaagccgccggatcggctcctcgagatcgccgaccgcgtctacgtattcgattgttgcttctcgacagaaaccatggaccaatacagatacaagaattatctggacagcattattttgcagctccgtgaacagtttgcagattcttcattgatggtactcaactttagagatgaaggaaaaagtcttatttcaggcattttctccaagtacaatattacagtcaaagactacccttgcaagtatctaggatgcccattacttcctttggatatcattctccacttcctggggctgagtgaaaggtggcttatgcttgaagggcagcaaaatattctgctaatgcactgtgagaaagatggatggccagtgttggcttttatgcttgcaggtcttcttctgtacaggaaacaatataatggggagcaaagaactctagatatggtgtataagcaagcccctaaggagcttcttcagatgctaaccacattgaatccacaaccgtcacatcttcgatatcttgggtacatatgcagaatggatgatgacatagggtggcctacacaacctattcctttcaccttggattgtgtaattcttagagaaattccaaatgttgatggagtcggtggctgtcggccaattgttcgagtatatgggcaggatattccaacaactgacagaaatcatggtgttgtttcaccaccatcaaaggccaagaaaaatattaggcgttacagacaggcagataatgcgccactgaagttaaatgttggatccttcgtccaaggtgatgttgtccttgaatgtctgcatgtagatgatggccgaggaaatgaaaggttaatgtttagggtgatgttcaatacctttttcatccagtctcacattttactgttgaactttgaggacatcgatgtcccttgggatgccgatcaccagttcacaaagaacttcaaagcagagcatctacagattatacttcaactccaagcgccgaacgttggagaaactcaccgttttccaactttgagccgaatattggcattgatggatcacgagacaataaagtcgataacttgggcttgttagaaacagtaaacgatggaaagacatgcacatccactgaagccaatactatgctcaacaatgaaactgcagttgttaagtcaactttggcagctacaatagatggagacgcagatagtggtatttcaaagtctacttataaagtggatgattacatgtttgaaaagggtagttccaagcaggatacaaggatgggttccaatcaagatttgggtcagattgataatgtgttggttaaggaggtgattatattagaaactaatagtcctaaggacatacagatgatcaaagaggtcatcatatctgaagttacaactctcaaacaggtagtagacgggagtatgatggaaactgaattagatgagacagtccatgattcagaaagcattgcattggcagaaactgaggatacaaaacaacttaatattttttgcaaacaggatgagggacacagtgtgcaagatgaatatgctgcttatgacaatggcatagtgattgaacaagaagaaagcagcaacgaagaaaaccttaccatcagagacacaaattcagaagaataccatatcttcactgttcaagcacttcttcggggctaa

SEQ ID NO: 93748 - DNA, 2672 bp, Zea Mays
atgggttgcgcggtgtcgaggcccggggtggtgtcctcgccgtcgtacgaggacgacgtgtcgtcgtgctcctacaatatgtcccgcagcgcgtcggcgtcggcggacctgggctcggcgtcggcgtcggcgtcggcgatgtcgatatggagccggccggtgcggctggaggcgttcaaagacgacgacgaggacgagcggcggcggcggcggtcggggagggaggctgcggtagcggcggcagcgcggctggggagcgtccggccgtgcgtggagggcgagcaggcggcagccgggtggccggcgtggctgagcgcggtggccgccgaggccgtgcacgggtgggtgccgctccgcgccgacggcttcgagaagctggagaaggtggggcagggcacgtacagcagcgtgttccgcgcgcgggagctggccacgggccgcctggtggcgctcaagaaggtgcgcttcgacagcgtggagcccgagagcgtgcggttcatggcgcgggagatcctcatcctccgccgcctccaaggccaccccaacgtcgtcggactcgagggcctcgtcacctcccgctcctccccctccatctacctcgtcttcgagtacctcgagcatgacctcgccggactcagctcctcccccgacatcaccttcaccgagtcgcagatcaagtgctacatgcggcagctgctcgaggggctggcgcactgccacgcgcgcggggtgatgcaccgggacatcaagtgcgccaacctgctggtgagcgacggcggcgagctcaaggtggcggacttcgggctggcgaacctcttcgcgccggcgccggcggcgccgctgaccagccgggtggtcacgctctggtaccgcccgccggagctgctcctgggcgccacggcgtacgagccctccgtcgacctctggagcgccggctgcgtcttcgccgagatgcacgcgcgccgccccgtcctgcagggccgcaccgaggtcgagcagatccacaagatcttcaagctctgcggctcgccgcccgatcacttctggcgccgctcgggcctgtcccacgccgccgtcttccgcccgcagcaaccttacccgagccgactccgggacaccttcgccgcgtccatgcccgaccacgcgttccgactcctcgccatgctcctctccctcgaccctgccgcccgcggcaccgccgccgccgccctcgacgccgagtacttcacgacggcaccgtacgcatgcgaccccgggagcctgcccaagtacgcgcccaacaaggagatggacgccaagttccgggaagaatctagaaggaggagcaacctccggagccaaggcggcgagggggcgaagcggctgtcctgggggcacaagagcatgcagctgcaggacacgaaccagagccacgtgcacgccgaggaatcgctgcccgttgtggccaaaagcggcgcggcggtggcaaggaacgacggcgactcgcggctgctcgtcgacctggagcccgtgccggcgatcagattcagcaagcggcacggcgacgacggcgccggcgaccacgcgccgccgtacgccaagaccttgtccagcagcttcaaggagccggcccgtgtcgcggaccgccgccctctctccggccccgggcagctcgccgcgtccaccggtttcgcctgggccaagaagccccggtccgtcgccaggtcttcgacggcggcagccgccgtcacgaagcggagctactccaagggttcagggaccaagaacaacagcagcggaggaggtgacagagcaagaaccacctccgccgccaccgccactgaagcggcggcaccatacgaggtggagaagcaggaggtgatcaagcagtgggcacaggccgctgacgcattcagcgcctctgaagcttacagcagcaggttcaggcagacacttgctgccaggcagctcaagaatggaaagatgtacaaggggaaggtgagcagggtggaccactcagggccgctgctgtcacagccccggcgcatcgacgaattcctgctgcacagccacgagcagcaggtccggcaagctggtcgccggccatggttcaagaaaggcagcaagaaggagcagcacagatggcagaggcacggcatgatcacattgaaacggcgtgatcaaaacaggagatgctgcgagcagatgaaagggatggaacgagttgggccatgagctctcctgatgagcaggtgtttttttcagggctggacagacagacagccccatgccatcagggaaagctgagatggaagtggaagctgttgtagtggggttttcaggtttcatgcaaccagattttgctctacctgaactagacaacaatgttgttgctgctgctgttgtacaagatctttttttgtgctcgcttgtgatgataatatgcatggcaagctccaaaatgtggtttccaatttatgtatagcaaggggttacaaaagttggtaatcataatgcttgtgccctgtagtatcatactattaccacgccaacttaatttcttgttttacccctgctggcgcctccaaaaccaaaacccagaatcgtattagcacatttgaaagtgtaggcttaccgcactttgtccacgtgaatcggttaacgccaaactgcagcttgctaatggtttcttt

SEQ ID NO: 93749 - DNA, 2685 bp, Zea Mays
atttttttgtgctgatttgttgtgattctctaatgatatctccaaactaacttttctgtgtcattacttgatagatatgggaataaaagttgagggtgagacctatattccaggatactttgacatggaagattctagtgtaaattataatggcaatgtgctgccgtatcacaaggagaacaaaccaagtgtgtttcttactgagaagttcacaataatagcttcaaatggacgagtacattacgacaaggaaatgataaagcggacaatgcttgtacatgaagctacattccggaaacaggtatatgaacttcaccagctttacaaaattcagaaggaactaatggcacggttccaaatagaagagatcaatggttgtcctagttatgctggtttattgcagccaagatcctctccatcacaggcactgcttgatgatgttaaaggaatgcgaaaaactgtgaatcctatttctggacatgatcctaagcagtcatgcatcgatttgataaatgaaagtagttcacaatatagtgtgagtggaactcctttgaggcataacaatgttaggcctcaaaagaaaatgattgacctgcaggttccagcagatgtatacactgacaatgatgatgatgtggagatattagaagtgaggccttccaaaagattgcctggggctaatgggtctgttcttttaggaaatgtcaacctcagccttcaaaatagtgagggctattcacatatgaagagttggagtactgatatacaagcacatcacagctcaactgcgcatatactgaataaaccagttgaagattcatctagtatgaatagatctaattttcttggtgtgggaatatctgctctgcagaaccatcattatgcatcacagggagtaaacttgaaccccataagcttggaagcaaaactaaaggaacaatgtgctggtaaagcatctggttcaaggttctttggaacaaatgaggaaataaggaacaacaatccatttcaacacagaaaggatgactccaactctagcatggcattgtacaaacaaaattgcattggttcctcaatggggaattacgctcccaatgctagcaccttcaatcactccattctttctccgcttggcttcaaccatgcactgaatcttccatggcaaagcaacaacacgagctacttgactaagagtcattgtggtgctgctgaaacattcattcctaaggatgccctttccaatggtatctcagtggattctactccaaaggcgccctatcatcattcactaaagattcacggaggtgccggatatcaaaaacctcctgcactacatgataacctgaaggatatagatctgaatgacacaccagttgatgtcgctgccacttgggaacagggaagcgagaaatcagtggttgatatctcttggctcagcaagaaaccagtaagcctgatggaatcacaagtcccatcaagttatgcaaaggaccactcccagattttgccaagccccacattatattcagaaagtagaactcccacaagagttcctgccttccctttcagtgttggtgctgaaaaagattctcggtgctcacccactctactatatgacctaaacaatggaccatcgattaagcatgaaactgacatggaaattcagtccctgtgcaaggaaagtgacacagatactaggaatctcattgacctgaatgaaaccttgccaataatcgacgatccagaaatagagtctcatgaatcaggtgaaattgttcctcatgaacccaatggcccttcacaggattctatcgctatagcagcagcagcagagacgttggtagaaatgtggaataatagtgatcggcctgcatatcaaccggacattttgcattggtttgctgacctagctatatccaaagataacacattgttggacaaggacagcgatgacgactttgaggctgcaacactgaagctgcgagaaacaaagagcaacgagtaccattcaacaccaagaaccacccaggaggataacactaactttggtcattgctctgcagcttcacttgtctcaaaacctcagagaggtagagggcgaggacgccgacagaggaaacactttcagagggacatcttgccaggccttgcgtcattgccaaagcacgaggtatcagaggatcttcgtgcgctcggaaggtccaagctagtcaccccgacgaaacgtggccgtaacaggcagcaaccgagagggaggcgtcgggcaagaagcgtggctgtcgccatggaggtagaggaaagcgaggtcagcccaccactgcaggcatcaccatctcctgtccctgctgacttggacgcagatgcattggcaataacaaggtggggaaggaccaccagacgttgtcgaaggccgagatgcccgccggtgaacaatgcatcgctgcgtgtagcttgagagagttttaggcatcttagctgatgagaattggtcagaattcagaaattcttttttttccatgactagttggagggaaaactcgaagtagtagattaaaagtaaccagtcacaattgtatatgcatctcagcattaatttggctccctgggacctggatcgaatcaaaacagtttgtacatctctttgaaatgaactctaatcctagagaaatgcacagaattagcatt

SEQ ID NO: 93750 - DNA, 823 bp, Zea Mays
tgcaaggatattgagattttttagatattttattttaaatgctaattcatatatttttttccttgccgaatgtaacccctaagaagactgaagagactgctttgatatctgatgttgttgcaaattcaccacaacaaggttttcatagtgggcattgctggagtgatctcatctgagatgattttggcataactcctaaaagaggaggcgcttctgctcatgctaagaaagcaagctttgaccgtgaaacctaatggcagaaaagtccttcctcccccaagtccctagagcctagacgaatggcgctgcagctcactgttccttcttcagttcactcatgtagtcctattcatgtccattaaccagactaaagtagtgcatattttaaattgaatatttttcttcttttcggtgagaagtgaaaagtggaagacatttcagttctgcactttgtagttgaagttatcttcctgattggaagataaggaaggtttgaggagctcatttctgaagttgtagctggaagggagaagagctcatgttaatggtattttgactgctccaaaacactttcgacttgtgatattctttaacctatatgcgttgaagaatttttggagacaaagcatgcaagcacagagtctgctctggtggtaagataagtgaggtgacttctgaagaagcctacagagaatgtaaaaataagtgtgttattttcactgctttgacacagtctcaattgtgcaatgatttattatcacattgtaatttgacatatgctacatgatcctaaattatgttgtaatgaatgttctactcccta

SEQ ID NO: 93751 - DNA, 1077 bp, Zea Mays
cacagtccacacccgccgaggccacccccgtcctcccccacgcgccgctcgcgtgatgctcgaatctacgctcgcgatggttatgccccgccgctcgctgccccagccccctcccctgcgtgcgtgcataaaaagggagagcgacgatggaaatattccgagcatggcttgaacacctggtcaatgctagatgatctgttggttgaaagactagcaagctgtccaagtggaactacgacggatcgagcaccggccaaatcccagctgacacggtgtggacacgagttctgcgctactcctgtggtcattgtttggagaagttttcctaaagcttctttatactgaagagactgctttgatatctgatgttgttgcaaattcaccacaacaaggttttcatagtgggcattgctggagtgatctcatctgagatgattttggcataactcctaaaagaggaggcgcttctgctcatgctaagaaagcaagctttgaccgtgaaacctaatggcagaaaagtccttcctcccccaagtccctagagcctagacgaatggcgctgcagctcactgttccttcttcagttcactcatgtagtcctattcatgtccattaaccagactaaagtagtgcatattttaaattgaatatttttcttcttttcggtgagaagtgaaaagtggaagacatttcagttctgcactttgtagttgaagttatcttcctgattggaagataaggaaggtttgaggagctcatttctgaagttgtagctggaagggagaagagctcatgttaatggtattttgactgctccaaaacactttcgacttgtgatattctttaacctatatgcgttgaagaatttttggagacaaagcatgcaagcacagagtctgctctggtggtaagataagtgaggtgacttctgaagaagcctacagagaatgtaaaaataagtgtgttattttcactgctttgacacagtctcaattgtgcaatgatttattatcacattgtaatttgacatatgctacatgatcctaaattatgttgtaatgaatgttctactcccta

SEQ ID NO: 93752 - DNA, 570 bp, Zea Mays
agtttgtatcaggagagtgcatcttgatttactaaagttaatgtagtctcaagtttatgtataatcagttctaatcttgttttttattgaacaatatgtgtttctaggtccattaaccagactaaagtagtgcatattttaaattgaatatttttcttcttttcggtgagaagtgaaaagtggaagacatttcagttctgcactttgtagttgaagttatcttcctgattggaagataaggaaggtttgaggagctcatttctgaagttgtagctggaagggagaagagctcatgttaatggtattttgactgctccaaaacactttcgacttgtgatattctttaacctatatgcgttgaagaatttttggagacaaagcatgcaagcacagagtctgctctggtggtaagataagtgaggtgacttctgaagaagcctacagagaatgtaaaaataagtgtgttattttcactgctttgacacagtctcaattgtgcaatgatttattatcacattgtaatttgacatatgctacatgatcctaaattatgttgtaatgaatgttcta

SEQ ID NO: 93753 - DNA, 897 bp, Zea Mays
cacagtccacacccgccgaggccacccccgtcctcccccacgcgccgctcgcgtgatgctcgaatctacgctcgcgatggttatgccccgccgctcgctgccccagccccctcccctgcgtgcgtgcataaaaagggagagcgacgatggaaatattccgagcatggcttgaacacctggtcaatgctagatgatctgttggttgaaagactagcaagctgtccaagtggaactacgacggatcgagcaccggccaaatcccagctgacacggtgtggacacgagttctgcgctactcctgtggtcattgtttggagaagttttcctaaagcttctttatactgaagagactgctttgatatctgatgttgttgcaaattcaccacaacaaggttttcatagtgggcattgctggagtgatctcatctgagatggtccattaaccagactaaagtagtgcatattttaaattgaatatttttcttcttttcggtgagaagtgaaaagtggaagacatttcagttctgcactttgtagttgaagttatcttcctgattggaagataaggaaggtttgaggagctcatttctgaagttgtagctggaagggagaagagctcatgttaatggtattttgactgctccaaaacactttcgacttgtgatattctttaacctatatgcgttgaagaatttttggagacaaagcatgcaagcacagagtctgctctggtggtaagataagtgaggtgacttctgaagaagcctacagagaatgtaaaaataagtgtgttattttcactgctttgacacagtctcaattgtgcaatgatttattatcacattgtaatttgacatatgctacatgatcctaaattatgttgtaatgaatgttcta

SEQ ID NO: 93754 - DNA, 264 bp, Zea Mays
atggggaagaaggaggagctccctgctcagccaaaacagagaagagaagggagtggtgtgtgggagaagggagaggatgggctgccatttatagagcgaagctctagacatgtcagactgcaacagcagatggcaggcacagtagctgcactggctctgcttgctcttgatacttttgagccaatagttggggatgcagggcagtttggtccgacagaaccactgacaggggaagatgccccagccaactttctagacaagtaa

SEQ ID NO: 93755 - DNA, 117 bp, Zea Mays
ggagagaagcaagttcatttattttgtaaaccagtttttaaatacgaatttctgcagaaaaacttttccactaaaccataccaacatatagatccaatagttagagcatttcataag

SEQ ID NO: 93756 - DNA, 2494 bp, Zea Mays
atggctccaccaacccatcaccaccctgcaccgaccccttccctctccctctccctctccctctcccgacggcggcggcggcggcaagggacgccactcctcaatccgtcgacgaccgctggtcggcctctgccaccgtctcgcccgcacctccgaaacctgaatctcatccgtcgaggatcgccgagagcatctgtgcttctaatgactgaaaaagtgatcaaagaggccgtcacctccactcctgcaccaacacaaccgaaatgcgaagacctgacagatgctgctccactagccatggatggtagcagcatgacacctgttgttaggaggaaggagaagccggtcccgcgttacctacgagcacccaccagctcttgccatgacagctgcaagtttgggatcaagccttcctcggaacccaacaagtactggcctgctagtcgcaagcaattgcgccgtgcgagcacttggagccagcaggaactcgagagggttcaaatcgtaccaacacaaaaaatcagaccaagaaaggaggaccagaagctcaagatttctcaggtaaaaagtggtagcagtactgctcctgctaagcatgaattcatcaccctgaaagcatcacttgaaaaggcacctgatcattctgaaagcaatccccacgtgcaagattcgtcagctgaagcatctgaacttgtggctggaactccgccaattgatgcagaatgccttgtcgtatctcataatgatgtgacagaccgtggaaatggggagtcgttggatggagctgaaagcattgagctggagatgccattagctatccaggagatcgatgaatctgacgaacacattgaggaggaggataccactctgcctgctgacagtgtatgcgaagttgaggaacagccacatgtgggtcctgtgcctgatcgatcagaaaatgagtgtgcaagttcagatatcaggactcctcatactgtaaaagcctctaagaagcatgaacaatccttgcttggggctaaatcagagagtctgccgaaggggcctggaaaactgaaggcgaaggacatattgatgagtatgacgagagacaaaggcgcaagtcagaaaagtggaagaacatcgcatctgacatctactcatacagcagtcgacagctccagtggaccaaagacaacaagaacacctgcagatgttacttctaccaccaagttcagtaacccagagagaaaaatcaggcctacagttacatcagctgtgaaaaaagttaaggagatcaagtcacccccagcatatgtcacaaagggttcatctgcggaaccttctagattggcaaagctaacgggttgtacaacaaaaactctgtcatccccatcacttacttcagggaaacgtaccgacagaaagaagacagggaacaaagttggcaacaatgctcaaatccttccaaggaagagagaagacaaggttaaaacaggtccactgaaactgtctcgatctataaacatgtctagcaagtttctctcgagtgttaagctgagaacagtcagaaaagagaaaattgctcccccaatcaatagcagcaaaaaggtttctggaacagaaaattcgagaattctgaagacggcttcaccgagagtgcgcaaactggagactaaagagatcggacctgacaaagaaaaaattgacactgcaaggagatcaaagcctgccccgcccaccctctcgagcaccgtgctgccagtgcagtcgcctcgcaagctgacgttccggcggggcaaagtactgaaccctgaagagaacagtggctgcaccccgagacggctccggttcaggccttccgtagccatggcagacgcggcatccaggaacagaggcggcaggatcacaagcaagaggagcggcggcggcggcgctgtagcgacagacccaggtgccgaggtcgttgtgctgcggcggcaggacgggaaggagacaaaaaagcaggagccagggctgttcaacaacgtgattgaggagacggcgagccggctcgtcgctgaggcgagaaagagcaaggtgaaggcactcgttggcgcgtttgagaccgtcatctcgctgcaggaaaccagcaaggctgctgctgctgctgctgctccaactatggcagcaggtgtcgtgccatgagcacttcttgatctgaagtgtgcgtgatcacaatttttggagttttggacttttttgtttggttgttagtgccgtaaaagtggcgcttgttgaagtttggtcgttcctatgtaaactgaattttcttccgtgctttggtagtgcataaaaaaagaaagttataggttgtgtctgtgtaaggcttggcattatactaataagtgataagtaagcaacttattgtaatgactagtgcccgtatgttgcaacaggaatatgtaatacaaagataacttatatataataccaagataatttatgtacaaatgtgatatactataaaaaaggaaaa

SEQ ID NO: 93757 - DNA, 1261 bp, Zea Mays
agaaaaatggttctttcttagtgtgacacggacacacttgctcgtccacatcccttcctccagccaccgacctcccaaggatgcgctcttgccgccggcctcccaaggatgcgctcttgccgcccctcttctcgcgccgccgctgccatcgccatgtcgaagcgcgctacgtctcatacattttctgggatccagaaatttcggacattgtgatcttctcggccccccaggacttcagccttgattttcgagccctggtgcttgagtacatgtccaatggaagcttggagatgctcttgcactctgaagacagaagtcacatggggttccaattccatacaaggatggacaccatgctagacgtgtctatggcaatggaatatctgcaccatgagcatcacgaggtggttctgcactgtgacttgaagccaagcaatgtgctgttcgatgatgatatgacagcacacgtagcagactttggcatcgcaaagttgctactgggtgatgacaactccatggtcgtttccaccatgcctggaacacttggatacatggcaccagagtatggatctcttggaaaggcatcgcgcaagagtgatgtgttcagctttggaatcatgctttttgaagtcttcactgggaagaggcccacagatacgatgtttgagggagaactgagcattaggcagtgggttcaacaagcatttccatctcagcttgacactgtcgtggacagccagctgctgcaggatgccatttcttcttcagccaacctgaacgaggttttgcccctaatatttgagctcggtttgctctgcacgactgattcacctaaccaaaggatgtcaatgagtgatgtagtagtgaccctgaagaagatcaaaatgaactacaccaaatttggcatcagcaaggacacaatgtccttccctgcaattgatcacgcttaattctacatgtctagtttcttcggttctgcagtggaacaactgcatcagctaccttttactgtatttttttttttacaaaagttgtttcttggataactcttagtaatatatgggcatattactattgtcaggtgtgaaataagtttctgtaatttaaattaaaagaaaaggttgcgtgacattcatgtgcctgaacagagatgtcataattttatagtttgatcttttgtggtccattacgacccttaaacgttaagggattgttttgttcttacatgttcctattttgtaaaattatttgtggcacactg

SEQ ID NO: 93758 - DNA, 1597 bp, Zea Mays
agaaaaatggttctttcttagtgtgacacggacacacttgctcgtccacatcccttcctccagccaccgacctcccaaggatgcgctcttgccgccggcctcccaaggatgcgctcttgccgcccctcttctcgcgccgccgctgccatcgccatgtcgaagcgcgctacgtacgctccgtcctccattcgctcccgacgatccgactcgttcgtttgttgctcctttcgcttactgccagacctagccggcttctgcgttgaaatggatgaactgccgcggtctcatacattttctgggatccagaaatttcggacattgtgatcttctcggccccccaggacttcagtctcctaccatgagcttgttcgcgccacacaaagatttagcgataacaacctgctggggactgggagctttggcaaagtattcaagggtcaactagacaacggtttggtggtcgcaataaaagtgctagacatgcatcacgaaaaagccattggaagctttgacgccgagtgtcgtgtgcttcgcatggctcgccaccggaacctgataaggatactgaacacctgctccagccttgattttcgagccctggtgcttgagtacatgtccaatggaagcttggagatgctcttgcactctgaagacagaagtcacatggggttccaattccatacaaggatggacaccatgctagacgtgtctatggcaatggaatatctgcaccatgagcatcacgaggtggttctgcactgtgacttgaagccaagcaatgtgctgttcgatgatgatatgacagcacacgtagcagactttggcatcgcaaagttgctactgggtgatgacaactccatggtcgtttccaccatgcctggaacacttggatacatggcaccagagtatggatctcttggaaaggcatcgcgcaagagtgatgtgttcagctttggaatcatgctttttgaagtcttcactgggaagaggcccacagatacgatgtttgagggagaactgagcattaggcagtgggttcaacaagcatttccatctcagcttgacactgtcgtggacagccagctgctgcaggatgccatttcttcttcagccaacctgaacgaggttttgcccctaatatttgagctcggtttgctctgcacgactgattcacctaaccaaaggatgtcaatgagtgatgtagtagtgaccctgaagaagatcaaaatgaactacaccaaatttggcatcagcaaggacacaatgtccttccctgcaattgatcacgcttaattctacatgtctagtttcttcggttctgcagtggaacaactgcatcagctaccttttactgtatttttttttttacaaaagttgtttcttggataactcttagtaatatatgggcatattactattgtcaggtgtgaaataagtttctgtaatttaaattaaaagaaaaggttgcgtgacattcatgtgcctgaacagagatgtcataattttatagtttgatcttttgtggtccattacgacccttaaacgttaagggattgttttgttcttacatgttcctattttgtaaaattatttgtgg

SEQ ID NO: 93759 - DNA, 1486 bp, Zea Mays
agaaaaatggttctttcttagtgtgacacggacacacttgctcgtccacatcccttcctccagccaccgacctcccaaggatgcgctcttgccgccggcctcccaaggatgcgctcttgccgcccctcttctcgcgccgccgctgccatcgccatgtcgaagcgcgctacgtctcatacattttctgggatccagaaatttcggacattgtgatcttctcggccccccaggacttcagtctcctaccatgagcttgttcgcgccacacaaagatttagcgataacaacctgctggggactgggagctttggcaaagtattcaagggtcaactagacaacggtttggtggtcgcaataaaagtgctagacatgcatcacgaaaaagccattggaagctttgacgccgagtgtcgtgtgcttcgcatggctcgccaccggaacctgataaggatactgaacacctgctccagccttgattttcgagccctggtgcttgagtacatgtccaatggaagcttggagatgctcttgcactctgaagacagaagtcacatggggttccaattccatacaaggatggacaccatgctagacgtgtctatggcaatggaatatctgcaccatgagcatcacgaggtggttctgcactgtgacttgaagccaagcaatgtgctgttcgatgatgatatgacagcacacgtagcagactttggcatcgcaaagttgctactgggtgatgacaactccatggtcgtttccaccatgcctggaacacttggatacatggcaccagagtatggatctcttggaaaggcatcgcgcaagagtgatgtgttcagctttggaatcatgctttttgaagtcttcactgggaagaggcccacagatacgatgtttgagggagaactgagcattaggcagtgggttcaacaagcatttccatctcagcttgacactgtcgtggacagccagctgctgcaggatgccatttcttcttcagccaacctgaacgaggttttgcccctaatatttgagctcggtttgctctgcacgactgattcacctaaccaaaggatgtcaatgagtgatgtagtagtgaccctgaagaagatcaaaatgaactacaccaaatttggcatcagcaaggacacaatgtccttccctgcaattgatcacgcttaattctacatgtctagtttcttcggttctgcagtggaacaactgcatcagctaccttttactgtatttttttttttacaaaagttgtttcttggataactcttagtaatatatgggcatattactattgtcaggtgtgaaataagtttctgtaatttaaattaaaagaaaaggttgcgtgacattcatgtgcctgaacagagatgtcataattttatagtttgatcttttgtggtccattacgacccttaaacgttaagggattgttttgttcttacatgttcctattttgtaaaattatttgtgg

SEQ ID NO: 93760 - DNA, 3275 bp, Zea Mays
gcacctgactctgtcccaatggccgctgcaagctcactagtcgctctagtgctactgccggccattttcttggtctcagcactatctcctgcttgtgctgctgcttcttccactctaattcctaacggcagagacaccgacctcgccgtgctgctggctttcaaagcccagctctctgatcctcttggcgtcctcgccagcagctggaaaaccaacgtatcattctgccactaggttggtgttttgtgcagccgtcgtcgacagcgcgtcactgctctagttctatcggacacacctctccaaggggagctcaccccacacatcggtaacctctctttcctctctgggctggaccttatgaacgcaagccttaccagctccatccccgccgaaattggcactctgcgacggcttaaatatctctttcttgctgagaatcgcctagctaattccattcctgactctataggaaaccttacaagcctcaagtctctctacttgagctccaacatgctctcgggcagattccaccacagatgctacagaatctgcgcaaccttgaaaacatttcgctggccaacaatgagctgagtggccatataccgccttatctgttcaataccacgccttctctgattcatatccactttggaagtaaccacctgtcaggtccaataccgcacactttgggatccctgcccagacttgactacttagtcatcaatgataatgagctccttggcacaatacccgccaccatgttcaacatgtctagggtgcaggtattctcactggaacttaacaatcttactggagaagtcccttacaatcaaagtttcaacctgccaatgctttggtggttttctatcagtgggaacaacattcaaggccgaattccactgggatttgcagcatgccagcgcctgcaagttctttacttaggcggacttcctcaccttactggacctatcccagctattcttggcaacctcacccgtattactgatatagacgtctctttctgcgacctgactgggcacattccaccagaaataggcctgttgcaagacctaaagaatctacgtctaggaaacaaccggctaacaggtccagttccagcttctctaggaaatttgtctgcattgtctttgctgagtgtggaatcaaatctattgtctggttctgtacctagaacaattggaaacatcccaggtctgacccagtttagattctcatggaacaatttcaacggaggtctcgactttctgtcctccctttccaactgcaggcaactcgagctccttgacatatataataattccttcaccgggccactcccagaccaggtggggaacctgtcaacatatctaattgaatttagagcaaatgcaaacaagctatccggtgagcttccgtcgtcattgtcaaacttaagcagccttgttagtatctattttcacgacaacctactcacaggagccataccagaatccatcacacgtttacaaaatctcatcctgtttgatgtcgccagcaaccaaatgtcaggtcgtctcccaacacaaattggcaagctcaagagcctacaacaattctacaccaatggaaacaaattctatggccccatacctgacagcatcggcaaccttacgtcgatagaatacatctacttgtctgataatcagttaaattcaacagtaccatctagcttgttccagcttcccaaacttatctatctggatctttctcataattccctcactggttcactaccggtcgacgttagtgggctaaaacaagtggattttgttgacttatcttccaattatttgtttggaagcatcccagagtcatttggaacacttaagatgctcacttacctagatctatcattcaactcattggagggctcaatcccaggtttgtttcaggagctagaaagcttggcatcattgaacctctcctccaactctctctctggtacaattcctcagttccttgccaatttcacctacttgacagacttgaatctgtctttcaatcgactagaaggaaaggtaccagagggaggtgttttctcccgcatcacctcgcaatctttacttgggaatcctgcgctgtgtggtgctccccgtctaggtttcttgccatgtcccgacaagtctcattcacataccaatagacacttaattacaattttaatccctgtcgtcaccatagcattttcttcttttgttctttgtgtgtactacctacttaccacaaggaaacatagtgacatttctgatccatgcgatgtcgtggcccataacttagtctcctaccatgagcttgttcgcgccacacaaagatttagcgataacaacctgctggggactgggagctttggcaaagtattcaagggtcaactagacaacggtttggtggtcgcaataaaagtgctagacatgcatcacgaaaaagccattggaagctttgacgccgagtgtcgtgtgcttcgcatggctcgccaccggaacctgataaggatactgaacacctgctccagccttgattttcgagccctggtgcttgagtacatgtccaatggaagcttggagatgctcttgcactctgaagacagaagtcacatggggttccaattccatacaaggatggacaccatgctagacgtgtctatggcaatggaatatctgcaccatgagcatcacgaggtggttctgcactgtgacttgaagccaagcaatgtgctgttcgatgatgatatgacagcacacgtagcagactttggcatcgcaaagttgctactgggtgatgacaactccatggtcgtttccaccatgcctggaacacttggatacatggcaccagagtatggatctcttggaaaggcatcgcgcaagagtgatgtgttcagctttggaatcatgctttttgaagtcttcactgggaagaggcccacagatacgatgtttgagggagaactgagcattaggcagtgggttcaacaagcatttccatctcagcttgacactgtcgtggacagccagctgctgcaggatgccatttcttcttcagccaacctgaacgaggttttgcccctaatatttgagctcggtttgctctgcacgactgattcacctaaccaaaggatgtcaatgagtgatgtagtagtgaccctgaagaagatcaaaatgaactacaccaaatttggcatcagcaaggacacaatgtccttccctgcaattgatcacgcttaattctacatgtctagt

SEQ ID NO: 93761 - DNA, 979 bp, Zea Mays
agaaaaatggttctttcttagtgtgacacggacacacttgctcgtccacatcccttcctccagccaccgacctcccaaggatgcgctcttgccgccggcctcccaaggatgcgctcttgccgcccctcttctcgcgccgccgctgccatcgccatgtcgaagcgcgctacgtacgctccgtcctccattcgctcccgacgatccgactcgttcgtttgttgctcctttcgcttactgccagacctagccggcttctgcgttgaaatggatgaactgccgcggtctcatacattttctgggatccagaaatttcggacattgtgatcttctcggccccccaggacttcagccttgattttcgagccctggtgcttgagtacatgtccaatggaagcttggagatgctcttgcactctgaagacagaagtcacatggggttccaattccatacaaggatggacaccatgctagacgtgtctatggcaatggaatatctgcaccatgagcatcacgaggtggttctgcactgtgacttgaagccaagcaatgtgctgttcgatgatgatatgacagcacacgtagcagactttggcatcgcaaagttgctactgggtgatgacaactccatggtcgtttccaccatgcctggaacacttggatacatggcaccaggtatgtacgcagtaacactttgtaatattgcacaatctatagtccgttttagcatattgattgctcaattgttttagcaaatcgaatctgtctgtcctatggaacttctgtgcagagtatggatctcttggaaaggcatcgcgcaagagtgatgtgttcagctttggaatcatgctttttgaagtcttcactgggaagaggcccacagatacgatgtttgagggagaactgagcattaggcagtgggttcaacaagcatttccatctcagcttgacactgtcgtggacagccagctgctgcaggatg

SEQ ID NO: 93762 - DNA, 1492 bp, Zea Mays
cgagaagagccgaagagggctcatatgtataacgtgtatatgtatccttccctcctaatcttccgccccgaacagcattctcctcctccctccctccctccctccctccctctctccgcttcgccaaaccctggtactcagaagacaatggcgacgcagcaaccgcttccccccgccgactgcgtcggcgataacaccgtcgaccgcgacgtctggctggcctgcgccgcaccgttttcccgcatccccaccgtcggcgacgaggtcgactacttccccgacggccacatcgagcagcacctgtccgcggcgccgcagccgctccctgcgcagcaccgcttccactgcaccgtcaccgacgtgagcctcggcgtggacgacaagacggacgaggtgttcgccaaaatctccctcagaccacggccaggccgcgccgccgctcctcctccgggccccggcggcagcagcaacagccccgcccccagccccccacagaagctcagatacttcactaaggagctctcgcaaaccgacgtctacgcaaggttccgcatcccgctggacaacgagcacgtcttacccatacccatggtcgacacggacggcgtgcagcgccaggacgtcgtcatgcgcgacaccagtggcaaatcgtggaggttctccaaaacctacagcgtcaatccgagcaagcaacactcgctcaccaccgggtggttggatttcgccaaggccaagcggctcgccgcgggggacaagatcgtcttcatgcgccgccccaacggcgacctcatcgtcggcgtgcggcgcctcgacgtgcccaggtacccgctgttcgacttccaaggcccggacccggatcagccggcccaggacgtcatggaggccgtacgcctcgccgccgcgggcaggcccttcacagtcacctacttcccgagacaggccgccgtggagttcatcgtcccgcgcagcgaggtggatgacgcgctcgccaccagctgggaaccaggtgcgctggtgcgcatggaggttatggaggacgagaacaggcagtacaccatgtgggtcgtcggccgcgtcgaggcgatccgccaaaacatctggcgaatgctcgagatcatctggggtgttccgtcccatcctcctcctcttgcaacaatgagatctgtgaatgcttggcaagtgtcacgcccctggccaccggaaggtcaccggcgacgtgagccacaccaattcggcgacgaagcgccaggaacacagacgcaactcgaagcacgaaggtaagaaaacttctattcagttctgtatatttctctccccgttccgatgacaggttacagtatatattgcctggtctattgggccggcccactcactgatccctggcttaacagcccaattacttatacacaaatcttggcttgaaagcccatcacaccattacagaatctctatacactaatagcttctacttcctcgtcagcgaccatagcag

SEQ ID NO: 93763 - DNA, 1097 bp, Zea Mays
gctctttcccctccagtcctccacccctgctgactccgttgctgtgcattcctgccaaagcttccccgccgaattccccaacctcccgccggattcgcccagctcgtcgactccggagtccgattcgtgcacggagcagcggcctgggccgccaattcgctcggttcggcgccgcgctgattcgcttcggtactctctttctgcttccccccctggaatgtttccggtgattcgcgcggcatgagctcgggttggaggtggtgcctctgattcccgctggcccgaggcggaggcgcgagggcatgtgggtttctctggtgtggatccggggctgcgtgggcgtcacgttcgtcgatttccagagcgggaggggagccgactagatctctcggctcctgcggttgctgcgctccgtcgggagagttacctgtgaccggagaaggttgccggagggttttgggaggtgaggggacatggaggccgccaggttcggcgcgcggagcagccacttgtacggcagcgggctgggcgagcttgatctcaacaggcgcgagagcagggtgtttggctgggatctcaacgagtggagctgggacagtcagcggtttactgccacgccggtgcctgttgaggcggcgaatggctctggactgaacagctcgccgtcatcgtccgaggaagccggggaagagatggctaagaatggtggcttgggaggtgatactgacaagaggaaaagggccgtggtcattgacgacgacgacgatgatgaaacggaggatcaggacacggtcgtgaatggtggcgggtcgctcagcctgataatagggggtagtgctgctggtgctggagcgatggagaacggcgatgtaaatgaggatgagagaaatggaaagaagatcagggtgcaaggaggcggctcaagtgggccggcatgccaggttgagggctgcggagcagatctgactgcagcgaaggattatcaccgccggcacaaggtctgcgagatgcatgctaaggccaccaccgccgtggtcggaaacactgtccagaggttctgccagcaatgcagtagttatttgttcatagaagaatga

SEQ ID NO: 93764 - DNA, 1158 bp, Zea Mays
aattttgcactcccacccctctaaatttttcagccgccactctcttcctccttctccctcgcgcaggtctgctccagccgacgccctgtcttcttcctcacggtggtcagcagggagctcggccagcagccatggcctcctccacttcttccccatggaagccggctccttctccatgctccctccctagccgagcacctccagcagccatggccgagcttcttttctcccctgctgtcccctgcgcgcagggagcaccaaggccagcgtccccttctccctggtttcccttgcgcagtggcagaagaatccatggacgtcgcctccccatgctcctatgcgtgcagggagctgcgcccttttcttctcgacagcgctcggctccctcctccctgcgcattccctgccccactgccagcaggaggccagcggccctcatcctccagctcccgccatggtcgagctcagcagcgcagggcgcgccctatttccttgctccatggccggcgcccaacagcagtcctgcgcagcgccgctgctccatcccctccacagcgcaggccctcttcctccccacacagccagcgtcggggacattcttccccatggaggccgagcccctctcccaaccagcgccctccctgttcccctggacgacgctgtcctttcccatgccgctgctccaccacgcgcactacctgcttgacagaatgtccgatctatgcacagcccttcttcctcctctcccatggtgctgctcgtcgagccctccatttttttggatgccggcaagaaaaatcggcgcagcagccctccagttcattctccacttccccgtcgcgagtcatcgctctcgcgcttgctgcgcagcgaacagcacgtcggggtgcccgccgggtgtttgctgtttttttgcgcagccccgtggtcgtcgtcgttcaccccggtgagactgcgacgctccttgttcgattccgcatcgacattattttcctatgattaattatgtatgtgtgctgctttgttttatttttgtggaggagagaaccccgtattttgcgaggagaaggcaagtcgttcaacgctcgtcgatggcgaagctatgcacaaatcggaatcaccgtcgtccttacaaacgccgtttgagtttgtttatgg

SEQ ID NO: 93765 - DNA, 112 bp, Zea Mays
tatttttttcatccatctcattacctcgatcttgtctttagaggtaagacagaacaaggcacgtggcggcttaccgttggcattgagcacttgggttggtcggtcacaaagc

SEQ ID NO: 93766 - DNA, 2199 bp, Zea Mays
atgtggaggttaaagatcggagagggaggagggccatggatgcagacggtgagtggcttccatggccggcaggtttgggagtacgacccggacgccggcactgacgaggagcgccgcaaggtggagcagcttcgccgggcgttcacagagaaccgcttccaaagaagggaatcgcaggacctcctcatgcgcatgcagttcaccggacaaaaacatctgcatgcggacgacatgcctgcggcgttcgccaagatagaggagggcgacgaggtgacggaagaaagattgcgggagtcgctgaagcgagcgatggattggatgtctgctctccaagctgaagatggccactggcctggtgatttcagtgggattatgtacatgatgccgttctggattttcgcactgcacatcaccggaactgtcgatgctgtcctgtcgaaagagcatagacgtgagatatgccgccatatctacaaccatcagaacgaggacggcggatggggcttcaatatcatagacgagagcgccatgttttcgacgtgcttaaactacaccagcttgagacttctgggtgaggtgcagcaggaggagaacgatgggctagctaaaggtcgagaatggatcctatcccatggaactgcaactgcagcgccgcagtgggcaaagatactactctcggttattggtgtatatgattggcgtggcaataatccagttgtgcctgaactatggttggtaccacgtttcctcccgatccacccaggacggttctggtgcttcacaagaattacttacatgtcaatagctttcctttatggaaagaaatttgttggtcccattacaccaactatattagcactaagggatgaacttttcattttgccttatgatcaaattgattggaacaaaactcgtaattgttgtgccaaggaggacacatgcaataaaccttcacaaatattcaaatttatttcaacttgtttgaacatttttgtggagccaatgttgaactgttggccacttaacaagttaagagagagagctttgaaccacatcctagaacatatccactatgaagatgaaactactcaatatattggcttatgtcctgttccaaaggcactaaacatgatttgtcgttgggttgaaaacccaaaatcagatgcgctcaagcgacacattctaaggatacatgattatttgtggattgctgaagatgggatgaaaaccaaaatatacgatggcacccacaactgggaggtagcacttatactccaggccatgttatcagcagatactgacaatgaatatggtccaaccattcagagggctatgggatacttaaagagagcacaagttacaacaaaccctccaggggacccgagttactggttccggcatagatcaaaaggatcatggccactttcgactgtagacaatggttggggttcaacggatactagtggcgaagcaactctggcattgttgttgctttgcaaggtatatcccaacctcattgaagattcaagcgaagatgggtggatgttgaatgctgttgattgccttctttcatttatgaacaaagatggttcagtttctacatttgaatgccaaagaacttattcctggctagagattctaaaccctttggagacttttcgaaatattgtcgtcgattacccaacggttgaatgtacatcctcagtgttgcaggctttggtattatttggggacttcaattcagattaccgcagtaaagaaataaaagaaaatgttaacaaagctgccatatatattgagaataatcaacacaaggatggatcctggtacggcacttggggaatatgctttgtctatgggaccctctttgcgataaaaggcttagttgctgctggaagaaattacgagaacagtatttgcattaggaaagcatgcaaatttttgctctcaattcaactcaaaactggtggctgggcagagagctatcgttcctgtgaaagacagatggaacgggacccaacaccattacatcgagcagcaaaagtattgattaatatgcaactggagacaggagactatcctcaacaagaacatgctggcaacaccaactgctctgtatacttcaacttccccaactaccgtattttgtacccagtttgggctcttggagagtatcaccgcaaagtacgtgccaaaagt

SEQ ID NO: 93767 - DNA, 522 bp, Zea Mays
ttggttttgtttattttaatatgacacccacatatagtgacgacacagaatcataatacgtagaaaagccatcatacacaacattcttatcacaagtcatacacaattccagcacactagttcttccacaatagaggttcaaacatacaaaagttccaccacaaaggtttgaagcattcaaacagattgcgcgtagttctgacaaagttctaaccacagatatgttctagcaaggtagaaaaaccttaagcaaaggcatcatcctcagacttggtatgcatccctacctcaatctttctgaagtttcaggacagctcgtagcagtgcattggtctcttcaaacttggtatgcatccccttcacttcctcttgggtctggcgcagcaaactttggttttcttcaagtgcggcctgttgagcttgtagttgtgcttgcaactcttcctgcttcctagcagcttcctctctttcagcttggagtttttcctcaaattgagcttgcatgcgtgcttgtgcagctag

SEQ ID NO: 93768 - DNA, 259 bp, Zea Mays
tggccccacatcttctctcccatactagtccacacaaatctacccaccttcaatccccaatgtcgcagatcagttcttctacacatagatccgtataatccatcgtgtggctcaccttcaaaccttcatatgtttttttgttttcatttcgttctcaacagttcttatcccacgatcccacagtgaagtgtagattgctgtagaattctttttaatctctgtccttttatgtttggtgtattatattgtcttatcttat

SEQ ID NO: 93769 - DNA, 2082 bp, Zea Mays
atgtggaggttaaagatcggagagggaagagggccgtggatgcagacggtgagcgacttccatggccggcaggtttgggagtacgacccggacgccggcaccgaggaggagcgcagcaaggtggagcagcttcgccgggagttcacagagaaccgcttccgaaggagggaatcgcaggacctcctcatgcgtatgcagttaactggacaaaaacatctgcatgcggacgatatgggagcggccaccaagatagaggatggcgacgaggtgacggaggagaggttgcgggagtcgctgaggcgagcgctggggtggatgtctgctctccaagctgaagatggccactggcctggtgatttcagtgggattatgtacattatgccgttctggattttcgccctgcacatcacaggatccatcgatgttgtcctatcgaaagagcatagacgtgagatctgccgccatatctacaaccatcaggttattggtgtatatgattggcgtggcaataatccagttgtacctgaactgtggttggtaccacgtttcctcccaattcacccagggcggttctggtgtttcactaggattacatacatgtcaatagctttcctttatggcaaaaaattcattggtcccattacaccaactatattagaactaagggaggaactctacagtttgccttatgttcagatagattggagtaaagctcgtaattcttgtgccaaggaggacatacgcaataaaccttcagaaatattcaaatttatttcaacatgcttgaacatgttcgtggagcctgtgttgaactattggccacttaacaagttaagagagagagctttgaaccacattctggaacatatccactacgaagatgaaactactcaatatattggcatatctcccgttacaaaggcactaaacatgatttgttgctgggttgaaaacccaaattcagatgcgctcaagcgacatattccaaggatacatgattatttgtggattgctgaagatggaatgaacaccaaaatatacgatggtacccacaactgggagttagcacttataatccaggccatgttatcagcagatgctgccaatgagtatggtccaaccattcagagggctatggaatacttaaagagagcacaagttactacaaaccctccagggaacccaagttactggttccggcataggtcaaaaggatcatggccactttccactatagacaatggctggggctcatcggatactagtgcggaagcaactaaggcacttttgatgttttccaaggtatatcccaacctcgttgaaaattcaaatggagatgagtggatgttgaatgctgttgattgccttctttcatttatgaacaaagatggttcagtttctacatttgaatgtcaaagaacttattcttggctagagattctgaatcctttggagagttttcgaaatattgtcgctgattacccgacggttgaatgtacatcctcggtgttgcaggcattggtattatttgaggaattcaattcagagtaccgcagtaaagaaataaaagaaaatgttaagaaagctgccatatatattgagaataatcaaaacaaggatggatcctggtacggcacatggggaatatgttttgtctatgggactctctatgcaataaaaggcttagttgctgctgggagaaattatgagaacagtatttgcattaggaaagcatgtaactttttgctctcaatacaactcaaaactggtggctgggcagagagctatcattcctgtgaaagacaggtttatgtagagggtcatagcactcatgttgtacaaactgcttgggcgatgctagctttgatttatactggacagatggaacgggacccaacaccattacatcgagcagcaaaagtattgattaatatgcaactggagacaggagactatgctcaacaagaacatgttggtagcaccaactgctctgtatacttcaactaccccaactatcgtattttgttccctgtttgggctcttggagagtatcatcgcaaagtatgtaccaaaagtaattga

SEQ ID NO: 93770 - DNA, 804 bp, Zea Mays
atgtggaggttaaagatcggagagggaagagggccgtggatgcagacggtgagcgacttccatggccggcaggtttgggagtacgacccggacgccggcaccgaggaggagcgcagcaaggtggagcagcttcgccgggagttcacagagaaccgcttccgaaggagggaatcgcaggacctcctcatgcgtatgcagtgtgatatgatgtatgacgcacatgtatgtaagcagttaactggacaaaaacatctgcatgcggacgatatgggagcggccaccaagatagaggatggcgacgaggtgacggaggagaggttgcgggagtcgctgaggcgagcgctggggtggatgtctgctctccaagctgaagatggccactggcctggtgatttcagtgggattatgtacattatgccgttctggattttcgccctgcacatcacaggatccatcgatgttgtcctatcgaaagagcatagacgtgagatctgccgccatatctacaaccatcagaacgaggacggaggatggggcttcaacatcttagatgagagcgccatgttttccacatgcttaaactacaccgccctgagacttctgggtgaggtgcagcaggaggagaacgatgggctagctaaaggtcgagcatggatcctatcccatggaactgcaactgcagcaccgcagtgggcaaaaatactactctcggttattggtgtatatgattggcgtggcaataatccagttgtacctgaactgtggttggtaccacgtttcctcccaattcacccaggtcactag

SEQ ID NO: 93771 - DNA, 494 bp, Zea Mays
aggtgagtgcccgtgcgttgcaacggaaccgtataataacacgataacttatgtacatatgtgtgttatattgtaatgagaaaatgtttcgaaatccatttgtgatcctaaccatacataaattttgttattttaatctaataacatacatctattccatgccacagatttttcttcttcttcgttcatccgaccatggtgcgtttccagacccgttgcctcacttgagccagtttgttctgggtggaacatcattgcttcgaagcctttctgtacgccgcaaggattttctccatctggttcatcatcaagatcagtgttgttacccacataaatttgctaaggcatgattaacacaacataacagacctgcataaaaaccataggaaataagatgccacgaacaaaaggaaaaatcataaatccaattgcaactggactaatctgtgatgcgaagtcgtaaatgtttgcacagatcagtcgagcccaagcat

SEQ ID NO: 93772 - DNA, 996 bp, Zea Mays
acaccacgcctcctcaagaaagaaacccagctataaaaccgctcgcgatccccaggtccactggctcagatcacacacaccaccaaaggccaaagcgggacgggagccacagagatagctagcaagaaaccacagatggcggcgatagcggcggccacccaggcggcgacggtgctactgctcgcggcgctggtgctggcggcgggaccgggcggcgcgcgggcgcagtcggcgtcgccgtcgagccagtgcacgtcggcgctggtgagcctgtcaccgtgcctcagctacatctccgggaacgtgtcggcggctccgccgtcgtgctacgcgcagctgggcaaggtggtgcagtcggacccgcagtgcctgtgcgtggcgctcagcgcggacccggcgtcgctgggcctcaccgtcaaccgcacccgcgcgctggacctccccgacgcatgcaaggtcacgacgcccgacgtcagcagctgcaagggcggcgccgcgggagcgcctgtgacgacgcccgcggggcagacggcgccggccacggggtccaagacgacgcccgccacgtcgtccgtgcccggtgccgccgcgtcgccgccgggctcggctggccgtctcgtcgccggcttcttcgtcgccgcggccgtcgtcgctagcttcgccgcgtgatccggcgctagcttcggtacccttttgtgcgcgtaggaatcgcagcggattttgtgttgtttgtttcatcggcggcggtggtgcgtaggaatcgatcagcctcttgtccatttgtgattcgttcagtgaccgtgagggagagccgtctcttattcatatcgactcgattcgtcacagcaatcgcgcatcgcgctgaataaagacatcgcctgtctcggttttttctttattgcttctcatttggcttgagaaaatttaagttactccctaataaggggtgattataatctcccaaataaacactccgcggaacctaacgttaatggc

SEQ ID NO: 93773 - DNA, 84 bp, Zea Mays
acggccacgacatcacatgaacagggcgccaaaacctctccggctgccacgacggcatgtacttagggctctagctcctctctg

SEQ ID NO: 93774 - DNA, 189 bp, Zea Mays
atggtttatgaagaagctaaaaatcaaaatggtgatgtcaaccataaatacacagagaagagaatgactttgctattgcccggtatcaactttgaggtcatcgaatggcgcgccctaattactagtggtaatcatggagctcgtggaacatgggtcgaaaacaaaagggacaatgtgatggtgatctag

SEQ ID NO: 93775 - DNA, 109 bp, Zea Mays
aatttttgtatttcgctgcctttttcactttgtagtaaagatatattaacagagcccatgcgtcggacaacgatagtcaactatagattaaataattgccaatagccgc

SEQ ID NO: 93776 - DNA, 100 bp, Zea Mays
tgaaatagctgagcatcttccgatccaagagaccatcttccctagcaaacaccaactgacagagtacgctatattatttttccagtacaaaatttactga

SEQ ID NO: 93777 - DNA, 788 bp, Zea Mays
cggctgcggtcccaacacgtgtgcaatgcaagcgtagtgcggctagcctgccccggctgctctgctctagctactacagtacgtggtacggagagaggtggagcgcagtgccagtgggtcacgtaccatcatgtcggcggtggaggggccagggccgggggcgaggcccacgccggtgccggtgccggtggccggggacgcggccgcgagcggtgctggcgcgtgcttcttcttcgtcggcgtcggcttcttgctgggcgcgggcgcgggcgccgcgaggacgggcgccggggccggaggggacgacgacggcgcgggggcgagcgtcggcgctgggaccggcggggaggacgcggcgggcggaggggcgctcgcgcccacgggcgccggcgccggcgccgcggccgggggcggcaatgcgggcggcggcgaggagctggtgggggctggggtgggcggagacggcggtggcgtcggtggggtcggggagtgggtgggcgcgggggaggcggccggggaggtgagcttggcgccggcgtgggacgaggacggggacgcggcgggcgaggtggagatgtgggtgtccttggagggcggcggggaggaggaggatgaggggcttggggcggcggcggcggtagaggagggtgaggtggatggcgcggcggctggtgactgggtctgggaccgggcggtggtcatggcggcggcgaggagcagtagaagctggaggaggcggtgaggggccatggggaggggaggggaggacactagggctctgggctctg

SEQ ID NO: 93778 - DNA, 1082 bp, Zea Mays
agctggggtggagctgtaacagttcgccacggctaggctcctctcccctctcagctctcagctgcccctcctgcatgccgatcgcctccaagctcgtctacttccagcgccgccccgcgccggcgccgcctgacgacccgggtcccgagcctcccgacccccgccgcccccgccgccgccgccgcagcggctccctctcctcctctcaccagaagccggagcatgatgttccagggcaccaaagggatcacgctgctgcagccaagcctccggggccagtcggaaaggcagcagggcttcttcacacggcctccagcgcagggcttcaccaccgcagcacgtcggggtcggaccacggccggcttcccgacgccgtgcagcaggccagggaacggctccttcagaggctcggcagcgtggacctggtcctggcggcgggacgaaggcacaagacatggccgctgcagacactctgggctggagctggaggactcgctcgccccgtcgttgacgcctcttcgggcggcggtcaaaccagctgcttccagttccagttccagcccggtgaacgtgaacccatccctgtgttccccaaaccggcggcctccgcggtacaggaagcagaagacgggcgagccgcgcccgcggacgcagcttctgactgctccatatgcctggagaggtgcggcgccggcggcgggctcacgcagctgcgctgcgggcacgtcttccactccgcctgcctgcagcgctggctgcggtcccgcgccgactgcccctactgccgggccaccgtgcgagctcgctcctaacagcaggaaggaaggaaggatggatgaatgaatggaaagtgtggaactggatgacgatggttttattaaccgtgtgtcgctgctcacctcttgttgtaaccactccactagtatgggttttttttcttttcttcttcctttgcccgttgaggtagactggtagtactgagctttgcggcttcagcgattcagtgtgatatatgtgtgtatgttgtgtctaatctaatgtacgcaggaaaattagatctgtatcgttaaaaagatctcaac

SEQ ID NO: 93779 - DNA, 836 bp, Zea Mays
agctggggtggagctgtaacagttcgccacggctaggctcctctcccctctcagctctcagctgcccctcctgcatgccgatcgcctccaagctcgtctacttccagcgccgccccgcgccggcgccgcctgacgacccgggtcccgagcctcccgacccccgccgcccccgccgccgccgccgcagcggctccctctcctcctctcaccagaagccggtgagtactgaccgagtacccaacaacacgctgccgttccgttccctctcacctcctgccgttttgtttgcttacataaataaataagtaaattaaagccgcggccttttgcgttttccccgagtgaagaaaccggagggttttcttcttgattccaaaactccggtcttccagcagactgcagatcgtatccgtaacggagaaaaaaggttggtgttttcttggtggagcagagctgccgatggatgcagatgtctagtgtactgtactgtacacccttatggttgaggagtccatcagtaattcggtttcgatgaaggcctaggcctagcctcctcgttcttcaggagcatcgaggagtccaccagcgtcctggaatattcggcaccgcttgaatgagaagttagctcatagtccatctcgaactaggcagagtattattgtagcgaacctagcaggcaaaaaaaaaaaacagaggatatcctaagttagaaagcatggatgaatccctggcatggatgattgcagcctctcaaaatattagtcaaaagaaaagagagtgtaaaaacgatgtgggcttgtacaattggtataaacttgaatgggcaaatttgtgtt

SEQ ID NO: 93780 - DNA, 2052 bp, Zea Mays
aaaaaaaaactggtcccctccgccctccgccgtaccaccgcgcctccgcatttcgcatcaagccagagcgggggcagaggcgcctctcccgccggagacccgagcgagaaccgccgcttccccctccttctcctcattttgaaatcgcgttttggcggcctatctcctccgcaccgcgcaccatctctcctccgctgcaacgctacttaaccgcctcgatttgctccccatttccccgtccagcctagatagacctgagccgaaaccctaggaccccgcgcctccgcttccgcttccccctctcccgcagctgacgaggccgacgatgggggacaaggagaacgcacctcccttgggggcccggggcgcggcggcgccccggctcacgcgggccgcggccaagcgagctgcggcggcggcggcggcggcggagggtccgggcgacgccaagcggcggcgggtggcgctcggggagctcccggcgctcgccaacaacgccggcctccgcgcgccgtcctgccccgtcaagccctcgaagcctgcgtccaggcccgggaggcacgcgaggaatgttgcgccggaggcccgcgggccctcctccgcccacgaggccgagcgctgcgcgtcctccccgccgcgcaccgccgacgccgacgccgagtctaactccgtctccaaccccgcgccgcgcgccaccgcctacgccgactcctgcgcttcctcctcgccgccgcgcgccgccgccgccggggcgcccgccgacccccagctctgcgggtcctacgcctccgacatctacacctacctccgctccctggaggtactcagctccgttcttctccaacccctggcatctccgcggattcgacatctgcgccgatctgacgctggcttgctacggatttggggctgcgggtgcaggtggagccgcagcggcggtccagacccgattacatcgaggcggtgcaggcggacgttacggcgcacatgcgcggcatcctcgtcgactggctggtcgaggtcgccgaggagtataagctcgtcgccgacaccctgtacctcgccatctcctatgtggatcgcttcctctccgtcaatgcgctcggccgcgacaagctgcagctccttggcgtcgcctccatgctcattgctgcgaagtatgaggagatcagcccgccgcacccggaggacttttgctacatcacagacaacacctacaccaaagaggagctcctcaagatggagagcgatatactcaagcttctcaagttcgagttgggcaatcctaccattaagaccttcctgaggcggttcacaagatctgcccatgaagacaagaagcgctccatcttgttaatggaattcttggggagctacctggctgagttgagtctactggattatggctgtctccgattcttgccatcagtagttgctgcttcagttatgttcgttgctaggctgaccattgatccaaatgccaatccttggaacatgaagctgcagaagacgacaggctacaaagtttctgaactcaaggattgcatcgtagccatacgtgacttgcagctcaacaggaaatttccatcattaacggcaattcgagacaagtacaagcaacacaagttcaaatgtgtgtcaacgcttcttccccctgttgtggtccctacttcatactttgaagacttagctgagtagctgctcttggactgcaccactgtgaggctaacaatctgagctctccttgagctcttagggacgggagaataactgtgttatgagcttcttctcagttaagtagggttccaaaagctatttaagtgaggttctttaggaatcgcagctgagttactagtagtgaggccaggcattctcttgttttgtgaattgtattctttgtatgatatcctagtcacatcttgccttggtctgttgcccacaatgtaatgtttgatacgttagacctttccgtctgattgatctcagtaacaaattctgttactccatccatccaaaaaagaatgcaattctagcatagtaccaagttaaagt

SEQ ID NO: 93781 - DNA, 1895 bp, Zea Mays
aaaaaaaaactggtcccctccgccctccgccgtaccaccgcgcctccgcatttcgcatcaagccagagcgggggcagaggcgcctctcccgccggagacccgagcgagaaccgccgcttccccctccttctcctcattttgaaatcgcgttttggcggcctatctcctccgcaccgcgcaccatctctcctccgctgcaacgctacttaaccgcctcgatttgctccccatttccccgtccagcctagatagacctgagccgaaaccctaggaccccgcgcctccgcttccgcttccccctctcccgcagctgacgaggccgacgatgggggacaaggagaacgcacctcccttgggggcccggggcgcggcggcgccccggctcacgcgggccgcggccaagcgagctgcggcggcggcggcggcggcggagggtccgggcgacgccaagcggcggcgggtggcgctcggggagctcccggcgctcgccaacaacgccggcctccgcgcgccgtcctgccccgtcaagccctcgaagcctgcgtccaggcccgggaggcacgcgaggaatgttgcgccggaggcccgcgggccctcctccgcccacgaggccgagcgctgcgcgtcctccccgccgcgcaccgccgacgccgacgccgagtctaactccgtctccaaccccgcgccgcgcgccaccgcctacgccgactcctgcgcttcctcctcgccgccgcgcgccgccgccgccggggcgcccgccgacccccagctctgcgggtcctacgcctccgacatctacacctacctccgctccctggaggtggagccgcagcggcggtccagacccgattacatcgaggcggtgcaggcggacgttacggcgcacatgcgcggcatcctcgtcgactggctggtcgaggtcgccgaggagtataagctcgtcgccgacaccctgtacctcgccatctcctatgtggatcgcttcctctccgtcaatgcgctcggccgcgacaagctgcagctccttggcgtcgcctccatgctcattgctgcgaagtatgaggagatcagcccgccgcacccggaggacttttgctacatcacagacaacacctacaccaaagaggagctcctcaagatggagagcgatatactcaagcttctcaagttcgagttgggcaatcctaccattaagaccttcctgaggcggttcacaagatctgcccatgaagacaagaagcgctccatcttgttaatggaattcttggggagctacctggctgagttgagtctactggattatggctgtctccgattcttgccatcagtagttgctgcttcagttatgttcgttgctaggctgaccattgatccaaatgccaatccttggaacatgaagctgcagaagacgacaggctacaaagtttctgaactcaaggattgcatcgtagccatacgtgacttgcagctcaacaggaaatttccatcattaacggcaattcgagacaagtacaagcaacacaagttcaaatgtgtgtcaacgcttcttccccctgttgtggtccctacttcatactttgaagacttagctgagtagctgctcttggactgcaccactgtgaggctaacaatctgagctctccttgagctcttagggacgggagaataactgtgttatgagcttcttctcagttaagtagggttccaaaagctatttaagtgaggttctttaggaatcgcagctgagttactagtagtgaggccaggcattctcttgttttgtgaattgtattctttgtatgatatcctagtcacatcttgccttggtctgttgcccacaatgtaatgtttgatacgttagacctttccgtctgattgatctcagtaacaaattc

SEQ ID NO: 93782 - DNA, 2681 bp, Zea Mays
tgacacgctagatctggggggagagagaagagaaccgacgtgtagggggaccgcatgcaaggggagggggagaggcagcggtaaccgctgcgcacagccttaccccatgttttcccgcttattttgctgcccgccgatgctagagctgtgtcttgttccgatcccgaatcgtttgtgacgaagagttcttcgcgctgacgtcaatatatagagagagctaaatacagtttccagctacaggaacacttggttgcagcgccatcaaacaattctaacagcgactcaaacaacaacgccagcagcatcaacaatatgtccaaaattcagtaccaccacatggtttctcatctgacggtgagctgaacctgatcgcatctccagaccagtttattcagcagatgaacatgaacctcgacgaaggccctgttccaatgtcgcgagataaactttagcagctattttttagctacttttagccatttataggccccatttcaatctcacgggataaagtttagcaggaagctaaagtttagctcatgagattgaaacggggccgaactcacgcactcgatctcgaaccaaccagaccacaccagcgtatcaccatcagagcctgaggtccaagtcgatcttactcggctgaatcggctcacacgcttgctcatactccgagtgcggcgctctcagcctgaagctcccaggccaggccgagctcggcgcctcctcgcacgggaccgttgcccaggccgccgccgccacgccgccctcgaggaacctcgccgccgtcctgaccgccggcgccggcgccgggttggctcggagggagcgcatgagggcggcgtgcgcgtgcagcggcaggccgcccacgaccacccgctgcgcgtggtacgaggatcgcttggcggcgctgcgctcccgcttgtgcgcgttctggtgcccgcccagcgcctgcgagctgaagaacttgcgcaggcagaagttgcaggagaacaccttgtgcgggggcggcttggcggcggacccggacccggacccggactcggagtccgcggagcagctcgcggcgtccggggacggagacggcgacggcgattcgctcgcgcccagcgtcaggttcagccacgccgcgccgtcgccgtgctgctccctggtgagtcgctgctctgctgtgctggccttgctcactactgacgatgcctcgtctcctcgctccatatctctctctcttgctctgcttgttcttgctttaggttgcaggcttgcagcccctggatggctggatggtgcatcagaagcagcttgcagtttgttgctttataaaggaggacgaggtacgactagcatcattgaatttttttggggggaagggggtaataattgagggcttgtctctgtgaggaatctggaggtgaagaactttgtctggagttttcagtggatatctatcaagttgcttatctatctcccatccctgggctctggcccatgcatatataaatgataaatcttttatcactccacttgccatggacgacccccatggcgatggcgatttgatttcctggatcacccgccccatctcacttctcgacgtgcgcgcgccgctgttcctcttcctttttttcccaaaagaaaacggagtgacaatacagctcatggcaaaggtttttatgctctccatccatccatgcaggtgccatccggccaccctgcaggggatgctatagtagctaccgaaagcgacctgccattgacaagagtcatgagccttgttgggattattatgaggaacgccggcagcttcagactctaggggcgactgttaggtcaggccacaacagggaatccctcctgcgacaggcaccttgtcctgtcttgtgcgccactgttgcttcattgcttgggcatttgtgcggtgtgcactgctgatgacacacacagtccagcacaagcctttttcatcaattccagtggcagcgtgcctagcttctctggaaaccaattgcttgcttgcttgcttgcactgaaaggatgctggttaatggttaggtcaggactcacgatgatccggatcaacaggcgacagcagcaatgggtgacgagagaagtagtaacagctatctctttctttgggatccaaataattgagttgtttttttgtactgcagatgcgctgtggccacatgctgttctttctgctaacttccgcatcaggtggtctttctttctttctttcatggcgagatgggacgggagccgagttcttgctcgcctttgcttgtgcaagccgtgacggcgatgacgtcggaacccgaatgtgctgctttggggctggtgggatggatagggataccgagtcaacttgatcaagatagaaaaggagagacgcctaggggttcctcctccttccaggctcccacgtatactttacaatatctgcagacatgtgtcattttcggtcagatatgcagatctaggtgcatattttcaagcacaaattcagttgaacacatattgacactcaaaagtgttgttgcctagaactttagcttgcactgttggtaaagtaacgaggaggagtatgttggggccttcgtctttcgaaggtgctcaaaaacacacttaattattggttgtcagcatgttcacaagtgttgtaggaacttcggtattgaata

SEQ ID NO: 93783 - DNA, 2424 bp, Zea Mays
ctttagtctgacatccctttttttaatcagataatacacctcttcttccctcaccttcctccttctcccagctgcggcgccaccctcgggccgtccgccgtcggcggccacgaccctggtgtaatctgctccatacgtggcggcgcctgcaaaagccacgctgctgccagtgccagccatggatgcagtggcgaccagcgacgccgtactcctccttgccgccgtagctatctccctgctcatcactgccactttctggagcaggcatcgtcgtcagggcgaagcgccgagcccgccgtcgctaccgctgctgggccacctccacctgctcggcaacggcaagccgctgcaccactcgctggcggcgctggccatcgcgcgcggcaccgggggcgccccggcgccgctcctgtcgctgcgcctgggcgcgcggcgcgcgctgctggtgtcggagcacgccgcggccgaggagtgcttcacggcgcacgacgccgcgctgggcggccggccgcggctgctggtcggggacaggctcaactacgggtacaccacggtgggctggtcctcgcacggcgaccactggcgcgccctccgccggttcatggccgtcgagctgttcgccgcgtcccgcctcgccgcgcgcgccgccgaccggcgcgccgaggtcgccgcgctcgtcggcgccctggtccgcgacgccccccgcgccggcgccgcggtggcgctccggcccaggctcttcgagctggtgctgaacgtgatgctgcgcgcgctcaccggcgcgcccggccacggcggcggcgacgtgcgcggcctccaggagatcatcgaggagaccttcgcggtgaccggcgtcatgagcgtcggggacttctacccggcgctgcggtgggtggaccgtctgcgcggggtcgacgcggccctgctccgtctccaggcgagacgcgacgcgttcgtcgccggcctcgttcacgacggacgccgaagccacaatcgcaaagctggcggtggcggtggcccaacagacacggagaagaggagcaccattgacgagctcctgtcgctgcaggaaactgatcctggctactacaccgacactgtcatcaaaggcattgtctcgatactgctcagtgcgggcacagacacgacggcgctgacaatggagtgggcaatggcgcagctgctgatgcaccgggacgcaatgcagaaggcgagagccgagatagacgccaacgtcggcacatcccggctggtagacgagtcggacacgactcacctcccgtacctgcaatgcgtggtgaaagagaccctgcggctctgccccgtcggcccagtcatcccggcgcacgaggccatggaggactgcgccgtgggcgggttccgcgtccggcgcggcaccatggtcctggtgaacgcctggctcatccaccgggaccccaggctgtgggaggcccccgaggagttcaggccggagcggttcctggacgccactgccacggtcgccgcccccttgctgccgttcgggcttggacggaggcgctgccctggggaagggatggccttgcgtctcctcagcttgactctggcggctctcctgcagtgcttcgactgggaggtcggtgggtgtgttgacatggccgaaggcgttgggctgtccatgcccatggccaagccgttggcggcagtctgtcggccccgggagttcgtccagaccgtgttgtctgcttcaacatgagtagccggatgcggttcttttccctgatacatgaatccagaaggggattgaagaggtttaaatccccttctagttatttttgactaggaggaggtttaaatccccttctaattatttttgactaggaggagatttaatcccctctatctctttctggattgttgtaaccaaacatgcccccgaagaataaataaggattgggtgaagcagaactgaagctattcagtcacgcagaactgaagctattcagttcgtccagaccctgttgtctgcttgaacatgatcgatgcatttgttctttgtcaacagtgggtgttgagtccttgtttccatgtcgtgcggcaggttgtttctgctgctgtattgtttgtttgattgatgttctttaggttcggtttcaacggtctgggattttttttctcttcattttgggcctgtagtgctgtacatgtaccttacctgttgtctcttgaaataatgggcgtgttcggctggctgcaagccgacactgttgcagctgtttggactgctgcagctgcaatccatagagagaaaaatactgtagaagccgcagccgcagtcggattgcagccgcagcaagccgcagcgaacaagctgataacacggcaaatctcctgccgtattttccagaaaatagaaatcatccagcggttttcatagaacatacc

SEQ ID NO: 93784 - DNA, 342 bp, Zea Mays
atggccgtcgacctccagctcgccctgccgccctctctgcagatggcgtgctccatctccctatcatgttgccctacttttcctgcagcaagcatgccactcttgcttccccatggcgccaaagtcaccagccctctcccatggacgtcgctccctttcctgcagcaggccagtgcccctctgctcctttttcgccatggctgcacacctatctgtagcagctcctcgctgccgaacatcctcctgtatccctacaccatccgcacccatatggtgtttgacaaaatgcccaagtggagtgtcgtgtcatggacaaccctattagcgtcgtcggatgtttga

SEQ ID NO: 93785 - DNA, 355 bp, Zea Mays
ctatctgtagcagctcctcattgtcggacatcctcctgtagccctgcaccatccgcacccatatggtgtttgacaaaatgcccaagtggagtgtcgtgtcatggacaaccctattagcgtcgtcggatgtttgatgttttgcgtagcccatccacgaaaccgccaaccctcggtgagatttcgttcttgcttcgtcgtttcatcgatcgccgtctatttgctaatgtgaagtgtgtatatgtgcctatgtgtgttgaggagcgaaatccgtggaatctaggtgaaaaagaaacatagcacgtctgttgcttactagctgctgggtgaaaggattgaatcggctgtcgtggtcgtt

SEQ ID NO: 93786 - DNA, 327 bp, Zea Mays
atggccatgcggcaaccacagaggccattattctgcggtgagatttggtttccacggccgcgttgcgctgggtggatctggatctgggcagagccgtggtttgaggtgctttggatcggggaatggggctcggtagtggcagcggcgacagtggaggtgaagcctaaggagatggccgatgggaaggtcccataccaccatgcccgcgtccttgtggggtggcgtccgcaaccaagccagtggtcagagattcatagcacgcccatccggcgtcgtcgtgcctgcttccccgcactcgctcacatctcgtgcaaccgtcgccgctga

SEQ ID NO: 93787 - DNA, 1512 bp, Zea Mays
atggacgcggcggcgacggccgtgtcgtcgagcggcgacgctcccgttctcctccttgccctcgccgtctccctgctcctcctcgcggcggccgtctggtcctcgaggcggcgtgccgctgcaccgctcgctggcggcgctgctgccgcgcacggcgcggggggccagctggcgccgctcctgtccctgcggctgggcgcgcggcgggcgctggtggtgtcggagcgcggcgtggccgaggagtgcttcaccgcgcacgacgccgcgctggcgggccggccgcgggtgctggccggcgaccggctcgggtacgggtacacgatgctggtgtgggcgtcccacggggaccactggcgcgcgctccgccggctcctggccgccgagatcttctcggcggcccgcgtggccgcgcgcgccgccgaccgccgctccgaggtcgccgcgctcgtcaccagcctggcggcgctccacctccactgcggcggcggcgcggtgagtctccgacccaggctcttcgagctggtgctcggcgtcatgctgcgggcgctcacgggagagcgcgcgcacggcggcgacgtgcgcacgttccagggcatcgtggaggagacgttcgccgtgagcggcgcgcccagcgtcggggacttcttcccggcgctgcggtgggtggaccgcctacgcggcgtcgacgcggcgctcgtgcgtcttcaggccaggcgcgacgcgttcgtcggcggcctcgtccaggaccaacggcggcgaaggcgcgacgccggtgatggccgaggccgacacgcggcggagaagcagagcatcgttgacgagctcctgtcgctgcaagaaactgatcccgagtactacacggacacgatcatcaaaggcgtcgtcttgatgctactcactgccggcaccgacacgtcggcgctgaccaccgagtgggcaatggcgctgctgctgacacacccggaagcaatgcggaaggctagagccgagatagagactagcgtcggcaccgcgcggctcgtggaggagtcggacatcgcgaacctcccgtacctccaatgcgtggtgaaggagaccctgcgcctgcgccccgtcgggccggtcatcccggcgcacgaggccatggaggactgcaccgttggcgggttccatgtcgaacgcggcacgatggtcctcgtgaacgcctgggcaatccaccaggatcccaagctctgggacgcgccagaggagttcaggccggagaggttcctggacgccgccggtacggtgaccgcggtcaccacgcccatgctgccgtttgggcttggacggcggcgctgccctggggaggggttggcgttgcgtctgattagcttgacgctggcggcgctcgttcagtgcttcgagtgggatgttggtgaaggcggtgtcgttgacatgaccgaaggcgttgggctgacaatgccgatggccatgcccttggctgctgtctgccggccccgggagtttgtcaagggcatgctctctacttga

SEQ ID NO: 93788 - DNA, 1207 bp, Zea Mays
cccccctgcccatctcctcctctctcaattcttgcagccaccaaaccctagccgcccccccaatcccctcctcccaaggtgccaatccttgccgctcggatcatcgtcgcgtggtgcaagtcttcaatcgttttggtggagggaagaagggagaaaggaaagggagagaatccaaggtggtggactcccagatcgttcttagggaattgcccaaacttccggtgaaggcaagtaaaactgtgatggttattccgtctgtcagatgaggagtcttacacttgtttatgttgtgctattatgttcaaattcatattttcttttgagtaccatcatttgaaaatgttcatgtttcatggatttcatatgttgagtttgaggtttgattatgttactcaagtggttattatgtggaatgggaggaagtaaatgcctagcacatttttatttgggaagaactcatgatgttgtcatgcataatgcactcatcatccattgcattgaagttttgtcgcgatattatggtccgaccgtaccggtacattgagcatcatatgttgcccgagaaggggtatggtgcagcttcatatccttagagatatggaggcagaagtcattattgcatttgtagccatgtgcattcatgggagaggtgttgaatctattatgtggatgtggataatttggacttgtgcatggtgattctacttggcgttgagtttttagttacttgtttacttgctgcaatttactgttcaaaagaaaagaaagaagtcctgaacacgtggttgtgtaagcacagttgatttacaatgtcctatttattgttgttatgtttacttgctgagatgtgttatcttacatcttgcattgtttgatgcaggcacctaatttctgctttgggaatagagggatgtagcagcacagccactacacctttaataaaggaaccaccatttaataatgttgttaatcaaagttggtcaagtctagtgaattgctttgttcttcgttgagcgtttattttggggtgggctgagtttcttatcccatttgttttgcttcagttgggtcataattaagttttaccactttgcatttcagtttctactatgtgaattatatgtctttatatctagtatgagcttcatgtttcccctccttgttatgctagttttcaaaggaggtgctgccggatttttgctatata

SEQ ID NO: 93789 - DNA, 3327 bp, Zea Mays
tctgcaaacgttaaaaaaattaactctcttctcgggagagcccaactagactcgcagtcgcgtccatggcgatcttggtaggcctcgtcgccgtcctctccgccctcttcgccgccgcgcttcggcgcctcctaatctcttgtcgccaccccgcatacgccgccggtttcttccacccgtacaccaacgacggcggcggaggcgagcgcgtgctctggtgtgcggtgcgcgccgtgcaggagctttgcccggacctcccctgcgctgtctacaccggcgatgccgatgcggcgcccgaggccctcgccgcacgcgctctcgaccggttcggtgtccgtctcctccgcccgccgcaggttgttcacttgaataagagaaagtggatcgaagcaagcacgtatccccacttcacaatgatcgggcaaagtcttggctctgtttatcttgcatgggaagcccttactaaatttaccccgcagttttactttgatacaagtggctatgcttttgcgtatccactagctcggctatttggttgcaaagtcatctgctatactcattaccctacaatcagttctgatatggttgaacgtgttaagcaccgcagttctatgtataataacaattctcttatcgcagggagcatttggctatcccgatgtaaaatcctctactataccatattcagttggttatatggtctggtgggttcatgtgcgcatcttgtaatggttaattcctcatggacaagatcccacatcacaaatatttggaagatcccagagcgtactaagagggtgtaccctccatgcgatacttctgctcttcagatgcttcccctggaaagaccaacaacacctcctgttcttatttcagttgcacagttccgcccagaaaaggcccatggccttcagctggaggcatttgcacttgctcttcaaaagctagaccctgactttcctaagccaaagattcaatttgtcggtagttgccggaataaagaggatctggacagactacaaaagcttaaggacaggtccactgaactacacatagatgagcttgtggagttccacaaggatatttcttacagggacctggtacaatttcttgggggtgccattgctgggctccattcgatgacagatgaacatttcggaataagtgttgttgagtatatggcagctggagctattccaattgcacataaatcggcaggaccgatgatggacatcgtgctagatgaggatgggcatcaaacaggatttctagcctccgagaaggaggaattcactgaagcgattatcaaggtcttgaggatgccagagtcggggaggcaagaaatggcagctgcggctaggaaacgtgcacaaagattttcagatcagagattccaccaagatttcactgagaccgtccgccctattttgtcagcaagggaaggctgactgacaagctgcagtttccacctaacaatctgaattctctgtcaagtttcacacggtacagtgaaagacttgcaaggggcactgaattggcagattattgctgctcccttttcccagactgcttgtgtattgtgctgcatcgtgtaacgctactgtgcagaaatagatcacagaaagaaaactttcgtcagcgatatagaattcaaaatggtgatcgtggtgcacggttttgaatctttcttgcggcactctagtaccaagttcatctttgtactgagcaaaagcttctgcttgaattgtgccactgactggcggacccatggactttttatactaattcaatctgtcttccactctagaatttccatgatggagacgcaaatattgatgaactataatttactaggaattccttagataaaacaaatgggtaagcacgttatcaccagggctttctgatcttagtgatctgccatgcacgtaacgaagtacacgaataacaaactcaaccaatctctaagctgatcaaccatgtctcattcaacagatgggagccaagtccagggagctccacagcagcacgtcgccgtcactgtcaccatggctcgcctcagacgacgaacttgtcgcctccggggcgccgtcaccgggtgaacgctcctcacgaggcggcttgacatcctctgctgtatccattgatggttcctgctcgtgctgctgctgaactatctctcgctgcttcttccggcacgcctccctcagcccggagagctgatcacgcacggcgtggccaccggcagcggcgccgaggcgcatcttgatgcactccgagacgccgctgagcgcgtagagcgacgccgagatcttcctctcgtagtccatcctgctcatcatcagctcctgaacggccgtggccggctcgccaccgccggcctccaccgcgccgccgagctctgccgccaccacctcgaacggcgagcagagcccgccctcgcaccccgcgcccggcgacgcggtctgctggtccatgaactggaagtccagctcctcctcctcctcctcttcctcctcttcttcctcgtcctctatttcttgtgagctgttctcgtcgctgccgcagtcgtagctcaagaagtcgtcgacttggaaggcgcactcctcgccgccgccgtacggttccgcgcacagcggcccctgcagcagcgccgccgccgcggcctcctgctgccgagctggggtggcgttgaggaggagctgctgctggttgttgcgggccctgagccgcaggagcaggaggttggtgaccttggacggaagagccggcggctgcgttggagaccccatcagccccggcagcggcggcggcgtcggaggaggcggcgcgggatgcgcggcggcggctactgcgacggaggaagccggcgaggggcgcggccagaagttggtgcgcgtgttggcgccgcggaggaggcacgcggcctcgtcgtaggcgcgggcggcttcctcggccgtgtcgaaggtgcctagccacacgcggatcttctggatggtgtcctttatctccgccacccaccgccccgacggccgctgccgcacacccacgaaccgcttccttccccgccgctgctgctgcgccgccgccgcctcagccaccgcggccatgctagtaccgcccgacgatgcccatgcacacgcgtctgttgaagccagagccagcggtggtggcagcgagtggacgccgtcgatacccgcggcggagtcggaggccttgcgcttcctcgccatggatgtagtagcccgatcgagctcagcgcggtggagggaggagatgatgaacaagcgcactccactgcaatatatagtgggagaggagggagtg

SEQ ID NO: 93790 - DNA, 3746 bp, Zea Mays
tctgcaaacgttaaaaaaattaactctcttctcgggagagcccaactagactcgcagtcgcgtccatggcgatcttggtaggcctcgtcgccgtcctctccgccctcttcgccgccgcgcttcggcgcctcctaatctcttgtcgccaccccgcatacgccgccggtttcttccacccgtacaccaacgacggcggcggaggcgagcgcgtgctctggtgtgcggtgcgcgccgtgcaggagctttgcccggacctcccctgcgctgtctacaccggcgatgccgatgcggcgcccgaggccctcgccgcacgcgctctcgaccggttcggtgtccgtctcctccgcccgccgcaggttgttcacttgaataagagaaagtggatcgaagcaagcacgtatccccacttcacaatgatcgggcaaagtcttggctctgtttatcttgcatgggaagcccttactaaatttaccccgcagttttactttgatacaagtggctatgcttttgcgtatccactagctcggctatttggttgcaaagtcatctgctatactcattaccctacaatcagttctgatatggttgaacgtgttaagcaccgcagttctatgtataataacaattctcttatcgcagggaggtatgcactgctcagagtgattagtttcaactcttcttatcgtgcactagtatattaatacaggaaaaaacaagaggcattactgtatctgagaaaaaaattgcaaaacatgataaaatcaccataatgtgctagctaaccatgcatgtttgtcctcagtgctgtcttaatctatcctacgctctttattaacacatgctttgtccttcttaagatgtcacatttagattaataggatcaagtaatgttcaactagtaattattttgccactcattggtttttgcaatctagatgtcttttgctgtttccgtagctattaattatctttgtttctcaatatgtatcaatcattatatctttctgttcttatgtaacaataatgaccatgaaaactaattgggcactcattctactgtagcatttggctatcccgatgtaaaatcctctactataccatattcagttggttatatggtctggtgggttcatgtgcgcatcttgtaatggttaattcctcatggacaagatcccacatcacaaatatttggaagatcccagagcgtactaagagggtgtaccctccatgcgatacttctgctcttcagatgcttcccctggaaagaccaacaacacctcctgttcttatttcagttgcacagttccgcccagaaaaggcccatggccttcagctggaggcatttgcacttgctcttcaaaagctagaccctgactttcctaagccaaagattcaatttgtcggtagttgccggaataaagaggatctggacagactacaaaagcttaaggacaggtccactgaactacacatagatgagcttgtggagttccacaaggatatttcttacagggacctggtacaatttcttgggggtgccattgctgggctccattcgatgacagatgaacatttcggaataagtgttgttgagtatatggcagctggagctattccaattgcacataaatcggcaggaccgatgatggacatcgtgctagatgaggatgggcatcaaacaggatttctagcctccgagaaggaggaattcactgaagcgattatcaaggtcttgaggatgccagagtcggggaggcaagaaatggcagctgcggctaggaaacgtgcacaaagattttcagatcagagattccaccaagatttcactgagaccgtccgccctattttgtcagcaagggaaggctgactgacaagctgcagtttccacctaacaatctgaattctctgtcaagtttcacacggtacagtgaaagacttgcaaggggcactgaattggcagattattgctgctcccttttcccagactgcttgtgtattgtgctgcatcgtgtaacgctactgtgcagaaatagatcacagaaagaaaactttcgtcagcgatatagaattcaaaatggtgatcgtggtgcacggttttgaatctttcttgcggcactctagtaccaagttcatctttgtactgagcaaaagcttctgcttgaattgtgccactgactggcggacccatggactttttatactaattcaatctgtcttccactctagaatttccatgatggagacgcaaatattgatgaactataatttactaggaattccttagataaaacaaatgggtaagcacgttatcaccagggctttctgatcttagtgatctgccatgcacgtaacgaagtacacgaataacaaactcaaccaatctctaagctgatcaaccatgtctcattcaacagatgggagccaagtccagggagctccacagcagcacgtcgccgtcactgtcaccatggctcgcctcagacgacgaacttgtcgcctccggggcgccgtcaccgggtgaacgctcctcacgaggcggcttgacatcctctgctgtatccattgatggttcctgctcgtgctgctgctgaactatctctcgctgcttcttccggcacgcctccctcagcccggagagctgatcacgcacggcgtggccaccggcagcggcgccgaggcgcatcttgatgcactccgagacgccgctgagcgcgtagagcgacgccgagatcttcctctcgtagtccatcctgctcatcatcagctcctgaacggccgtggccggctcgccaccgccggcctccaccgcgccgccgagctctgccgccaccacctcgaacggcgagcagagcccgccctcgcaccccgcgcccggcgacgcggtctgctggtccatgaactggaagtccagctcctcctcctcctcctcttcctcctcttcttcctcgtcctctatttcttgtgagctgttctcgtcgctgccgcagtcgtagctcaagaagtcgtcgacttggaaggcgcactcctcgccgccgccgtacggttccgcgcacagcggcccctgcagcagcgccgccgccgcggcctcctgctgccgagctggggtggcgttgaggaggagctgctgctggttgttgcgggccctgagccgcaggagcaggaggttggtgaccttggacggaagagccggcggctgcgttggagaccccatcagccccggcagcggcggcggcgtcggaggaggcggcgcgggatgcgcggcggcggctactgcgacggaggaagccggcgaggggcgcggccagaagttggtgcgcgtgttggcgccgcggaggaggcacgcggcctcgtcgtaggcgcgggcggcttcctcggccgtgtcgaaggtgcctagccacacgcggatcttctggatggtgtcctttatctccgccacccaccgccccgacggccgctgccgcacacccacgaaccgcttccttccccgccgctgctgctgcgccgccgccgcctcagccaccgcggccatgctagtaccgcccgacgatgcccatgcacacgcgtctgttgaagccagagccagcggtggtggcagcgagtggacgccgtcgatacccgcggcggagtcggaggccttgcgcttcctcgccatggatgtagtagcccgatcgagctcagcgcggtggagggaggagatgatgaacaagcgcactccactgcaatatatagtgggagaggagggagtg

SEQ ID NO: 93791 - DNA, 778 bp, Zea Mays
caaaaatctttgtacgattgtgcgctgtcgaatctctctctgctgtgcacacgcgcgcaggagcatccgggcttgtcgaagggcgagaagaagcggctgtgcgcgctgatggactgcaggaagctgacggcggacgcgagcgagcacgccgtgcagaacgagcggctgcccctgcgcgtggtggtacaggtcctcttcttcgagcaggtccggcagtcggcggcggcggcggcagcctccgccgcccccgcgcgctcgctcatcctgcccagggacgacggcgcgtcgtacggcagctcgaggtcggcgaccacgacggcgacggaggacgagcagtggggcagcggcgccgtggtgggcgcgcctgtgacgacgtcgacgtcgggcggcgccggcgacgccggctcgctccggtccatgagccagctgtcggccaacgagaacgggagaagcggcggcggcggcgacaggaagaaggccaagggcggtgcggtggcgccggcgccggtgaagagagtgctggggaagctgtggtccggcaaggcgagcagcggcgggtccgacgacacgtcggccagccccgttgggtccctcaacctggaggagaccaagtcaatgtcgtcacagatcacgaggcattctgtgtcatagttactatattactgtatatgttctctttttttttgggtgatggttttgttggattggatttgacttacataattatggagggtgtttggtaattggtacatgtggtaatggagaatttctcgtcacg

SEQ ID NO: 93792 - DNA, 2690 bp, Zea Mays
gcccccgaagagaacgttggaagctgtatttttcgagtctatcattttagactgatcctatggaaagtgcaaaaagttcagggaaatgcaggtgtgagagagagagagggaggggggcagaaaagtcaattggttgcccgagcccagcagcttttaagctaaaaataaacaggctccatccaccactctcactcctttgcattggagtagcagcaaagcagctcggccagccagccagtgggtctgttccggaggcacacacgcacagttgctgctgaagcacacggcagttgccttgcctgttcgattgctgcttccttcctcctccctcgagtcttcttctcagcccagagagacagacgccaaggaagagctggtaggtgccgcttgctctgcctccgatccaacccaacccaaggcagcagcagcagcgggtacgttcttctcggccatgcatggaatggaacgaagaccgcccaccgccggcgccgcctagatctctgcatccggtggccgccattggcggttcttggctccgattcggtgctgcctggtgacgagtaaaagcgaaggaaaaaaaaagaaggaagggacggcgattcaggcctcactcttggcctgtgagcctgtcgtcgacatgaagtacatgaagcttggatccaagccggacgcctttcagacggaggggaacagtatcaggtctgttgcaactgagctggcagtggatattgtcgtcactgtaggggatgtcaagttctaccttcacaagttccctcttctgtccaagagctcccgcctacaaacgctggtggcctcgacaagcgaggagggcagcgacgaggtggacatctccgacatcccgggcggcccggcggcgttcgaggtctgtgccaagttctgctacggcatggtggtgacgctcaacgcctacaacgtgctggccgcccggtgcgcggcggagtacctggagatgtcggagacggtggagaaggggaacctggtgtacaagatcgacgtgttcctgtcggccagcatcttccgggcctggaaggactccatcatcgtgctgcagtcgacgaggccgctgcagcggtggacggacagcctcaaggtggtcaaccactgcgtcgacgccatcgcctcccgggcgtccacggacccgtcggaggtcgactggtcgtacacgtacagccggaggaagctcccgtcggagaccgacggcgacgcgcgcggctggaacggcgtcaggaagcggcaggcggtgccgagggactggtgggtggaggatctctgcgacctcgaggtgtgcctgtacaggaaggtgatcctggcgatcaaggccaaggggaggacgggcggcgccgtcgtcggcgaggcgctgcgggcctacgcgtgccgccggctgttcgggtccctggaccacgccgtcagcgacgggctcgattgcaccaagcaccgcgcggctcttgaagccgtcgccgacctgctgccggccgagaaggggtcggtctcctgtggcctccttctcaagctgctcagggcctcgtgcctactggagtccggtcaggcctaccgcggcgagctgatcaggaggatcggcgcgcagctggaacgggcttcggtcccggaccttctgatacctgcggactccggcgacggcgacggcgacgcgacgtacaatgttggcatggtggctgcgatgctggaggagttcttgctgcatcacaaggtaaatggggccgaggcggagaagcgggaagatggcgaggacgacgtggatgttgccgctgacgacccggtcacttcttcgaagctggccgctgtcgcaaagctggtcgatggatacctctccgagatcgccaaggacccgtgccttcctctggagacgttcgtcgccctcgccgaatcgatgccgcccctgtctcgcccggtgcacgacgcgctctaccgcgccatcgacgtttacctcaaggagcatccgggcttgtcgaagggcgagaagaagcggctgtgcgcgctgatggactgcaggaagctgacggcggacgcgagcgagcacgccgtgcagaacgagcggctgcccctgcgcgtggtggtacaggtcctcttcttcgagcaggtccggcagtcggcggcggcggcggcagcctccgccgcccccgcgcgctcgctcatcctgcccagggacgacggcgcgtcgtacggcagctcgaggtcggcgaccacgacggcgacggaggacgagcagtggggcagcggcgccgtggtgggcgcgcctgtgacgacgtcgacgtcgggcggcgccggcgacgccggctcgctccggtccatgagccagctgtcggccaacgagaacgggagaagcggcggcggcggcgacaggaagaaggccaagggcggtgcggtggcgccggcgccggtgaagagagtgctggggaagctgtggtccggcaaggcgagcagcggcgggtccgacgacacgtcggccagccccgttgggtccctcaacctggaggagaccaagtcaatgtcgtcacagatcacgaggcattctgtgtcatagttactatattactgtatatgttctctttttttttgggtgatggttttgttggattggatttgacttacataattatggagggtgtttggtaattggtacatgtggtaatggagaatttctcgtcacg

SEQ ID NO: 93793 - DNA, 2050 bp, Zea Mays
tgatggcacttgaaaaggctccatcttgtacagagagagaaacgaggcatcgtctctgattctttgcagatggcatctgttcttcagctttcaagtatactacaccaccaccactactcgcgggggtctgttgcaactgagctggcagtggatattgtcgtcactgtaggggatgtcaagttctaccttcacaagttccctcttctgtccaagagctcccgcctacaaacgctggtggcctcgacaagcgaggagggcagcgacgaggtggacatctccgacatcccgggcggcccggcggcgttcgaggtctgtgccaagttctgctacggcatggtggtgacgctcaacgcctacaacgtgctggccgcccggtgcgcggcggagtacctggagatgtcggagacggtggagaaggggaacctggtgtacaagatcgacgtgttcctgtcggccagcatcttccgggcctggaaggactccatcatcgtgctgcagtcgacgaggccgctgcagcggtggacggacagcctcaaggtggtcaaccactgcgtcgacgccatcgcctcccgggcgtccacggacccgtcggaggtcgactggtcgtacacgtacagccggaggaagctcccgtcggagaccgacggcgacgcgcgcggctggaacggcgtcaggaagcggcaggcggtgccgagggactggtgggtggaggatctctgcgacctcgaggtgtgcctgtacaggaaggtgatcctggcgatcaaggccaaggggaggacgggcggcgccgtcgtcggcgaggcgctgcgggcctacgcgtgccgccggctgttcgggtccctggaccacgccgtcagcgacgggctcgattgcaccaagcaccgcgcggctcttgaagccgtcgccgacctgctgccggccgagaaggggtcggtctcctgtggcctccttctcaagctgctcagggcctcgtgcctactggagtccggtcaggcctaccgcggcgagctgatcaggaggatcggcgcgcagctggaacgggcttcggtcccggaccttctgatacctgcggactccggcgacggcgacggcgacgcgacgtacaatgttggcatggtggctgcgatgctggaggagttcttgctgcatcacaaggtaaatggggccgaggcggagaagcgggaagatggcgaggacgacgtggatgttgccgctgacgacccggtcacttcttcgaagctggccgctgtcgcaaagctggtcgatggatacctctccgagatcgccaaggacccgtgccttcctctggagacgttcgtcgccctcgccgaatcgatgccgcccctgtctcgcccggtgcacgacgcgctctaccgcgccatcgacgtttacctcaaggagcatccgggcttgtcgaagggcgagaagaagcggctgtgcgcgctgatggactgcaggaagctgacggcggacgcgagcgagcacgccgtgcagaacgagcggctgcccctgcgcgtggtggtacaggtcctcttcttcgagcaggtccggcagtcggcggcggcggcggcagcctccgccgcccccgcgcgctcgctcatcctgcccagggacgacggcgcgtcgtacggcagctcgaggtcggcgaccacgacggcgacggaggacgagcagtggggcagcggcgccgtggtgggcgcgcctgtgacgacgtcgacgtcgggcggcgccggcgacgccggctcgctccggtccatgagccagctgtcggccaacgagaacgggagaagcggcggcggcggcgacaggaagaaggccaagggcggtgcggtggcgccggcgccggtgaagagagtgctggggaagctgtggtccggcaaggcgagcagcggcgggtccgacgacacgtcggccagccccgttgggtccctcaacctggaggagaccaagtcaatgtcgtcacagatcacgaggcattctgtgtcatagttactatattactgtatatgttctctttttttttgggtgatggttttgttggattggattt

SEQ ID NO: 93794 - DNA, 2086 bp, Zea Mays
cggcccgccaccagtagctcgctcggctccagatcccgcgccacaccacatagcatggcagaagatacagcgtagcaaggtccggacgttcaccagagggcagtggggatggggatggggccggcccgcgtgcgctctccgtgcgggaggcctcggcggcggtgccgctcccgcacccatcggcggcggctgcgctcgaccttaggcggcggggcggccaggctggcgctgtgacctgaaacggtggcgggatggggaggaggaaggagcacctagagagagtccgagtggaggcgtactgctgggacgtgttcaagccagtggagatggtggagatcgacagcatggagaagcttgacgacgcgttcaggatggcaagttggtgtcagaaatgcatctacctaatgcccagaatggagaagatagcaggacaatatcctgggttactcagaccttactcctgcccctctctcctgtttattctattatctggctccatttgtgcagcacaaaacttagcactttgtttcattttggaatattcttgcttttagtttctgatttaattgtagcttcttgctaagtgattgacattatctggttcttattcatttcaagttgttctttcaaaaaaattggaataaaagtcattttggaatcgtgtggttctattgctgctagcttagtaaggtaaaatagcctgacctcgtcaacaattagttctttttaggagaaaaagatgcaacaaatgaggattgatgcttcccgcaagagtacatgatgtacaatatatatctttagatggtttcattgttgtagctgatactaagaatgtagcttttttctttattcaaggtggtcgcagcgatctgtgattgtttatgcccaaagcgtagggttacccgtcttgttagcgctaccttagtgccgcttttttgaaccctagacatctcagaagaggggaagcactcggagatgaagctgaagcagagcaaacgtgagacgcaccgtgggcattctctatccaaggggaaggttgctcttttcttatattatttccctatgtgtcgtgctacattataaatatcaagtaattttaatggtacttcttttctgtaagtatacacattaatccttgcaaaagttaaatctacatgtgcatttatttatatatctatatacgcagtgaactttatgtactcaatctaaagatcgttctatattcaatatatctagaatccaatgtggcattttattagcttttagataccaaaccttgctattgactgttcatacatatgtttctaatcactggtagacttcataacttttagacatttttgacctttgtaaattcatattacatattgtattcagtttcttatctcaaatattatagaactatattattataggttgctggaacatgatctggattcaaaatggttggctattgttgatgtaagaatatactttatgtaccctcaagatcattctgcattcaatatatctagaacctaatgaggctcattctgcattcaatatatctagaacctaatgaggcatttccttggcttttagataccaaaccttgctactgtttgttcatatatatatatatatatatatatatatatatatatatatatatatatatatatatatatatatatatatatatatattcatgttaagacatcttattgtatccaatttcttatctcagatatcttgttctccccacaattttatgttctacatgagtggagagatcatatagctcatgagaaagatgagggtactggttagtggttgtatactgccaaataaagcttgaatcgagataggtgttgttgtttttttctttatatcctgttataatggtgcaaaattggatctacaactttgctagctcccccccccccccccccaaaaaaataaagcagatacctacagatgttggacattgtaaaagaattgtaaaatcaaaatatccatatgttgagaacaatgttgtcgtaatcgcttaccttacactgttcgtactgcaattgattattcttatgcctttaaagaagtagctgaa

SEQ ID NO: 93795 - DNA, 570 bp, Zea Mays
atgtaacgcaacaaggttggacagtttggttgggagttgtatggggcttcaaccaacttgaggttcgagtcatcctggcaaatttggtggagctcggtccatacaggtgtgcctgtatggtctggtgcagatttgttcgtgctgagctgatcaatggatggcggtgccagcacctggacgatggttctccgaaatggaagaagatgaagcactgggacaacaaatgcaaaagaggcattcataactgttggaagtctcgttccaataagtgtttgcagcagtgtgtttatgccactcataaagaggaacgattgaataactcgagccttgtcaccctgtcagcaacaagcacaaatgtgaggaacaatagctgttgcaagcatgacggtagaacccaacatcacaagatagtgaaggaatgcaagtgctgccacctgaactgaagataaaaacaacaataacgagttagtaagaacaaagtttccataatgtaatcatgtctataacgcacagagtaattctatttccagcagtttagtacatgatatccaaagagaactcaatactcaa

SEQ ID NO: 93796 - DNA, 605 bp, Zea Mays
tcaccgagggtggtggtggacacagcgacagttgcagatctcgcccgaagatgtcccaaacctttttggcgtgtccatgtgaagcaccacggcgacacccaacgaccagtgtggacgaattcgaggatctgggcacggcgcgtcgacagttcctccttgcggcgcttcccaccggtggcgagctctctggatgcttttactagggcgtggatggaactgagggtcggcgcaggtgtaatattgcggccggcgcggactcaagaggttggagtcaggggacagactccctgtgcatgcggaggaagttggtatcgcggcgcggatccgattctggcggaggtgggtgatgacgcgtgggtcccgcgcggcagtgaacgtgtgtgaggctggcgcagctggcccacatggtagagagcagtcgaccgtgcgtgggcccaacagggtgggaaagctagtgagttgggccgaccaggtttaatccgacccaagcgtaggttaatgtccatctcttttttctctttttatttataattcctggtttgttttcctattcctcattcctttgaatttgaaattcaaataaatcctgatttccagatttcaac

SEQ ID NO: 93797 - DNA, 990 bp, Zea Mays
atcaccatcttcaagcatatcccatcaatatccagagagtttgagagagcgagcattgcgagagcaccatccgacatggaccgcttcatcacccagaccgaggggaggagggaccgcaagcatatcccatctgtatctagagagtttgcgggagcgagcgctgcgagagcatcgcctggcatggaacgctccatcgccaagtctgaggtgaggtgggaccgctttgtcgagactggtaagggggagatggtgcaggatccactgaccacggagactgggggcaagatggagcacgacctgctcatgtacagcccgcgcagcgccgcgagggccaccgcaaccggcatccccatcggcgaccaaggtgtggccgtgctacgggggcccctcatcgttggcgctggaccagcagggctagcatgcgcggcgatgctcaccatgggattggtgccctacgtgatcctggaacgtgacatgtgcatcgcatcaacgtggcaccgccgcacgtacgataggctgtgtttgcacctacccaagcgctactgccagctgccgctcatgcccttcccgcatagctaccccacatacccggttaggcagcagtttctggcctacctcgatgagtacaagcgaaagcacggcatccgccccttcttcaacatggaggttgtcagcgccgagtacgacggtgagtattggtgcgtgcgcaccaaggataccagcgacaatgttggagggtctatgctttcctcttgcactatggagtaccgctccaaatggctaattgtggccactggtgaaaacgctgagccggtggtacctgagattaagggcatgcgaagcttcaagggtgaagtctttcactcaagcgactatcgcaacggcgaggaatttcaaggcaaaaatgtgctcgtcattggttgtggcaactctggcatggaggtgtcgctggatcttgccaactacaatgtgcatacctcccgcttctga

SEQ ID NO: 93798 - DNA, 771 bp, Zea Mays
gtagccagccgtggatctagattggagaccaaatcatccatgacctcgagcggtggctgcgccggatctactaggaacgccgaggcgacgcagccggagctccaacgatcgcctccgctctgctcacggagttctcagccgatgaggccgcaccacatatggcagctaactctcctaggtcaggcgctaatatgacgaatactctttccctcagcggcatctaagaccacaacagcaaaggcaaaagctgatgcaagcatctcaacagcggttgatgccatcagctgctgggcgatgctagcgcagagcgcacttcctcaactagaagatttacagggggcaagttcaacaaaaattacaggtcccaggtcaacaacaaatgcaatacatccaagcattgtcgcaacaatttcataactttaacagatagatggaaactggacgtatgcaaccaggcaaggctcagagtcaattgaatcaaggaactcagctacgaagtcatctaggccactttattggagcttcaaatagtgcgatgttcaatgctccaatctcaactaaagactgagaggcaagaaaaagatagaattaggcatgaaatgaatgatagaaaagttgtgtgcactcatgttgtttcatggaaatgcatgcacgatttggtttgaattcaattaaatgttgttttttattgattgatgatgaactaaaaatgtaataaacccatcatgttagctgtcacatcatcatgctttatgacaaaaatattcttca

SEQ ID NO: 93799 - DNA, 2179 bp, Zea Mays
tttattttagcccctttttctattagaattttagttttatatcttgacaaagttgttactctatactattttatagtaattttagcattgttattgaaagaacgctctataattgttgatccacgatggtaacatgctacaggttcatgtaattcacacatcctctttatagtggttccattaattcacattgtggggccatgtttagtctctccaatacataattcagtctccttttcatctatttctggatccgccactgcttacgtgctctcgtagccacgcgttgataggaagacaagtaaagcgaagaccttgccatgcattaagcaatacggcggctaagcagttgtcttattgggagcctcccatgccacgagcccgcaatcgcagagacgcggacgcccacgaaacgaaattcgcaatgggtgtcctcttcctgatcgcctgccttctcgttccggccgccatttacctcctcccagccaacaacaacacaccaccatgggagcccatcacctgcacgggcggcaacgccaacggcgagtcaaactgcaccgtcaccaactcgtacggctccttcccggaccgcacagtctgccgggcggcggcggccgtctacccacagaccgagaaggagctggtcgccgccgtggcggcggttgccgcggctaaggggaaagcgaaggtcgccacgaggcactcccacagcttcaccaagctcgcgtgccccggcggccgcgatggcaccgtcataagcacccggtggctcaatcggacggtgcgcgtcgacgtcggcagacggctcctgacggtggagggcggcatggtcctcagggacctcgtccgtgtcgccgcggaggcagggctcgcgctgccgcactcgccgtactggagcgggctcaccgtcgggggcctcctggccaccggcgcccacgggagctcgctgtgggggaaagggagcgccgtgcatgagtacgtggtcgggatgaggatcgtgacgccggcgccggcgagccaggggttcgccgtggtgagggagctcggcgcagaccaccctgacctggatgccaccaaggtctccctcggtgtgctgggagtcatctctcaggtgacccttgcgttacagcctatgttcaagcgttcggtcacgttcgtgacacgcgacgactcggacatggcggagactgtgtccgtctggggtcacctccacgagttcggcgacatgacatggctgccctaccagcgcaaggtcgtgtaccgccaggatgaccgcgttgacgtcgccaccggaggagatggccacaatgacttcctcggcttccgattctactccaagcctggcgttatggccgccaggctcctagacacgtggctggaagagaaggatgttgacactgcccggtgtctgatggcacggttgccgatgtggaaagtgcagagggaggcctacggcttctctaacgacggcgtctccttcacggggtacccagtggtggggttccagcaccgcatacaggcctctggctcgtgcctggacgacggcggcggtggtttgctgctgtcagcgtgcacatgggacccgcgcctccgaggcgggctgttctacagctccggcttcagcgtgggtctatccaaggtggcagcgttcgtcgccgacgtgcagaggctccgcgacatcaacccgcgggccttctgcgggctcgagggcaagctgggcgtgttcatgcggtacgtgaaggcctcgtcggcgttcctaggcaagcccgaggactcggtggacttggacatcgtctactaccggagccacgtggagggcacgctgcgcaggcacgccgacgtggtcgacgagatggagcagatggcgctgcacaagtacggtgccatcccacactggggcaagaaccggaacttcgcctttgacggcgccatcgacaagtaccctagggcacacgagttcttgagggtgaagaacacgtacgacccggacgggatcttctccagcgagtggagtgaccaggtgcttggcgtcaagggcagccccagcatcgtcagggatggctgcgccattgaaggtctgtgcgtttgctccggcgactcgcactgcatgccggataagggctatttctgccggcctggtaaggtttacaaggaggccagggtctgcgtacgtgtttga

SEQ ID NO: 93800 - DNA, 586 bp, Zea Mays
atcgtttttgtatgcatgatttctttagatgcgaggttggatacgaggctagggcggatgtggtggccaccacgagctgtaagaagctcgtcgtggacatgcactatgaggcccgaatcgaggccatcgtcagctaccacggcttcgtccttggggagagggtgaccaagcagcaagcccgaaccatgtcgttgaccagggaccagtacctacaggtaaagtcatgcatgtttggtaccagtactccatgcatgaattttattttatcttctgatatgcactttacgtgtttactttgtagatgattccacattggtgcgccacacatcctctgtgctgggagcagatggtggataggtggtgttcggctgagtgggacgaggcgcataatgcttgccgggaacggcgtatgatgatgcaaggtccctcccaccaccaaggcagccggagcctgggccaatatgccgaagcatggtcggcgtcacatggtggccgtccttgctccaccttctcggcctatgctatggcccataagggcaaggtgacgtccgacgtcacctacaacccggatgacgggcccgaggcc

SEQ ID NO: 93801 - DNA, 105 bp, Zea Mays
tttattttttgtgtaaagtatcaattacgttatctcattttattacgcaaccatgatgaacagtgccgcgaggcttggcgcaggaagaagaggtgatagctgaaa

SEQ ID NO: 93802 - DNA, 1035 bp, Zea Mays
gatttgtttttaattcttttttgagatataaaccttcattaaacttttgtatgaatgaatttgtattattgttttgatatattcatatttatgttgtaggttcgtacaaacagaggtaaagataaccgttcaaagctgactatgtcgcatgcagctggcagcaagagttatgctcgtgtggggcatgaactggtaaaaaaattataatcactagtttgtataatcattagtttaatttatgaaaaatctagtcaattactggaccaaatcatttttttcttgtaggccgagcaacaaggacgccctgcgagaagagatgaaatatatgttagaacacacacacgtaagaacaaagaaggagatattgtgcctctacctggagcagaaatattcattaactcaagggtgcatcggtcagatgaggtggcacatgattacaatggtaatgactattcacaaaatatggttgaagatgacttgcagcttactaggcgagttgcaagcactgtgggtcgtctaaggaatcgtgaagatgttaatactattgaagagcaaagtcgcaggcgagacattgcaacaatggttggtaaagaagtcatattatattctatgatgagatcagaagttcctgttgtaatagcaaatattatctcaaccgacccatccactaaggttgcagatgttcctcttggaagggagttcacacaggtttttgtgactcgcgtgctaaaaagggaaagtactctgccacgaccatacttaggtgtagagagtatgggggatgctctttttatgcccgttgcatggccaacaaacaagatgggtcgtaacaaaaaatcaacattgacccaaggttctacagtagcagtttacagcagactgtacgcacatgtccattcacaggagagtcagcaagcgcaactggcttggttactaacggtcaacgacagaagctgtggcatagagttttcgggcactgtgggggatctgggagttcagatgcttgcactggaggagcctagttgtccttggtag

SEQ ID NO: 93803 - DNA, 538 bp, Zea Mays
atggtagcaccaaaatttaatggcgacgcggcgttctcgctggtgaggcggcagctggagtcgctgagcgtggacaacatgctgctccggcgcgccgtggaggtcctccgcgcggaggtccgtagcagcaacagcagggccgcgcggcccgctgcttctgcggcgggggcccgtggcttgggcagggtggcggcgaccgcgccacaaacgcatacgcagccttaccacgtgacaaagccggaccaccgcccccgaggcgccgcgagggaggctgcggccgcgccggacgacgttggcgaggagctgaagaaggcgttggaggcccgcctgcactgagcagccagccttggctgccaggctgcgtcgcgtgcgagcccggcagctcaccggcaccactcgagtgaaggtgaagtcctactgtcgctctcaggcgttgtaatctgttggtgtcagcaacaatttggagctgctgatttctccctgttgcttgcttaggtcgtaaatcgctgggaagaaggggatcggacttgtcttgcca

SEQ ID NO: 93804 - DNA, 86 bp, Zea Mays
ttttttttctaattattcttatgtgtgtgctgggcttttctgttggccttcaatttgtatttggatatatgggctgtaaaaaatag

SEQ ID NO: 93805 - DNA, 561 bp, Zea Mays
atgccggtcgcggacctgtccctctcgtccccggcggccgccgcctctccgagcgccgccagcagcgccgtcacggacgcggccggggcgcaccgccggcaacatgcgcagcagaggaaggcgaggaggtgctggtcgcccgggctgcaccgccgcttcgtcgccgccctgcagcggctcggcggcgcgcaagtcgccacgccgaagcagatcagagagctgatgaaggtggacgggctcaccaacgacgaggtcaagagccacctgcagaaatacaggctgcacacgcggcgcgcgtcgtcggacggcggcgaccagcacgcgggcgggctgtggtcgtcggcgccggagcagcagtacacgacgtcgcagcacagcacgtcgcagtcgcagtcgcagtccgggtcgccgcaggggccgctgcagctggcggtgtcgagcagggccatgtcggccaccgccggggacagctgcgacgccggcgacgaggcccagggcggccggtcggagagctacggctgggagatgccgcagcacgggacgaaggcgtcgtcgtcttga

SEQ ID NO: 93806 - DNA, 608 bp, Zea Mays
ctccctccctccctccgcccgttcgttccccaacagcacagcacgaagacactagacagcagccgccgccgccgccgccttcgcccgcgtaaccgggacagcgtacgcgcacggtggatcgcacggtgtgccggcgatgatggcggggaacgaggaccagctgcgggcggtggcggcgcgggccgtcaccgactcgctgcgcgcggccgcgtcccgctgctcggccgccgaccgcgccgcgcgcttccgggactgcgtccgcagcctcgaggccgagaaggccaagatggaggtcttccgccgggagctccccatcagcgtccacctcgtcgccgacgtgatcgactggctcaaggaggagctcgcgcagcaccgccgccgcccgtcggacctcttcgcgccaccagcgccgccgccgccggcaaaggacggagccgtcttggcggacgcggacgccaacgacaagcgcagctggatgagctccgtgcagctctggagctgcggtagccacgacgacagcaccgccaacaccaacggcgccgccgccgccgcccacaaggtacggagcgcgggcgtgagtcgccagaactagacgtcccgtttttaaa

SEQ ID NO: 93807 - DNA, 102 bp, Zea Mays
caactaaaataaagaatagacaggcaaaagaggacattaacaaccttttatggtgtttgatgaagctgagatggctgaaatttcactactcatgacacctgc

SEQ ID NO: 93808 - DNA, 291 bp, Zea Mays
atggtcttggcctttgtcttggtgagcatggttgtgcgccatgtacccaagaagctcgcagggggatgtgcaggtgaaggggtagtgcttggtggggtcgacgtagaaggcgatgcactcgaggcgtggccgctggtcggggaacctgacgccgaggtcacgctcgtcctattctccaactgtagccaacaagggagcggaacgagcggtggagaaaggggagagaggcacactgacatgggagagaagggaagaaagggaaggatgactcacatgagaaaaggtggctga

SEQ ID NO: 93809 - DNA, 1844 bp, Zea Mays
atttttagcaggacccgacctcctgcaactctgggaatccacggccagaacaccggcgcgcccgccgtgacagacacacacacctcgcccgctcgctgtaggcctgtagccatctccgtgcgaccgtgccactgcttctagcgtagtctgacgcggccgcgggcatgtcagctgcatgcgccgtctcatggcagagcccgaccccggcggcgtgggacgccacgtccctcgcctcctccctgaaggcggcggccgcccgccgctccgcggcccacgtcggtccattgcacgccgtgctcctcaagctgggcctctccgcctccgccatccacgccacctccctggcgcacgtggcgctgcgggccgggctcgcgcggtacgcgcgggagctgttcgacgagatgcctcgcccggacgtggtctcttggacgtcactcgtcaccggccacgcgcaccaggggctacaccgcgattccctcgcgctgctccggcgcatggcgggttctggcgtccagaccaacggctactccttgtccggtgggctgctggcctgcgccggtgtcgggcagagcgcgcttgctcacgggaaggagatccatgccagtgtggtcaagatgagctcgtgtggatcagtggacccggtcgtggagaacggggttcttggcatgtactcgaggtgcggaagcatggactacgcgttgagagtgttcagggcgatgcctgtcaggaacatagttgcttggaactcgatgatggcagcgcttcttgggagcgggcaggccgaggacgcgctgaggctgttcgtttccatggtttcttctggcgtcggtgtggatggtttctcactctccatagccgtggatgcgtgcggggagctggcgctgctgaagcagggaatgcaggcgcatgcacaggttgctggcaatggattcgaggcagatgtcgtcgtcaggaactccttagtggacatgtacgccaagtgtggctctgtcgattcggccgagctcgtcttcgaagcagtatcgtcaaacgacgctgttctttggaccacaatgatctcagcttacgggaagtctggccgtgcacaggacgccgtcagcttgtttgacaggatggcgcgcatggggatagaacaagatggcatagcgtatcttgcggttctgtcagcttgtagccatggcggactcgtcagagaagcctggcactacttcagttcgatttctgatggttcgagatcggttgagatgcgagctgagcactacggatgcatggcggatctcctgtgcaggagaggttacctagaagaagctcttgagttcatcaagaacatgccgtttgactcgagcgtcgctgcctggagtgcgctgctcaactcatctcgaatacacgggaatgtcaggctaagtcagttcgcagcttcctgtttgctcaagcttgaccctgagaaccacagcaactgggttgctctgtcaagtgtgcatgcatcagggaatgactggcacgagacctggacaatcagggagagcatgagcagagagtgtgtgaagaaagagcctgggtgtagctgggttgagctgtgtgatggcgttcatgtttttgtaacggccgaccagtctcgtcctgaactgtttcaaatactgcagagtcttgattatttgaaggaggacacatcggtgatgccttggcaagtttcgtagaaaattctatgttttatattacagctttgtggtaggtggtttaaatctcactgcacagtgggcgattatcctaatcaaaacaatcaactatgtaaagttgttgctcaatatactcgaatatgatgagttgatgactaattgtttgaa

SEQ ID NO: 93810 - DNA, 399 bp, Zea Mays
atggatggtgcaggggctgctcgccacagagcggagtggaagtcatggcgttgtcggatgagactgaccccgaccatggcagcacgcggaggaggagctcggggcgccgcaacgctgctggagcagagggataccaatgccgtccacaaccagtgtggaggagttcgaggaggtacctatgatgaatctgcagggccacgcccggacatgccggcaagcacgcagcgagcagaatccgatgatgtgggcagggagaggaaagtggcgacctgggagatgagggcgagcttggggaaggagcagagacctgcggcgaccatggcaggcgctaccggggtcttagtgttgatggaggcaagggcgcgacgctgggaacaagggcttgccacacgtccctag

SEQ ID NO: 93811 - DNA, 852 bp, Zea Mays
tgctctgaatccattaatagagttgacatgtccattttagagtgttggctatgcccagcttttctataatggagaaaccctcgcctgagcctctatttcgttgaagccgcacccgtcgcgtttcataatgtcaaatctctctgctctacttggtttatcagtctcgccacacttctgcttcgaagtagatgccccgtgcgtggacgccgccgccgcagcgaggcgcagctgcgctcccaggccttccggttccggaccacggaacacgcggcggcgtgcagcctgtcgacgccctccgccactgaaacgcccgtgcaccttgttggcggcgaagaaacagggcgccttctcgcagccgctggagtccaggaccaggacgtcgaaggagcagccgctgccgctgccgccgccgccgccgcgcgtgaagaccacgaggtcgtcctcctgtagctcgtgcgctctggcgaagtcgccccatcctgacccgaggagcagctcgtcggcgtcggcgttccttgcgacgtcgacgagccacgtcgcgccgctcggcgatttcaggctcagcgtttcggaccctttttctggaagtgctggctatcactgcttgggaaatttggagacaacgaaattcggctatcttcagagaatctgttccgtctttcaattccgggaggacctgaagcttcagatgatcagatttagcgctgaacttaaaatgcttgtctcattgtggctttcttccctttaagctcactatctctctctttctcttcagccccacctcttcttttcttgtgcagttttatcttatgtttgtacctattccttttttttcaatattactaaaatcta

SEQ ID NO: 93812 - DNA, 1491 bp, Zea Mays
tgctctgaatccattaatagagttgacatgtccattttagagtgttggctatgcccagcttttctataatggagaaaccctcgcctgagcctctatttcgttgaagccgcacccgtcgcgtttcataatgtcaaatctctctgctctacttggtttatcagtctcgccacacttctgcttcgaagtagatgccccgtgcgtggacgccgccgccgcagcgaggcgcagctgcgctcccaggccttccggttccggaccacggaacacgcggcggcgtgcagcctgtcgacgccctccgccactgaaacgcccgtgcaccttgttggcggcgaagaaacagggcgccttctcgcagccgctggagtccaggaccaggacgtcgaaggagcagccgctgccgctgccgccgccgccgccgcgcgtgaagaccacgaggtcgtcctcctgtagctcgtgcgctctggcgaagtcgccccatcctgacccgaggagcagctcgtcggcgtcggcgttccttgcgacgtcgacgagccacgtcgcgccgctcggcgatttcaggctcagcgtttcggtgagctgcccatttggatcgctcacgaacttctccgaatgggtagaatccctcattactcccctccaaaaggctccttcgggcggaaggacatctctaccttaatggatcatttttcatgggattgcaatgccaatggctggggatggtaggaccattcttctctcgcaggatgtatggaacagctctcggctcaggcagacttacccttgcttgtactcttttgctaaaaaggaagattgctccctcgcggaatatcttggcaatcaaaatcttgaggaaaatttccattctcctttgtccccggaagctcttgaggaatatttggaattatgtaactttgttaatttgatccagcatgatgggagaggaaaagacaagtggatttatgtctggggcaatgacaacttcagttccacctgaatttataatttgaactttcaatgtgttcggccacctcctccatttctctggatttggaagtccaaagtttgcaaaaagctgaaggttttcatttggctagtattcagggcagaatcaactcaaggaatttgctaagaagaaagggctacgatttaccaaataatgatcattgcggtatgttatgcgagatgaactgcgaatagaccacttatcatctaatattcgagcgcccatttagtagtgaatgctggaattatgtgggtatacactgggagcatcatttagaattcttacggatgatatctgatgcaagagctacctatgcaggaccctttttctggaagtgctggctatcactgcttgggaaatttggagacaacgaaattcggctatcttcagagaatctgttccgtctttcaattccgggaggacctgaagcttcagatgatcagatttagcgctgaacttaaaatgcttgtctcattgtggctttcttc

SEQ ID NO: 93813 - DNA, 1034 bp, Zea Mays
gagcacgcgaggacccttggccccaaggggtctgactgccacgaggccgctgtgatcggtgacaccatcggtgaccccctgaaggacacctccggcccgtccctcaacatcctcatcaagctcatggccgtggagtccctcgtgtttgcccccttctttgccacccagggagtcggatgctgaaacctttttttttgaacatgatggcgatgatacatgatgattgttgcattgtactggtggtaaatcacagtccgtattggcctgttctgttagtgcccatttccaatcatccaatgtcgtgctctgcgttatacgattgctgtttgtactgtcatagctgctgccgacaagttcataaaagaaccttaaacttgaagccagatcgagttctcttattttctcggtgcttcacaatattctggcatttctttggttctaggcaaagttgttcttagatgctttccgtttttttcctgctctttttcagaagttgatgctttccttgagctcagcaaatttggttagtaccgttcttacgtcgatttcagtggtgtttccaaccatgaacagagacaaacgggaacaagtttttttcccttcccatcgctgatcatcatgaatttctttgaccttttacaattccaggagtaaaaagaaaacaaactcacccccattgcattgcatcccttctctttctacagatgccttgcacctcacttcacctcatctcaccagatggaaagcttagctgtccatcatcaccaatcacggcaaacccattatgaatctacccatctaaaccgctactctaccctacacgccggggcactgaaatgcggaacgcgagcgaacacgatggagtagggcgtgacggcgatgggccgcgccgcgtccacctcgaccgcctccagggcggggatgttccccgccgcgtcggtggccaacgccctgccgttcagcagcacgacctggctcgtcaggtcgccatccttgggggtgaggtggtactcgtgtctcacggcgcccgccgc

SEQ ID NO: 93814 - DNA, 478 bp, Zea Mays
acgacgactcttcaccccaccctctcctcctccaactagtcaggctgctagtgctacctttcaaaaaacccctacatcctgccatacatccatccgccgccgccgccgccgccatctcctcccactctcttcccactccgacgaaaccctattcagtatccatctctccatccatggcgtggcgcggccccgccacccgggccgtcctcgccgccgtccgccgcccggcagcggccgcgcgcctccacgccccgcgccgccgcgtcccgcccgccttcgccaccacctcctccccgctcccgtccgcgcggcctctggcggcgttgatggggtccccggtgacggtggccgccgtgatggcgcgtctcacggcgcatcccggcgccagcgcgcgcgcgtgctgcgagctttcccagggtacggtacttccgcgcgcttgccatctaaacgaagtcgtgctactgtatctaatgccatc

SEQ ID NO: 93815 - DNA, 315 bp, Zea Mays
atgatggtcctcgcctccgttgccgccacctcgttcgccatcctacttcttttctctctcccctcatgcctccgcctccgcgccacctcattattagcagagggcatgggaacaggcgtctcctccccgtattcgtccaacaccgaccccaacaccgacccacgcagtggctattgcacgtccacgaggacgtttcacagtatgcgcgcaccatcgtttttgccgttgtcgaacgtcacattcgtcttccgggctttcgccatgttcttcctccccaacctactgcccccgcccacgattgtagccgcaagctga

SEQ ID NO: 93816 - DNA, 2527 bp, Zea Mays
tggtacaccggtccacggacccagctcacagttcacaggcaaaagcagtcgccttctccatctctcctccctttcgtctcgctccctcgcgcatgctccaaaaagcagctactcctcccccatcctgctttcccctcctcgtctagggtttcccacccccatgcctctcccgaaaccctagccgccgcctcctgttcactgctctcctcgccgctgcagccgtttccggccatggccgctggagccagcgactactctttcgcggcggagtacgttggcccgccactcccctacacgctcccgcgcgccatcccgctcgacctctcccgcatcccgctcgccgcgctgtcttcctcgcccccggcctccccctccgcctcctcgtctccactccccgtcgttcgcccgccgtctaggctccgcccggggttctattggtacgataaggtgtctggcttctggggaaaggagggacacaaaccacattgcataatcaccgcaaatctaaatgttggaggttctctagatcaaaaagcaagcaacgggaacaccggaatattgattaatgggcgagagattacaaaatctgaactgcaaatgcttaagttggcaggagtccaatgtgctgggaaacctcacttttgggtgaacgctgatgggacttaccaagaggaaggccaaaaaactgttaaaggaaagatctgggataagcctatagtgaagcttcttagtcctgttctgtcattgccaacacccaacaaagcagctaatcaatccagcgaagatgctgttgacatagtaaacagagccatccctgactacctggaacaaagaacaacacagaagtttttgttggttgggtcaggggcaagcaccatactcaagcaggcgaagttcttgtacaagactggcaagccattttcagtggatgagcgtgaagatctgaaacttatcatacaaagcaacatatacaactaccttggcatattgcttgaagggcgtgagcggtttgaagaggaatctttagctgatagaagaaaaaccagtcagtgtgacccttctagctctgggtgttgtgaacctggattatgtgacgaagtcactgagtactcccttattccacgtttgaaagcattctcagattggattcttaaagcaatggctttaggtaatcttgaagacatatttcctgcagcaagccgtgaatatgcaccacttgttgatgaattatggaaagatcctgctattcaagctacatatagaagaagtgaactgccattccttccacctgctgccagttattttcttgacaaggctgttgatatatctcgaacggaatatgagctgtcagatatggatatactgtatgctgatgggattacatcctcagatggggtagcatcaactgaattctctttccctcagctgtctttgggtggactgggtgttgatgagcccgatgcacaagacactttgctaaggtaccaattgatcaggataaacagtagaggtttgcatgggaactgcaaatggctgcaaatgttcgatgacgtaaggcttgttatcttctgtgttgctgctagcgactacgatgagtactacgaagatgcaaacggtaccattgtcaacaagatgatagagagcaggcagctgttcgagagcatcaccctccatccaacattcgagcaagcagacttccttctgctcctcaccaagttcgatctcctagagcagaagatcagcagttccccgctgacctcgtgcgattggttcagcgacttcactcccctgatcagccgcaacctcctcaacggcggtggcggcggcggccgcaggactgcgcgcagcagcaccggcgcgacactgccccagatggctgcgcactacatggcgaccaagttcaagaggctgttcgagtcgatgacggggcggaagctctacgtgtcgtacgtgaacgctctggaccaggagtccgtccggtcggcgatccgctacgggcgggaggtcgtcaagtgggaggaggagaagcccgtgttcggtgccagcgagacagtctacagcgaggagccgagctccttcactgcctgaccttccttcgtcgtgtgcagaagaagaggtgtaaatatctgtgcatttctttcctccccagcacgctctcttagagctgtacccccatccgtcccgtcgcagatcgtccgtcttgtgtggctgttcagttgtttttgcaaagtagaatggtggagacgacccggcccattctgattcttgtaaattgtattgtgggttgcttgcgtttgatgcattattaggctggcgcgaagttaagtctgccagaccatcggcttgtatgctggttacttctggtatatattgtctggttcgccatcagtgtcaagagagaccataccatgggaaggatgctttgctccattgctgagatattttgctgggagatgcgtcatctgtctttgaggtgttttgcacttttgctgggagatgtccattattgagatgcgtcatcttcaac

SEQ ID NO: 93817 - DNA, 1721 bp, Zea Mays
gcagctactcctcccccatcctgctttcccctcctcgtctagggtttcccacccccatgcctctcccgaaaccctagccgccgcctcctgttcactgctctcctcgccgctgcagccgtttccggccatggccgctggagccagcgactactctttcgcggcggagtacgttggcccgccactcccctacacgctcccgcgcgccatcccgctcgacctctcccgcatcccgctcgccgcgctgtcttcctcgcccccggcctccccctccgcctcctcgtctccactccccgtcgttcgcccgccgtctaggctccgcccggggttctattggtacgataaggtgtctggcttctggggaaaggagggacacaaaccacattgcataatcaccgcaaatctaaatgttggaggttctctagatcaaaaagcaagcaacgggaacaccggaatattgattaatgggcgagagattacaaaatctgaactgcaaatgcttaagttggcaggagtccaatgtgctgggaaacctcacttttgggtgaacgctgatgggacttaccaagaggaaggccaaaaaactgttaaaggaaagatctgggataagcctatagtgaagcttcttagtcctgttctgtcattgccaacacccaacaaagcagctaatcaatccagcgaagatgctgttgacatagtaaacagagccatccctgactacctggaacaaagaacaacacagaagtttttgttggttgggtcaggggcaagcaccatactcaagcaggcgaagttcttgtacaagactggcaagccattttcagtggatgagcgtgaagatctgaaacttatcatacaaagcaacatatacaactaccttggcatattgcttgaagggcgtgagcggtttgaagaggaatctttagctgatagaagaaaaaccagtcagtgtgacccttctagctctgggtgttgtgaacctggattatgtgacgaagtcactgagtactcccttattccacgtttgaaagcattctcagattggattcttaaagcaatggctttaggtaatcttgaagacatatttcctgcagcaagccgtgaatatgcaccacttgttgatgaattatggaaagatcctgctattcaagctacatatagaagaagtgaactgccattccttccacctgctgccagttattttcttgacaaggctgttgatatatctcgaacggaatatgagctgtcagatatggatatactgtatgctgatgggattacatcctcagatggggtagcatcaactgaattctctttccctcagctgtctttgggtggactgggtgttgatgagcccgatgcacaagacactttgctaaggtaccaattgatcaggataaacagtagaggtttgcatgggaactgcaaatggctgcaaatgttcgatgacgtaaggcttgttatcttctgtgttgctgctagcgactacgatgagtactacgaagatgcaaacggtaccattgtcaacaagatgatagagagcaggcagctgttcgagagcatcaccctccatccaacattcgagcaagcagacttccttctgctcctcaccaagttcgatctcctagagcagaagatcagcagttccccgctgacctcgtgcgattggttcagcgacttcactcccctgatcagccgcaacctcctcaacggcggtggcggcg

SEQ ID NO: 93818 - DNA, 2550 bp, Zea Mays
ctccatctctcctccctttcgtctcgctccctcgcgcatgctccaaaaagcagctactcctcccccatcctgctttcccctcctcgtctagggtttcccacccccatgcctctcccgaaaccctagccgccgcctcctgttcactgctctcctcgccgctgcagccgtttccggccatggccgctggagccagcgactactctttcgcggcggagtacgttggcccgccactcccctacacgctcccgcgcgccatcccgctcgacctctcccgcatcccgctcgccgcgctgtcttcctcgcccccggcctccccctccgcctcctcgtctccactccccgtcgttcgcccgctcaccccgtcctccctctgcaacgccatccacgcgcacgcccacccggcgccccgctccgccgtccccgcgccagccgggggaggagctgtggtggattcccccacctccgtcatcgagaaccaccacgctgccgcgcaccactccgccgagctcccctcttccccctccgacgacgaggccgcaggcgacggcgacggcgacggcggctccgaggcgctgccgctgaagcctcgccaccacccgcccgtggtcaccttcgccgagaccagcggctccctcctccagtcctctgatgacgaggacgagtatgaggaggaggacgacgacgacgacgatgccgacgcaggggagactcggccccgtgctgctgccggccagtcgagcggctccctctcccctgcgcactggaggggcggcaggacccgcggctgctacaggtgcggaaaaggaggcggcttctggggccgcgacaaggagtcgtgcctcgcctgcggcgcgcggtactgcgtggggtgcgtgctccgggcgatgggctccatgccggaggggcgcaagtgcctggagtgcatcggccggccagtggccgagtccaggcgggacgcgctggggcgagggtcgcgcgtgctccggcggcttctcagcgcagcagaggtggagctggtcatgaggagtgaacgggaatgcgcggcaaaccagctgcgggcggaggacgtgtacgtcaacggctccaagctgtcgcctgaggagctcgtggtgctgcaggggtgcccgtgcccgccgtctaggctccgcccggggttctattggtacgataaggtgtctggcttctggggaaaggagggacacaaaccacattgcataatcaccgcaaatctaaatgttggaggttctctagatcaaaaagcaagcaacgggaacaccggaatattgattaatgggcgagagattacaaaatctgaactgcaaatgcttaagttggcaggagtccaatgtgctgggaaacctcacttttgggtgaacgctgatgggacttaccaagaggaaggccaaaaaactgttaaaggaaagatctgggataagcctatagtgaagcttcttagtcctgttctgtcattgccaacacccaacaaagcagctaatcaatccagcgaagatgctgttgacatagtaaacagagccatccctgactacctggaacaaagaacaacacagaagtttttgttggttgggtcaggggcaagcaccatactcaagcaggcgaagttcttgtacaagactggcaagccattttcagtggatgagcgtgaagatctgaaacttatcatacaaagcaacatatacaactaccttggcatattgcttgaagggcgtgagcggtttgaagaggaatctttagctgatagaagaaaaaccagtcagtgtgacccttctagctctgggtgttgtgaacctggattatgtgacgaagtcactgagtactcccttattccacgtttgaaagcattctcagattggattcttaaagcaatggctttaggtaatcttgaagacatatttcctgcagcaagccgtgaatatgcaccacttgttgatgaattatggaaagatcctgctattcaagctacatatagaagaagtgaactgccattccttccacctgctgccagttattttcttgacaaggctgttgatatatctcgaacggaatatgagctgtcagatatggatatactgtatgctgatgggattacatcctcagatggggtagcatcaactgaattctctttccctcagctgtctttgggtggactgggtgttgatgagcccgatgcacaagacactttgctaaggtaccaattgatcaggataaacagtagaggtttgcatgggaactgcaaatggctgcaaatgttcgatgacgtaaggcttgttatcttctgtgttgctgctagcgactacgatgagtactacgaagatgcaaacggtaccattgtcaacaagatgatagagagcaggcagctgttcgagagcatcaccctccatccaacattcgagcaagcagacttccttctgctcctcaccaagttcgatctcctagagcagaagatcagcagttccccgctgacctcgtgcgattggttcagcgacttcactcccctgatcagccgcaacctcctcaacggcggtggcggcg

SEQ ID NO: 93819 - DNA, 102 bp, Zea Mays
cgtttggattacatgtataatgtttgagtcacgggccgtgtacagtatggacattcagctgtccccctatgaacaaggagatatgatgttgtttactaagtc

SEQ ID NO: 93820 - DNA, 186 bp, Zea Mays
ttttttttcatatatttaaatgcctcactagattcttagctaagggctggcatgatgcatctgtcaacaagatcaccagttttccacgctgttgaatcgacaggtatagcagacaaacacaatttttatgttgaactattttttttatagaaatttatgttcacctgataatcatcagaatatcct

SEQ ID NO: 93821 - DNA, 104 bp, Zea Mays
atgctgtcggtgaaaacaatgcaaatattttgtccactattaattaggaaacatgatcatattgcccttttgctaccaataactgtagttatctaccataacaa

SEQ ID NO: 93822 - DNA, 246 bp, Zea Mays
atggctacgcagaacaagaccagttggcccgagttgattggcaaggaaattaatgatgcaattgcagtaatagaacaagagcggccagatgtaacattctttgattcagtagatgtggatttgaatgagagcccgaggccttcagacgaactcgcagccggagctatacgtgttgtcatctactttggcctggacccaaacactaatgaggaaaccgttgaagaaactccatatatcaaggcataa

SEQ ID NO: 93823 - DNA, 160 bp, Zea Mays
taaccaggccagcccttttctgtatttgtctactgtacctgtcgattcaacagcgtggaaaactggagattttgttgacagatgcatcatgccagcccatagctaagaatctggttccagtgcatggccatgtgaggcatttaaatatatgaaaaaacaa

SEQ ID NO: 93824 - DNA, 246 bp, Zea Mays
atggctacgcaggacaagaccagttggcccgagttgattggcaaggaaattaatgatgcaattgcagtaatagaacgagagcggccagatgtaacattctttgattcagtagatgtggatttgaacgagagcccgaggccttcggacgaactcgcacccggagctatacgtgttgtcatctactttggcctggacccaaacactaatgaggaaatcgttgaagaaactccatatatcaaggcataa

SEQ ID NO: 93825 - DNA, 246 bp, Zea Mays
atggctacgcagaacaagaccagttggcccgagttgattggcaaggaaattaatgatgcaattgcagtaatagaacaagagcggccagatgtaacattctttgatccagtagatatggatttgaatgagaccccgaggccttcggacgaacatgcacccggagctatacgtgttgtcatctactttggcctagacccaaacactaatgaggaaatcgttgaagaaactccatatatcaagccataa

SEQ ID NO: 93826 - DNA, 112 bp, Zea Mays
ctgcttgaacgttttgcttccctccctcccctatttctatcagcgcttgaatcaacgatgtgcatactttgtttctaatttaagtgttttgtcatttatttttccatgaaag

SEQ ID NO: 93827 - DNA, 936 bp, Zea Mays
agtggtggcatccttgtggcttggaagaggaacattggccatactggactccagagaattgacagtcatagtgtctcggtccagttctgtagacaggatggacaaccgtggtggttaacttgtgtttatgggcccaggggaatgctgataaaattatttttctccaagagctgagagatgtcaaggcagcttgtgttggaccttgggtggttgctggagattttaatctaatatataagactagtgatccgtttagaacgcggatcaatgatttggctcttaaagaaattcagttgcatggaagaaaatatacctggaccaatcaacaagataacccagtgcttgtgaagttggatagagttctatgttctgccgattgggaatcctacttcccaaatgtgcttctactcagttcatcttcacaagattcagaccattgccctctgcttcttggcctaaaagacaacaccgttggcaagaaaatgttccatttcgaatctttctggaccagaatggagggttttcaggatgtggtgctggaagcttggaactctgtacaatcggccagatgtccttttcttactctggataggaaactcaaggagacggccaagagattacatatctggagtgaaaagcaggtagggcatattgtttctcagctttgtctggcaaaggagctgctgcataaacttgaaattgctcaagatcacagacccctcaagaaacagtccttgttgttggcctccttcaaaagaacaatggcaagattaagatcaagaataacatggataaaggagggtgatgcaaacactaaatatttccatatgcatgctagatatcggaaaaggaaaaaaattggtgaccttgctgagagatggagataatattgtcactagccaggctgacaaagctaatctggtggaccagttctat

SEQ ID NO: 93828 - DNA, 240 bp, Zea Mays
atggcgcccctccaccgccggcagccctgcctccgtccccgccgctcctgccacaacctctgcccctgtagcaggcgaccgatacgcccgaggccgagggcactggtggcgagccctaccgtgctcgcggtgcaacagtcgggagataaagttctgctacttcaacaactacagcgagcaggcagccgcgccacctatgcccacccagtctgttctcgaccatccctgcgctcggtgtaa

SEQ ID NO: 93829 - DNA, 277 bp, Zea Mays
ataaacatcggctgcctcgctccaatcatgtccaagccagttgtgtgggaagtcgagtgcccagtcgcctagcatgcaggagagctgggaaagatcattaccgtggcggctgcaaatggttcaaaacatcattgggtcgcactaacccggcatgtggtctcaccctgatcatgggaaagtccacagcaagcagggggaatggcttgccggagttcattgttgccgccaagccgcacggcgacgagaagtctgctaaattgcatcgaccgctggtgag

SEQ ID NO: 93830 - DNA, 639 bp, Zea Mays
acaaaaaccaaacgaagtttatatcagcatagccagcattccagcatctgttgcacataattacaggttccaagctcatatttttacaacccacggcccaccaaaaagcttgagtggtctaccatacatctatctggcagaccctcacaacctacacagaaaaattgttgacgtgtggccacagcaacccgcctgtgctactctttttttttcactcagatacatgtaattacaccagaagccctcaacatggggtgcaaaaaaggatgtacacaagaagcatatttacgtcaggatagaatacacaccgtgaccagtacatgtatatatatactctatgcacacataggagactcgcggggtcagtgcagaagctgattgcagctaaaaataatctgctggctgatgtttataacacctcatcatctggttgccggagcctgtccccctctcgcctgaatcaccggcggcatggctcggagcctgtcggtgacctcggtgaatgaggggcgggcgtcagggttcgccgaccaacattgctccatcagcttttgccagtccgggtcacacttctcaggtattggaggccggagtgtgttattgacgatacccccttctcgcaacaaataacactagtta

SEQ ID NO: 93831 - DNA, 1828 bp, Zea Mays
gtctccgtaccttccgttccctttctcccattcgcacgccgccccgtgccgtcctcctcccagatctcgtggtctcgtggccgtcgccattcccccccgctccgctacacgccgagcgcaccgattgcaaatcagtcgtctccgctgctcctcgccctcgccccgcccgcggcgtggtgaggagaggagatcccccctgaggttgtacgagacggtgcttcaggaccgccctctggcgcggaggacgcataagctcggcggcggcggcggcgacatgaagggctcgaccatcccttcggtcgcgatcatgccctcgccgctcttcctctggcggtttaaggttgtgttgtttcttctatggggcttatgttgttgcaagataggttgggactcagttatgagaatgagtgttgatctcagagacctatttctttatgaggctttcttgtactataatcctcttcttcttgtggccttgatgatttggttgtggggagtaaatctatgggtctttgcacaatcatctgtgaattatgcaaaagtgtttgatcttgcacaaacacatttatctcaccgtgagatatggaggtgtgctacttggttgacgttaattgtccccactagcatgacagcctacctatatctgtactcacatggagaagtgtcccttgcagcatctcaaccagttctcttgtatgctattcttctgatgatcctcctttctccttttgatatgttttacttatcatcacgcttttactttctgagaacagtctggcgtataatactgcctttacaagcaattacatttcctgacttctttttggctgatatttttacatccatgtcaaaggtgttctcagatctggagcgttcggtttgtcgtatggtgaatcgccaggttgcaacaatcgcttggtttgaagcagattctatttgtggcagtcattccgtagctattcctcttgttctcgtgtttccctacttgtggcgtttcttccaatgtctccgtcagtacaaggatacaaaggagaagacatgtcttttcaatgctctcaagtactcgacagcaattcctgtgattttcctttccgctctcaagtatcatgtatatcctgatcaatgggttggcttctaccgccccctctggcttatctctagtgttgtaaattcactgtattccttctactgggatataaagcgagattgggatttgagcatcctaaccaggattttcatgttcaaaaatccaagcatatggactaatcttctttacgggcagaactgggtattctactgggtactgggcagcaacttggttctgcgatgcacatggacatacaagctctcggcgcatctccggcacaactacctgacagtgttcaccatagcagctctggaaatcctgagacggtggcagtgggtgttcttccgggtcgagaacgagtggaacaagatgacggccaaacaaaacttggagatgtcatctgacatgccttccgaaggggacaggctactggattcgagtaaccacacagtgtgagctgaacagcagcctcacatttctcgatacagattcattgccattcttttagcgtgaccattgtggccaatcttacgtcgacggttcagattttgtctgtagagctcaaaaggtcaaagggatacacaataggtttctatataaaaaagttgaaatttgttggcggcttcggatgttatacctcttgaggatgtatactgttatagccctcttgaacgattgaatctaacaggaggtattcgttgagacatgaaagaataaaagtaatgctgaaattttacgaaa

SEQ ID NO: 93832 - DNA, 1102 bp, Zea Mays
ccgtaccttccgttccctttctcccattcgcacgccgccccgtgccgtcctcctcccagatctcgtggtctcgtggccgtcgccattcccccccgctccgctacacgccgagcgcaccgattgcaaatcagtcgtctccgctgctcctcgccctcgccccgcccgcggcgtggtgaggagaggagatcccccctgaggttgtacgagacggtgcttcaggaccgccctctggcgcggaggacgcataagctcggcggcggcggcggcgacatgaagggctcgaccatcccttcggtcgcgatcatgccctcgccgctcttcctctggcggtttaaggttgtgttgtttcttctatggggcttatgttgttgcaagataggttgggactcagttatgagaatgagtgttgatctcagagacctatttctttatgaggctttcttgtactataatcctcttcttcttgtggccttgatgatttggttgtggggagtaaatctatgggtctttgcacaatcatctgtgaattatgcaaaagtgtttgatcttgcacaaacacatttatctcaccgtgagatatggaggtgtgctacttggttgacgttaattgtccccactagcatgacagcctacctatatctgtactcacatggagaagtgtcccttgcagcatctcaaccagttctcttgtatgctattcttctgatgatcctcctttctccttttgatatgttttacttatcatcacgcttttactttctgagaacagtctggcgtataatactgcctttacaagcaattacatttcctgacttctttttggctgatatttttacatccatgtcaaaggtatgtgttagtttaccgagaagtgttgattgtagactgtttttcttgttcgacacatcccaacttggagacaaaatgtcaggaccagacttgtcatattgtgtttagtataatatatagtaatacatttttagtagacattaccttttgactatatgacacattcatgctgttccttagttttcaaaatcagagaagtgattctaagttgtaactcctccattgttttgagttatagcatgttttatctttg

SEQ ID NO: 93833 - DNA, 747 bp, Zea Mays
gtctccgtaccttccgttccctttctcccattcgcacgccgccccgtgccgtcctcctcccagatctcgtggtctcgtggccgtcgccattcccccccgctccgctacacgccgagcgcaccgattgcaaatcagtcgtctccgctgctcctcgccctcgccccgcccgcggcgtggtgaggagaggagatcccccctgaggttgtacgagacggtgcttcaggaccgccctctggcgcggaggacgcataagctcggcggcggcggcggcgacatgaagggctcgaccatcccttcggtcgcgatcatgccctcgccgctcttcctctggcggtttaaggttgtgttgtttcttctatggggcttatgttgttgcaagataggttgggactcagttatgagaatgagtgttgatctcagagacctatttctttatgaggctttcttgtactataatcctcttcttcttgtggccttgatgatttggttgtggggagtaaatctatgggtctttgcacaatcatctgtgaattatgcaaaagtgtttgatcttgcacaaacacatttatctcaccgtgagatatggaggtgtgctacttggttgacgttaattgtccccactagcatgacagcctacctatatctgtactcacatggagaagtgtcccttgcagcatctcaaccagtgtaatatctagcctattcagtagtaattcattcactgctttgtcatcttccttttgtgct

SEQ ID NO: 93834 - DNA, 633 bp, Zea Mays
gtctccgtaccttccgttccctttctcccattcgcacgccgccccgtgccgtcctcctcccagatctcgtggtctcgtggccgtcgccattcccccccgctccgctacacgccgagcgcaccgattgcaaatcagtcgtctccgctgctcctcgccctcgccccgcccgcggcgtggtgaggagaggagatcccccctgaggttgtacgagacggtgcttcaggaccgccctctggcgcggaggacgcataagctcggcggcggcggcggcgacatgaagggctcgaccatcccttcggtcgcgatcatgccctcgccgctcttcctctggcggtttaaggcttgcagctaggcagtcaaagctgtcaaaggctaagaggcacatgcaacctatttgtagatcgaggagttgctctattacacaaaggacattgtagcgaccttaataacttatggagagttagttaggaagaatgaccagtcaggctgaacttttctgaacatttacttccacccagtctttggggaaattgtctgtaactttgacagcaaaattacgttatgagcttctgtttgtgttctcctgtaacttagtgttgagttacctctaaagggaggaatatgttagcttgt

SEQ ID NO: 93835 - DNA, 337 bp, Zea Mays
ttgcacaacaaaatcttaactgctgacaatttgcaaaaaaggggatggccctgcaatcataattgttctctttgttctttgtctctggagacagtgactcatctttgtaaggattgccccttcgctgtggaagtgtggagcatgattttgtcttgggctgagctgcggttccttttcggtatttcaaagacgggaacgcttagcgaatggtggtatagactgaggatgctctgtagcaagcattcaagaaaaagtttcgatggccttctaatttatttctggtggagcttatgggtggagagaaacaacagaatcttcaagggtcaacagagaacga

SEQ ID NO: 93836 - DNA, 1426 bp, Zea Mays
aacgatggacgccagcccatgggccaacgatcctccgtgggccgacttcctaaccgcacgaacctccgagacggagcgtgacgcccgcctcggcgcctccgccctccgtcggcggcgcacggggagcatagaaggtgtcgtactcgtacctctcgcacacgcccccatcgccacgcgtgcaacgaagctggctccgtcgccatggccctgctgccgttgcccccctgttccccgtgccaccgccgggccgcgcctttgccggcgcccacggtcgcctcggcgcgccaccgcagggggagcctgcgcctcgctgcagccggtgcctgctccggacctaccgccgcgcggaagccccgtcccaccgccgccgacaggaggaggtgcgaatgctttgacctccatcggcggttagttccttacgcggaggcttactgctggcagaagtccattgtcgagaggaggaaaaggttgatagacagcggcgaagaccactccgacaccttgattgctttgcaacatccaccggtctacacattgggcaccgacagcaaggaggaatacctccattttgacaaggaagatgctcctttcgaggttcatcgtattaatcgcggcggtgaagtgacgtaccatggccctggacagcttgttatgtacccgattatgaatctgcggtaccacaaagaggatcttcactggtacttcaggtcactcgaagaagtgatcatccgcgcacttaaatccgccttctctataacggcagcaagagtagaaggtctcactggtgtttgggttggggaccgtaaagttgcggcgatagggatccacggttctcggatgatagtttatcacgggctcgcactaaacataacaactgaccttgctccattcagaatgattgatccttgcggcataaaggaccgcggtgtggggagcattaaggagatactacaaagggtgtctgatgcggaagagatcgatgacgcgtcactgatggatatagtgtatgattccatgatcaaggagtttgcggaactcttccagctcagtctagacttcagccctggttgcagtttccagtgagaacaacgcttttagcagaccgtatgatgctgccgttgtattctggacggaatgttagctcacggcctttcgtgctcggtatctccgtgtctgctgcactccaccatgtataccacatccacctttcagtcgcaggatatctctggaatctgtagcagtagagtcgggttcttcggtgtcctctcttcatgggctctggtgtttatagagcatcactgctctctctctctctctctctctctctctctctctctctctctctcttgtatgtaacagtgtatacttacacattcttccatctgagcagataataatatcccagccagcgattttaaaccgtgta

SEQ ID NO: 93837 - DNA, 1797 bp, Zea Mays
aacgatggacgccagcccatgggccaacgatcctccgtgggccgacttcctaaccgcacgaacctccgagacggagcgtgacgcccgcctcggcgcctccgccctccgtcggcggcgcacggggagcatagaaggtgtcgtactcgtacctctcgcacacgcccccatcgccacgcgtgcaacgaagctggctccgtcgccatggccctgctgccgttgcccccctgttccccgtgccaccgccgggccgcgcctttgccggcgcccacggtcgcctcggcgcgccaccgcagggggagcctgcgcctcgctgcagccggtgcctgctccggacctaccgccgcgcggaagccccgtcccaccgccgccgacaggaggaggtgcgaatgctttgacctccatcggcggttagttccttacgcggaggcttactgctggcagaagtccattgtcgagaggaggaaaaggttgatagacagcggcgaagaccactccgacaccttgattgctttgcaacatccaccggtctacacattgggcaccgacagcaaggaggaatacctccattttgacaaggaagatgctcctttcgaggttcatcgtattaatcgcggcggtgaagtgacgtaccatggccctggacaggtatttatcagctacttttgttgtagttgctcctttcgaggttcgtcgtattaattcttgttggtgtttagttatagctcccagtgactagtaatagaccctagtatcggccatgtttgaagtcaggatacgaccgatcttgactctgcatactcttgttcagtctttggttcaaaaaatatataccacgagtgaatatttcacatgcgcttctcacagtcatttgatttgtttctcctagcttgttatgtacccgattatgaatctgcggtaccacaaagaggatcttcactggtacttcaggtcactcgaagaagtgatcatccgcgcacttaaatccgccttctctataacggcagcaagagtagaaggtctcactggtgtttgggttggtaagtgcaatcaacccttcaagcatttcaccaagtgtccagttctcccttttattgggattttcctaatgcttataaaaccaagggatgccatggtgttgctaacgatccatccccgtttcctctgtaggggaccgtaaagttgcggcgatagggatccacggttctcggatgatagtttatcacgggctcgcactaaacataacaactgaccttgctccattcagaatgattgatccttgcggcataaaggaccgcggtgtggggagcattaaggagatactacaaagggtgtctgatgcggaagagatcgatgacgcgtcactgatggatatagtgtatgattccatgatcaaggagtttgcggaactcttccagctcagtctagacttcagccctggttgcagtttccagtgagaacaacgcttttagcagaccgtatgatgctgccgttgtattctggacggaatgttagctcacggcctttcgtgctcggtatctccgtgtctgctgcactccaccatgtataccacatccacctttcagtcgcaggatatctctggaatctgtagcagtagagtcgggttcttcggtgtcctctcttcatgggctctggtgtttatagagcatcactgctctctctctctctctctctctctctctctctctctctctctctcttgtatgtaacagtgtatacttacacattcttccatctgagcagataataatatcccagccagcgattttaaaccgtgta

SEQ ID NO: 93838 - DNA, 1660 bp, Zea Mays
aacgatggacgccagcccatgggccaacgatcctccgtgggccgacttcctaaccgcacgaacctccgagacggagcgtgacgcccgcctcggcgcctccgccctccgtcggcggcgcacggggagcatagaaggtgtcgtactcgtacctctcgcacacgcccccatcgccacgcgtgcaacgaagctggctccgtcgccatggccctgctgccgttgcccccctgttccccgtgccaccgccgggccgcgcctttgccggcgcccacggtcgcctcggcgcgccaccgcagggggagcctgcgcctcgctgcagccggtgcctgctccggacctaccgccgcgcggaagccccgtcccaccgccgccgacaggaggaggtgcgaatgctttgacctccatcggcggttagttccttacgcggaggcttactgctggcagaagtccattgtcgagaggaggaaaaggttgatagacagcggcgaagaccactccgacaccttgattgctttgcaacatccaccggtctacacattgggcaccgacagcaaggaggaatacctccattttgacaaggaagatgctcctttcgaggttcatcgtattaatcgcggcggtgaagtgacgtaccatggccctggacaggtatttatcagctacttttgttgtagttgctcctttcgaggttcgtcgtattaattcttgttggtgtttagttatagctcccagtgactagtaatagaccctagtatcggccatgtttgaagtcaggatacgaccgatcttgactctgcatactcttgttcagtctttggttcaaaaaatatataccacgagtgaatatttcacatgcgcttctcacagtcatttgatttgtttctcctagcttgttatgtacccgattatgaatctgcggtaccacaaagaggatcttcactggtacttcaggtcactcgaagaagtgatcatccgcgcacttaaatccgccttctctataacggcagcaagagtagaaggtctcactggtgtttgggttggggaccgtaaagttgcggcgatagggatccacggttctcggatgatagtttatcacgggctcgcactaaacataacaactgaccttgctccattcagaatgattgatccttgcggcataaaggaccgcggtgtggggagcattaaggagatactacaaagggtgtctgatgcggaagagatcgatgacgcgtcactgatggatatagtgtatgattccatgatcaaggagtttgcggaactcttccagctcagtctagacttcagccctggttgcagtttccagtgagaacaacgcttttagcagaccgtatgatgctgccgttgtattctggacggaatgttagctcacggcctttcgtgctcggtatctccgtgtctgctgcactccaccatgtataccacatccacctttcagtcgcaggatatctctggaatctgtagcagtagagtcgggttcttcggtgtcctctcttcatgggctctggtgtttatagagcatcactgctctctctctctctctctctctctctctctctctctctctctctcttgtatgtaacagtgtatacttacacattcttccatctgagcagataataatatcccagccagcgattttaaa

SEQ ID NO: 93839 - DNA, 625 bp, Zea Mays
gagactccctcttaatgtgttgaatgataagatcgtgctatgtgtttctgcaattggctgcccaaatgctttcattcatacagccagagagattggtccactcaaaatcgccaggttggatttcagtgaccatcatttcttcagtgctcatgacctagagaaaattcaagaaacagcgaggaatctcatggacgagcacagcaaagataccatagtcttagttactgagaaggattatgaccgtgatccagaggccctcaagacactggacgcaaacgtttgggtgctgtcttcttcactgcagattatgcatcacagcaaacaaggagaagatgaattcatgaggaaagtcaatgagattatcacagttacctggtgtgcgaagtcacatgcagcggaccgggccacgggttgctgagggtgtggtttgatatggttgtacctgaaagcaaccggtagtgaaacatttttgcctggagatatgaacattagcatgcaggatagagtttttccttgcagctgtggggttgtttgggtttatggattaatgtttagtctatctattttattcctattttagttcataaattgctaaacacgaaaactaaaatagagttttagtttc

SEQ ID NO: 93840 - DNA, 1354 bp, Zea Mays
cctgtatccggccgccgcgctgcccatgaacggcggcgagtatggtcgtatggaggagatggcgaggcagctcgtcgctcgccttgccgccaccccggactctgctctgcggggcctccccttcctccaccgcgttctcaccctccccctcctctccgccgcgtccgccgtgctccgcctgtccctgctcctttcgcggctccgctcgcgccgcgcgctgcccgtgcccgtcgttagcgtcggcaacctcacttggggtggcaatggcaagacacccatggtagacttcttggcccgcagcttccaccgcctcggcgtctcgccactactactgacaaggggttatgcaggtggagatgagccaaagatgctccggaggcgcctttccgatacttcggccaagatcggggtcggtgcaaatagaacggcagtggcttcttccatgcttcaagaatatggcttcatccatcattttcagaacacatttgccgagaagaagctttcttcagtctgcaaactggaatctggtaataggattggagtagccatattagatgacggtatgcagcactggagcttgctccgagatgtggagattgtgatggttaatgggttggctccgtggggaaactcacatttcattccgcgaggacccatgagagaacctctgagtgcactcggtcgagctgatattgtggtcattcataatgctgacatggcttctgaaatgcaacttaaagcaataaggtccgcaatagaggataataatgcaacatgttcagtgttctacagcagattggctccatcacatttttttgaaattggtccactcaaaatcgccaggttggatttcagtgaccatcatttcttcagtgctcatgacctagagaaaattcaagaaacagcgaggaatctcatggacgagcacagcaaagataccatagtcttagttactgagaaggattatgaccgtgatccagaggccctcaagacactggacgcaaacgtttgggtgctgtcttcttcactgcagattatgcatcacagcaaacaaggagaagatgaattcatgaggaaagtcaatgagattatcacagttacctggtgtgcgaagtcacatgcagcggaccgggccacgggttgctgagggtgtggtttgatatggttgtacctgaaagcaaccggtagtgaaacatttttgcctggagatatgaacattagcatgcaggatagagtttttccttgcagctgtggggttgtttgggtttatggattaatgtttagtctatctattttattcctattttagttcataaattgctaaacacgaaaactaaaatagagttttagtttc

SEQ ID NO: 93841 - DNA, 1358 bp, Zea Mays
cctgtatccggccgccgcgctgcccatgaacggcggcgagtatggtcgtatggaggagatggcgaggcagctcgtcgctcgccttgccgccaccccggactctgctctgcggggcctccccttcctccaccgcgttctcaccctccccctcctctccgccgcgtccgccgtgctccgcctgtccctgctcctttcgcggctccgctcgcgccgcgcgctgcccgtgcccgtcgttagcgtcggcaacctcacttggggtggcaatggcaagacacccatggtagacttcttggcccgcagcttccaccgcctcggcgtctcgccactactactgacaaggggttatgcaggtggagatgagccaaagatgctccggaggcgcctttccgatacttcggccaagatcggggtcggtgcaaatagaacggcagtggcttcttccatgcttcaagaatatggcttcatccatcattttcagaacacatttgccgagaagaagctttcttcagtctgcaaactggaatctggtaataggattggagtagccatattagatgacggtatgcaggcagcactggagcttgctccgagatgtggagattgtgatggttaatgggttggctccgtggggaaactcacatttcattccgcgaggacccatgagagaacctctgagtgcactcggtcgagctgatattgtggtcattcataatgctgacatggcttctgaaatgcaacttaaagcaataaggtccgcaatagaggataataatgcaacatgttcagtgttctacagcagattggctccatcacatttttttgaaattggtccactcaaaatcgccaggttggatttcagtgaccatcatttcttcagtgctcatgacctagagaaaattcaagaaacagcgaggaatctcatggacgagcacagcaaagataccatagtcttagttactgagaaggattatgaccgtgatccagaggccctcaagacactggacgcaaacgtttgggtgctgtcttcttcactgcagattatgcatcacagcaaacaaggagaagatgaattcatgaggaaagtcaatgagattatcacagttacctggtgtgcgaagtcacatgcagcggaccgggccacgggttgctgagggtgtggtttgatatggttgtacctgaaagcaaccggtagtgaaacatttttgcctggagatatgaacattagcatgcaggatagagtttttccttgcagctgtggggttgtttgggtttatggattaatgtttagtctatctattttattcctattttagttcataaattgctaaacacgaaaactaaaatagagttttagtttc

SEQ ID NO: 93842 - DNA, 489 bp, Zea Mays
ccctacagggccaccgacggcggccgcttccgaccgcgactacctccgactgggccaccgacggcgggacgacttcctgacggcgactaccgcgactccgactgggccaccgacggcggccgctacagggtcgactaccgctaccagcccttcctggcgggattcaaacacatcgctacagggctgactaccgcgttgctgccgaggggaagaaatctggagaccacgtcgacgctagatactcgagaactgaagataggaagaggcgttgggggattacctcgatggctagatactcagaacggtggatctggagacgacgtcggcgctagcagatctcgtcgtcggcgctggcaggtgtcgtcggaacgtgtggaggaggagggaggcgtcggggagggaggagccgttgggctcactggcggcgcgacgggtggcggcgtccatgatgccgcatcggtgaggactgaggagggtggatcgggatga

SEQ ID NO: 93843 - DNA, 472 bp, Zea Mays
accatggagccatagcgcgcggttacctcgaggagcagagagcctcgtcgcatgagagagatagagagagaggatcgggtgccgctgcgtttggctcagtcgtgggagcttctacgtagctccgatgacgaattgtgtccttgccttgtggggctgacaacctggtgatctggggatcgattgatgcgtcgggctgagctcaccaaatttctctgccaccgccttcgccggcccactgctctacccgatcgccggtaactatccctcaacagcgtttgtagtggtcggctcttcgtgtatcaccagttagtctcgagaatagggcatttgtgcgctggattctggagctctccgccgtgcgttgaagaccgcaatgctgccgcgacacgtggccggtcgtccgcgtcgaatcgtgcagctacgaatcacctgaagttcatcctgtcacctggattctcaagtgccaggcaag

SEQ ID NO: 93844 - DNA, 127 bp, Zea Mays
atttaatattaaaaacatttaagtatgatgttctactggttagacagcttcatccagtgtctcccgtcattcttctatcagggcatgagtttgaacctcacctcctgcactgtttttaatattttac

SEQ ID NO: 93845 - DNA, 351 bp, Zea Mays
atgttgcgcacaggaggtcggtggctcctcgctccagggctctggtggcgcggtctaggcaccggtgcaaccacctatgtggacttggccacgacgacggcgggggtgagtgcataccacgagcaggtgatggaccactacaacaacccgtggaacatcggttccttcaacaaggacgaccccaacgtcgacactgggctagtcggtgcatcggcctgcgtcgacatcatgaagttgcagatctacgtcgacaaggactccaacaaaatcgtcgacgcctgcttcaagacctttggttgtggctcaaccatagtgtcctcaccccatcgttgtgaacttaacattgattga

SEQ ID NO: 93846 - DNA, 2156 bp, Zea Mays
catactaattttttaattttttagtttaataacaaagtacaggcacagacctattaacttagaagtcctgaactgtccagtcttgaactgtccagtctggaatctggttcgtggttacagcggggtattttacaccaacaccatgatcatgccattgttcatatcggaacagcacatgtggttctgaagtgtccagtctggttgcagcggctgcagtggacgacgcgcttgactcgcccacggtcctccgctcttaccctcttcttcctcggccgtccggggggcctaagcgacttgggtggattgatgaccatctccgccttgacctcgccatcctggccttgatcttgatctgccgtctcactccacagcgtcttgtccgggatcgggtgtatggtctgcgagtaggtcttgcggtacgtcgccacggtgaagcagctctcggcgtagcggtggacgttctgccggcaggagagcagcgccgccacgccatgcgcgcacggcacgccgtagagctgccagccgcggcacaggcagcacctgttgcggatgtccacgatgttcgtcccctcgtgagccgagacgacctcgaactccgcctcgttggcccgggccacctggtacccgcgcgcgcgctcgatggcctcctgcacgcggcgctcggcggcgggcaccaggatcgtgctccactgcatgctcgcctcacgccgctcgttgaaccaggtcatcagctggcgccggatgcactccatcatctgggtcacagggaggccagcggcgtccaatatccaagagctcagcgactccgtgatgctcgccgtcagatgaccgtacctcgtcccctcgaagtaggccgtggcccagagacgaggcggcaggtgccggatccaaacggcagcttcttgcgacatgtcctcgatctccagcagcttcgtctcgaactctatcacggtcagcgcgtgggcggcttcccagagaaggttgacgagcacggggttgctgaactccttcttgaaggtctcgctcacatggcgcatgcagtacccatggaacgcagtcgggaagttgaattcaactccgtcggtgatgcccttctgcctgtccgacaggatggtgagcctcggcatgttctccgtgttcttctccagcaactcgtgcagctcggacaagaaccacacccagttctcgtcggtctcctcatcgaccacgccgaacgccagagggaagagatcgccgtccccgtcgaaaccagtggcgaggaacaaggtgccaagatacttgttcttcagaagggtcctgtcgagcccgataagcgggcggcacgcgttgatgaagccatagatcgatgcgttgaacgatatgaagagccgccggaagcaactgtcgtctgggtttccatagactcgagctatgcttcctggattcgtcctttccacctgcctgcagtactccggcaagagacggtacccttcctcgaaggaccctcggacggcggccatgatccgctccttgcctctccaggcttgcttgtaggacagcgtgatcccgtgggccttgtggatctcttccaggatttccttgggcttgcactgcgggttctcgcgtagcctctcctcgacggtggttgcgacccactggacagacgcctgctggtggccgagatggctgatccccacgcagctgtgggtgtcgtggatggttctgatggagaaggtgggcacgccggcgagcttcgctgcgtgtatgcgccacgggcagccctcggcggcgcacttggcggtgaaccgggtcttgtcggacttgaccgtctgtatctcgaagtggcaggcgatggcggtgctgcggatggccctgcggcagctcatcacatcggggaactcctgccccactgcgagctggaactcggggctcacgaccatggtccgcgactggacgacaggagcgaccgcgagaggaccctgggagaagtcgtgtggctgcagcgcgagctcgtgagcctgctcgagcgagagctggtcgagattatggtcaacacccaggtggtgcgtctcggcgagcgtcagctcgtggctctccgacaagtcgagctcgtcatggtggtggtgatggtcgtgcccgaggacgagctggtggtcatcatcgtggtggtggccgag

SEQ ID NO: 93847 - DNA, 1210 bp, Zea Mays
cggccccgttcgcgcaatcgcgctcccgcatttcgtcgagcaggtgtgaatttgtgatgccgccgtctcctatcgtcctccctgccaccgcgctgccggcggcccgcctcgccagagtggtggccgcctccgaaagcggaggcgcgactcctccgagggcgtcccctcggcgggggcggcgcggcaagcccgggttctctcggcgttcggcaatcaagaagagcttccaccaggagcaggtcgtgttctccactcccgtctccaccgaccccaccgttgccgtcatcggaggcggcgcttccggcctctcctgcgcaacttccctcgccgcccgcggcgtccgctccgtcgtcttcgatacggggatgcatggcctagggggaaggatggcgactaggttcgtcgacggaggcaagcagctggtgttcgaccacgcggcacagttcttcaccgcgagcgacgagaggttccagaggctagtcaacgagtggctcgacagagggctggtccgtgagtggagcggtttgatcggcgagctcgaagccggcggctgtttcaggcccataccttcgttgacaccgaggtacatcggtgtgaatgggatgcgcccacttgcagatgcaatgctgcctgagactgatatgattaaagttttgaggccttgttggataagcaaacttgagccgttcaatggtttgtggcgcttgtttgagaatgaaaagcctcgcggtgaatacgatgcagttgtgatagctcataatgggaaatgtgccaaccgtctgctctctacatcaggattgccattactaacaaaacaaatgaaggttccatggttttactattgcaataattttttaactcatgaggcatatatccttctattcctattgcttaccaagtttcccgcggtcaatgatcagagactagagctcagttctgtctgggctctccttgcagcatttgaagatcctcttccgattccacttcttgattccaatgcagcatttgaaggagcatttgtgagagatgtggattctctctcttggatgggcaacaatacccgcaaactttttccaatgcagacaggcgcacccgagtgctggacatttttcagtactgctgcttatggaaaaagaaacaaagttccacaggaaaatatcccaaaactcactgcagaaaaggtgaaggaagacatgcttggaggagtaga

SEQ ID NO: 93848 - DNA, 854 bp, Zea Mays
cggccccgttcgcgcaatcgcgctcccgcatttcgtcgagcaggtgtgaatttgtgatgccgccgtctcctatcgtcctccctgccaccgcgctgccggcggcccgcctcgccagagtggtggccgcctccgaaagcggaggcgcgactcctccgagggcgtcccctcggcgggggcggcgcggcaagcccgggttctctcggcgttcggcaatcaagaagagcttccaccaggagcaggtcgtgttctccactcccgtctccaccgaccccaccgttgccgtcatcggaggcggcgcttccggcctctcctgcgcaacttccctcgccgcccgcggcgtccgctccgtcgtcttcgatacggggatgcatggcctagggggaaggatggcgactaggttcgtcgacggaggcaagcagctggtgttcgaccacgcggcacagttcttcaccgcgagcgacgagaggttccagaggctagtcaacgagtggctcgacagagggctggtccgtgagtggagcggtttgatcggcgagctcgaagccggcggctgtttcaggcccataccttcgttgacaccgaggtacatcggtgtgaatgggatgcgcccacttgcagatgcaatgctgcctgagactgatatgattaaagttttgaggccttgttggataagcaaacttgagccgttcaatggtttgtggcgcttgtttgagaatgaaaagcctcgcggtgaatacgatgcagttgtgatagctcataatgggaaatgtgccaaccgtctgctctctacatcaggattgccattactaacaaaacaaatgaagagactagagctcagttctgtctgggctctc

SEQ ID NO: 93849 - DNA, 663 bp, Zea Mays
tgctgtttgtggtcgcagcaactgatgaactacttcacgtacaaggctgtgaggaccgtgctgacccagctgtacgagctgaatccgccgagctaccgctggtcctacaacttcgtcgctgtcaacaagcctaccgacggcaagcatttcctccgtgctctcggtaaggagaggcaggagcttgctgagcgagtgatggtcaccaggcttcacctgtacgggaaatggatgaagaaatgcgaccatgcgaagacgtacgagaagatctccgacgagaacctggcgctgatgcaggagcggctgatggagacggtcatctggcctaccgacgatagcagcacggagaagatcggctgatgcctgatgcctgccgaggcgtcgagtcctttcgggttgctgatcaagcttagctccttctattagcatgtagagcagcactttgggtttctctatcagtcagccactcagtcagtgggttgtatataatcggagttgtagtagacagtatacatttctctggggcagtgttattacagtcaatcactgtttgaggtgttaatgtgtcattttgccctcccaattaaacctctacaatcggtctaagtgaagcaaaaatgcttaccatgtagtagctaaatttacatgtgcggggatatacgttgt

SEQ ID NO: 93850 - DNA, 1920 bp, Zea Mays
cttgaagatgcagccaccgcctccgtgtcgtcttcctcgtcagcacgcagcagtcaggtcaccaccaacagcaacagcagtagtgccgtcgcgttgtctcccactcccaagtcccaactcccacctcccccgcccgccgttcaaatctccctagcctcccgaagtaggcaagtagccctccctgttccatcgaacccagcagagcagccagccgaacaacgaagcatgccgtcgaagccgaacgccgcgtcgcgcctcgtcttcctcgctttcctcctcgtcatcagcgccgccgcggccaacgatgacgccgcggcgcggcggacgatggagcagttcgccggcttccccgcctccgacgacggcgagggcccttccagcgacttccacgtcgactccgagggcctccagcgtcagatcgatgaactggcctcgttctccgactcgcccgcgccgtccgtgacccgcgttctgtacaccgacaaggatgtgcaggctcgaaggtatataaaagggataatgaatcaacttggccttgttgttcgagaagatgctgttggtaacatatttggccgctgggagggttccgagcctggactaggagcagttgcaactggatctcatgttgatgccattccattctcaggcaaatttgatggtgttgttggagttctgggtgctcttgaggcaattagtttgctgaaaaggtctgctttcctgccaaaaagatctttggaggttattatgtttacatcagaggagcctacacgatttggaattagctgcttgggaagccgcttaatggcagggattgaagaacttgctcaatccctccgaaaagtagttgacaatcagaatgtgtcatttttggatgctgcagaatctgctggctataagttgaatctagaggacctgcatagcgtatttttaaagacagacaaatactctgcttttatagaactgcacattgagcagggtcccatcttagaaaaggagggtatccctattggcattgttactgcaattgctgctcctgcaagtcttaaggtggactttgaagggaatggcggtcatgctggagcagtgctgatgcctgcaagaaatgatgctggactggcagcagctgaattagcattagcagtcgagaaacatgtcctggaatcaggatcaattgatacggttggcaccgttggtattctgcagttacatccaggagcaatcaatagcatcccaagcaaatcacacctagaaattgatgtaagagatattgatgagaagagaaggaatgatgtcattgagaagattcgccagtctgcagcacatatttcaaagaaccgtggagtagagctttcagaatttaagatcatcaaccaggacccacctgctctatctgacaaatcagtcgttgacgcaatggaatttgctgcaaaacagttaaacctggcatacaaaaagatgattagcagagcctaccacgattcactcttcatggccagagtatcaccaatgggtatgatcttcattccctgttacaaaggttacagccacaagccggaggagtatgcatcacccgaggacatggcgaatggggtgaaggtcctagccttgacaatggctacgctgtcgctggagtgacttgttagcgtttggaggaatcaagtcagcccgtgccaaaaaggcaaaaacaaacacctgtgttatttctaataataagctgcatagcattggcgtcatcttccctgcaccaggcctgtatacaaaccatcattcatcagggtttaggaataaagttgtcatctgtatctgtatgatctggacaatgattttctagcttgatcatattgatatatagtagtgattttctaaatctttatccatataaacaaactaatatagaaacgatgttatatcaattgtaca

SEQ ID NO: 93851 - DNA, 1974 bp, Zea Mays
ggcaaattagcccctcttccgcgcgctcccccattcggccattccttccccccgctctcttcctcctccctcctcgatcccctccacgccagccctgccgcgaccacggacgggcccgtgccgccgcttccgccggccgtactcccccgcgcgtgcctgtgggtctggagcgggcggatttgcacggcgcgttcttgggccgccgccttgcgctgcgccgtgctgtctcctcctccagtcctgtgcaggtgcgcaacaatccggtcccgtgagccgaggatttgaataacccgccactcctgaacccccgacgggccgtttcttccgtccttccttggcggctgcgagtccctgcgcagtttgcttccgagcctttcgagattccgcggagatctgctcagttcgtgccgctcttgtctggttctgatgcgcggacggctgctgcctgtgaggcgttgcgaggagctgaggcccgtctgaggtgggagaggaaaggagctcgtggctcgacggaaaaacagtcctttcgttcgttgcccacgcctgcgggccgcggcctgtttctctccattccaggcttcttccagttccagccatggaggaggtggaggtggccaaccgggccgcggtggagagctgccaccgtgtgctggccctgctctcgcagcagcgggacccggccctgctcaagagtgtagcgtcagagacggccgaagcctgcgccaagttcaggaaggtagccgccctcctcggcagcggtgtcggccacgctagaggcaggttctccagacgagtccggcctctggggctcgttggccacaagagccccgtggggagcggcggcaacaacccggtggagatgctgcccagcgccgccgccgttacgtccccgtctccgtcaaccagctacccgccgcaaatgcgcgctcggctgaacggcgtgccagacccacgagggctggacatggcctgctccagcagcagcaagagcggcggcgttggcggaggcggcgctcatccattcggcggagcgccgaagctggtgcagccgctgtccgtgcagttccagatcgggaacgtcgcgcacaggtacccgttccaccagcagccgccgtcgcggcagaagctgcaggccgccgagatgttcaggaggagcagcagcgggacgatcagcctcaagttcgatagcccaatccctagcggtggcggtggcgccgctggcaccgtgtcgttcgtgtcgtccttgagcatggacgggagcgtgggcgtggcaagcttggacgggaagcggccgttccatctggtcggcaccccggtggcggcgagcgacacggcggcagacgcccaccgcgcgcccaaacgccggtgcacgtgtagaggaggcgaggaggatgggagaggcaacaagtgcggcacctccggcaggtgccattgctcaaagagaaggaagctgcggatcaagaggtcgatcaaagtgccagccatcagcaacaaggtcgccgacatacctcccgacgagtactcgtggcgcaagtacgggcagaagccgatcaagggctccccgcacccgaggggctactacaagtgcagcagcgtcaggggctgcccggcgaggaagcacgtcgagcggtgcgtggacgacccagcgatgctgatcgtgacgtacgaaggcgagcacggccacacccagctgccggcgcagccttccacccagacgtagaggactcagccagcaggcccccaacgaagcagaaagaagcgccgcccgcccggggccatccagtgccttcgattccggccccaacgcagcggcgacggatgagcttggaagccgtttgggcgagctgctcgggggccctcctgagctagctagtactacacaacactgttgaataattagacaaattccaaattaaattccgaatataaatcatgaccaaatcagaagaactgaaataaaagccaaatcagatg

SEQ ID NO: 93852 - DNA, 1118 bp, Zea Mays
tcttgggttgctataccaagttggtagagctatgcttaaggatcaagttttgttaaccaaggttgacctgttgacatatggaattaaatatcagctctggacccatttaagtctgccctcggtggcgttcctatctgctcattcttctatctacagaagtgagcaggtatttaaagggcagggagcagtggaaatctcctctctacctcgagctctactcacataccactgcatgggtgttggggttcttgtattcctgctagtgatgaccctctcccacagccaccaagtctactctgtccagagcatcaagcgccagtggtgaccacgctcacaattcttcaccccaccatagctagaacgttctagggagttgctggtctgtatgaagcttgttccgtaatcatctcagaactcctaccagaaggagtgaagattcaagctgaagtggtgactgaagaggaatctactccagtggctgctgatcaagtggaggagccatctaactggggtttaatagagggatcgagtacctcttcactgcaataaggcaagccccggtgcatttgccaccctccttgtatttacaaaattttatcacttatatgatgcattaggtgataggagttgattgattaaacacttgatgcattaccattccttgaaagaattgattaccacaccttgttacctgttttataaaagctagagatgcttagtcatgctgatagactaagaaaaatatttttgatctgtgactcatgtttttacaaaaagaaaatgggcttgggataatgaaggcatcaagacgttgataaattcattatccaggcatggcccctctgtcaggcgccaaagttttgaaatagcttaaaatgggaccagacgttgagcaggaaaggtcgcccgtctgtgtcgattaaggaccgtaccgattgttggcctgatgatctaggaccttttaactggccacatacctcgtcatgggtaagcctgaacccggctattccatacgtgaaaagacaaccgcgcactgggcgtgggagatggtgggagtagcagttaccctcctggcaagaggctgaatggtagggtaatgtgctcccgggtagcgcgga

SEQ ID NO: 93853 - DNA, 644 bp, Zea Mays
cccagtactgtccattcggtgtctgtctgtccactctcgtgtcctcaagccaggtccagtgaacctgccccagcgccatcccttatttaagtgcttgtccagggagccctgttgtctcgagctttagctggatccttgggcatctctgtggtggtgtgtgcaagcctgagttcatctccttagcctctgtgtcggctttgttcagttcatcaagtgccattccattgtctggtactctagtgccacagcaaccatccttccacctcgccgtggtcagactatctcaacaagtttgttgcccagaacagagttgtgccaccgtagaccagagccgtgagcagcccctgtgttgaccgaacaactcacactttctcttgtcgattccttgtgagcaccaaagtttagaactcctaccagaaggagtgaagattcaagctgaagaggtgactgaagaagagtttgctccagtgcctattcatcaagtggatggagctatctaactggttattgggtagaaaggtcttgaacctcttcactgcaacaaaggcaagcctcagtgcatgcaaccccttccttgtgtttttaaattattttacatactttaagtctagtgaatgtgcattaggtttataggagttgcttgg

SEQ ID NO: 93854 - DNA, 122 bp, Zea Mays
tcttgtgttatccatttaaatataaatgcatatttctttttttatataattgttatttatcttagattggtcccattatttggagatgcaaaagaagaaaaggaaccaaaataatcccccaa

SEQ ID NO: 93855 - DNA, 305 bp, Zea Mays
cgtgattttcagtaaatcagagagaaacaaacctgcatcatcttcatctccagagtaccttagccgtttgcaagaaataactgaaaaacaaattcagaggtccattgaaaagggtgcaaaaaaagagaagtgcacagaagaagacagggaaatggagaaaaagaggttagaattggaagccaaaaaggtcatcatacgaaaaagggaattgaaacttcaagaactagaatctgctgaaaaaagattagaaaggctggaggcaacgaatgaagaagatgtccaaccccatgtttggattatgatac

SEQ ID NO: 93856 - DNA, 86 bp, Zea Mays
aactgctacgatcggtcgatcatgggggaggaagtttctggagctctgcccatggcgtcagtccgatggagctgctgggggagatc

SEQ ID NO: 93857 - DNA, 156 bp, Zea Mays
aataacagaattatttcataaatcaccaaagacaaaatggacagaagcatgcacaatccactatctgcactaaacaacaactgtctagatttctcttcatttttattcttttattcctgtgcccatgacagttgcttctatcacctcagagggatc

SEQ ID NO: 93858 - DNA, 378 bp, Zea Mays
atggagttaaaaagtttgtctggtaaaacaccggtgctcgatgtgggcacaatatcaaagataaagtccggagatatcaaagtgtttcccgcaattgaaagctttcaagagcgtggtgtacagtttatcgacggtagaatcgaatcatttgatgttgcgattcttgctacaggatataaaagtaatgttccatattggttaaaggagaacgattttttttcacaaaagaatggatttccacgtataccaaatgaatggaaaggaaacaatggtctatatgctgctggattctcaagacgtggtctctttggtgtttctatagatgcaactaaaattgcaaatgatattatacaatcttataataacacaacatcataa

SEQ ID NO: 93859 - DNA, 1449 bp, Zea Mays
atggcgacgccggagctttggtggtactggtggctatgggtgacgacgatgctggccgtcgtcgtctcgaccgtcgtctgctacctgaccaaccagcaccgccgctgggggggctggggctcctcctcagggcgtcgtcggccgccgggcccgcgtcctctcccgctcatcggcaacctgctggacctgcggcgcgcgcccggcagcctccaccacacgctggcgcgcctggcccgcgcgcacggcgcccccgtcatgcgcctcgacctgggcctggtcccggccgtggtcgtctcctcccgcgacgccgcacgggaggcgttcgcggcgcacgaccgccgcatcgcggcgcgccccgtcccggacagcaagcgcgcgctcggcttctgcgaccgctccatgctctcgctgcccagctcggccccgctctggcggaccctgcgcggcgtcatggccgcgcacgtcctgtcgccgcgcagcctcgcggcgtcgcgcgccgcgcgggagcgcaaggtcgccgacctgatcgggtacctccgcgcgcgggccgggaccgtggtggatcttaaagaggccgtctatggcggcgtcgccaacctcgtctcgactgccatgttctccatcgacgtcgtcgacgtgggcgccgccgagtcgtcgtcggcggcccacgggttgcaggagctcctggaggagctcatgcagtgcatggcccagcctaacgtctccgacttcttcccgttcctcagcgcgctcgacctccaggggtgtcgtcgccgggtggccgtgcaactgggccaggtcctacaggtcttggacgacatcactgaccgccgtttggcctcctcctcctcctcctccacgtctagcaagggcggggacaggcgcggcgacttcctcgacatcctcctagacctccagtccacgggcaagatcacgcgcgacaacgtgacgctgacgctcttcgacatcttcgcggcagggagcgacaccatggcgctgaccgtggtgtgggcgatggccgagctgctccgcaacccgggcgtgatggccaggctgcgcgcggaggtcagggacgcgctgggcggcagggacgccgtcgaggaggccgacgcggcgggcctgccgttcctgcaggccgtcgtgagggaggccatgcggctgcacccggcggcgcccgtgctgctgccgcacaaggccgtggaggacggggtacagataggcggctacgcggtgcccaggggttgcaccgtgatcttcaactcgtgggcgatcatgcgcgacccggcggcgtgggagaggcccgacgagttcctgccggagcggttcctggccagggacctggacttccgcgggaagcagctggagttcgtcccgttcggctccggccgtaggctgtgcccaggccgccaggcgtgcccatggcggagcgggtggtgccgctggttctag

SEQ ID NO: 93860 - DNA, 851 bp, Zea Mays
acagttttcatgaatagggaaaatgaggttgcccttgtgccatttcaccaagtaaatgttgttcagtcacctcctgtgcaattccaaagttgcagtggccttattctacagcaactggtaccagtccaagaccagcagcgctcaatccaaactgctctgtactgtatgcgaggccaaagccatctggagcacagacaggcccaaatgttcgaagctgctggtcaatctctgcagacacacactcggaaaactcagccacctacagtagttgaggtatctcaggtaaccagtcaggcaccagagttctaccctcatccgcagcaccaatggcaacatcagatcggccagcaggttttgtcacaggcaaggcaaccacaaccacaggtactacagcagcagtacaacaacatccagcgaggtccagcacagatgtgtacttgtattgttttttttgtatattagtttttttctctatttttagggaaaaaaactacgtgtttattatgaccattagatcttgatctagtggatatgagatgtgtgtgttttgtgtttgcaaaacacacagattttcctttaaaagaaatctgcgtgttttttcagctaaaaacacacgtgtgttttttgggaaaaaattgcccatgtgctgtatagacagtccctagatttatttaccattgttttttgttgggctaggccaagctattgtcctagcaatactcggccggccacagctatcacatatcacctcgtcctcgtgagagtttgaatagcacaagcacgcatttttttcccagtgtttgcaggtcatcgcacaagcaccaccacccgtatcagactgtaccgtgcat

SEQ ID NO: 93861 - DNA, 107 bp, Zea Mays
atgtcagccatagacttctattgttcagttgacaaggttgaaggggccgacggaaaagatcgtgtggtggtcacatttgatgggaagtatttgccttacactgaaca

SEQ ID NO: 93862 - DNA, 310 bp, Zea Mays
atggagtttcactcttgttgcccaggctggagtgcaatggcgcgttcttggctcactgcaacctccactgcctgggttcaagcgattctcctgcctcagcctcccaagtagctgggattacaggcatgcaccaccggacacctggctaattttttatttttagtagagacggggtttctccatgttggtcaggctggtctcaaactcccgacttcaggtgatcctcccgctcggcctcccaaagtgctgggattacaggcgtgagcaccgcggctggctgaacaaacctcttcaaggtgacgaacccagg

SEQ ID NO: 93863 - DNA, 504 bp, Zea Mays
atggccatggaggagagagagagagagaaaagcaggggcagcgatggccatggagatggggagctgcacgcaggggcgagctcgacacggtggagcacgcgacctcgggcgcagcggccatgccgcgcaaaggaagctctggcaccagggagcagggtgaggcaagcagagaggggcgcgacacggattgaaggactagaagcttgggcgccggcagaggaagctgggagcggaagggagctccacaagctgggatccgacgcgcgcagcagggaaaaggggagggagggagagaagtctagggcgcaacagcttggaggagagctcgaagtggtgcgtggaggggcgagccagggagctccgcgagctggaggaatgcgcggctgggggaagacccataggaacttgagcttggggaaagggaaccggcgagcagaggagatggggcgccggcagagaggagcacgtggctggaaaaaatcagggagggagaggggcggctga

SEQ ID NO: 93864 - DNA, 145 bp, Zea Mays
gaattaagatttttagcgataaacaaagggtcgatatgctatacggcaaacagctacacactctattttccgaatcacgaaacggaaaatccgaggtttacgattctgactaaattttgtttagatagttttcgtgactattttg

SEQ ID NO: 93865 - DNA, 247 bp, Zea Mays
atggagattgaggccgagcgaaccgagagggcgtgctggcgggcaagaaggccgcgacgccatggacgaggtggagcgcgcacaggaaagactggcgagcacgcgcgcaaccagggacaaggcacggagctggagctgagcacaaccaagggagggacctcggcatcgcagagcagggagaacacgaaggctttcctcgatccgccacatttccacacggccgcggcgtgccatggtcgaacctagg

SEQ ID NO: 93866 - DNA, 900 bp, Zea Mays
atggctgataaggcagattggtgtgatgccaatgtgaggcatttcattgatgtatgcaaaggagagatagatgctgggaatcggccgatgggaatgttcaccaaaactggttggaaaaatcttagaactaagcatgaagaaaaaacaggccagaagctaaccaaaaaacaattaaagaataagttggacaatatgaaaaaggaatatacatggttcatggagttcaagaattatgccactgggcttggatgggatgaggcaaagcaaacagttgactgttctaaggaatggtgggatgaacaccttgctagatgtaataatcctggaaaaggtattaaatgcaaccatgtgaggttcagaaaacaaggacccaagcaccttgatgatctacatatattgttcgataaggtacacgttagcggggctactgcatcctgtcctggagatatatcctcggatgagtcaagtgatgatgatgtggttgaggtacaaaaaactgttgataatgttgatgtgaagctggctgcgttgaagaaatcaaaactaggaaaaaggaagcgtaaggactgctctactgctactaaagagaaggatgagaagagcccattctttcgactgtacaagaacacatgtttgaagatagaaactgcagcagagaagatctccacaagtgttgaagcatcatcgactcctccaaccaacccagtccctagtattgcagaggccatgaagatggtgaaagattgtggggtgcaagaaaaaactgcactaatgcacacagctaccttcctaattgtgaagcctgaatttagggaggtcttcagcttactagaaacaaatgaaggaaggctagatttgcttgaaagggagcatgaaaaggagtcgattaagcggatgtag

SEQ ID NO: 93867 - DNA, 2165 bp, Zea Mays
cgtaaataaatttcatttttctccctgtcgtcctcctctgcttaactcccttcacctccacctccacctccacctcggcgtcgtcgtgcgcttcgatctctccccccatttccacgcggaggggaggcgtcggcgcaataaaaggcggcgcttttgcatcgcccctccccggcatgcgtagctagcctcgcggctggcccccacgccatgcagaccaccgggcccgcatcgccggataagccgccagttgttgacccggaggccgacgacaaggtggaggaaggggcgcgggcgaaggaggacgatgcggcgaaagtgagcggcgaggatgaggatgaggaagagcaggaggggaggagaggcaggcggcagcggcgccggcgaggcggtgcggcgggggacagctccgtggccatggtgaagcgggagctgctcgcgcgctgcttgacgtgcccgctctgcgaccgcctgctccggaaggccaccaccatctccgagtgcctccatacattttgtagaaattgtatctataataagatcaatgatgaggatctggaccactgtccagtatgtaaaattgatctgggctgcactccagtcgataagcttagagctgatcacaatatacaggatgtgagatcaaaagtttttcccttcaaaaggaagaaggttaatgctgaagaggcagaatctcccattatgctacctgttaaagttaaagagaggtctatctcatcattggtggtcaatacacctagagtaaccccagcagcttcaacagggaggcgaacaagggtggttaccaggaaggctgccgcattacgtggccttggccctatcattgtggatcctttaaagaaggataatgataactcaaataagcaaactgataattcaagcttgctagatagcttgagcaaaatacctcaaacaagaagacagttattgtcgaatggggacacatcaagtcacccctctgtcaaagataaagcagatgataataaggacttcgataagtccgagctctggaaacctctgaactgtcttgtagaggctgcaagcaaaacaaagcccctgacaagtgcacaaagtccagctttgaagggagaattcagagaatctcccagtagcgaacattttagcagaacaaaggtcaaagttgaagataacaaaagtgacgatcctgagccaatagtgctgcttagaaagagagggcggcctggccggaagaggaaaaatcccctacctgaaacaaatgcagcttccacggctacagctatccaggccagaaaggcatttagcccgatatggttttcattgattgcctcatttgaccagaaaggcaaccctcctttgcctcagatacctgcccactacttgagaataaaggatgggagcatacccgcatcatccatccaaaagtacattatgcagaagctcagtcttgtaagtgaatccgaggttgaaataagctgctgcgggcagacagtggggaaccttgggcaacccgtgcgcaacctggtggagcggtggctgagggttggcccggcacgcccgctgcacaccgtgataggctcctccgggggagattacgtgatggtgataagctatgggcggccgaagtctgcgtcctcttgaaaacgcgcccgtcgtcaaccatcagggaagagttcttttttgagtgtcatatactcgatagcgttagcgtagcctgctgctcatcctctcaccgatgtttctaagattatgcttatctgttctttaagaaatcgtttgtttgttcgttcgttgttaccatgcataatacatgtgtgatggaagttgctgtaatttgggatttggtaggctgcctgtgagaactgacgtttaggttggatatacaaacagaggctagatcgttaacctgagcgatgagtcccttacgcgggagagtgctgctgattcagtttttcccttcctgaaagaaaaagaacccaccataatatcccgctctgattgactgggatttatacgtgccctcaacagttacatttttttttatcttgaaggttggcaatctggatcctgttaatttacaccatctcctccggcatgtccaaatggtacttgtggcatctttgttcagtcatgcacatggaaagtttgtgtgtccttttcctccctct

SEQ ID NO: 93868 - DNA, 2187 bp, Zea Mays
cgtaaataaatttcatttttctccctgtcgtcctcctctgcttaactcccttcacctccacctccacctccacctcggcgtcgtcgtgcgcttcgatctctccccccatttccacgcggaggggaggcgtcggcgcaataaaaggcggcgcttttgcatcgcccctccccggcatgcgtagctagcctcgcggctggcccccacgccatgcagaccaccgggcccgcatcgccggataagccgccagttgttgacccggaggccgacgacaaggtggaggaaggggcgcgggcgaaggaggacgatgcggcgaaagtgagcggcgaggatgaggatgaggaagagcaggaggggaggagaggcaggcggcagcggcgccggcgaggcggtgcggcgggggacagctccgtggccatggtgaagcgggagctgctcgcgcgctgcttgacgtgcccgctctgcgaccgcctgctccggaaggccaccaccatctccgagtgcctccatacattttgtagaaattgtatctataataagatcaatgatgaggatctggaccactgtccagtatgtaaaattgatctgggctgcactccagtcgataagcttagagctgatcacaatatacaggatgtgagatcaaaagtttttcccttcaaaaggaagaaggttaatgctgaagaggcagaatctcccattatgctacctgttaaagttaaagagaggtctatctcatcattggtggtcaatacacctagagtaaccccagcagcttcaacagggaggcgaacaagggtggttaccaggaaggctgccgcattacgtggccttggccctatcattgtggatcctttaaagaaggataatgataactcaaataagcaaactgataattcaagcttgctagatagcttgagcaaaatacctcaaacaagaagacagttattgtcgaatggggacacatcaagtcacccctctgtcaaagataaagcagatgataataaggacttcgataagtccgagctctggaaacctctgaactgtcttgtagaggctgcaagcaaaacaaagcccctgacaagtgcacaaagtccagctttgaagggagaattcagagaatctcccagtagcgaacattttagcagaacaaaggtcaaagttgaagataacaaaagtgacgatcctgagccaatagtgctgcttagaaagagagggcggcctggccggaagaggaaaaatcccctacctgaaacaaatgcagcttccacggctacagctatccaggccagaaaggcatttagcccgatatggttttcattgattgcctcatttgaccagaaaggcaaccctcctttgcctcagatacctgcccactacttgagaataaaggatgggagcatacccgcatcatccatccaaaagtacattatgcagaagctcagtcttgtaagtgaatccgaggtaagatttcaactcttctttatttttttagcaactgtttctctgtacttaacgcggccctcggattatctaagcagaagcagtccatggagtttgtagctaaaaatgcttcttagaccattgttggcaccagtacatgtcggcatgttccagaatgtatcaattggataaatctcgtcttagaaacagaggcgaaatcagatgtctctgatcttagtgctccttatcaccttgtataggagtgatgccattgctgttctctccattgcagctaggatgcgcatttcaggcgcagaaagtcctgtttccccactgtcttagtcgccttttcaagtttggatattccttttggcgctacgatctgtctgagcacagttgtgtttacaggttgaaataagctgctgcgggcagacagtggggaaccttgggcaacccgtgcgcaacctggtggagcggtggctgagggttggcccggcacgcccgctgcacaccgtgataggctcctccgggggagattacgtgatggtgataagctatgggcggccgaagtctgcgtcctcttgaaaacgcgcccgtcgtcaaccatcagggaagagttcttttttgagtgtcatatactcgatagcgttagcgtagcctgctgctcatcctctcaccgatgtttctaagattatgcttatctgttctttaagaaatcgtttgtttgttcgttcgttgttaccatgc

SEQ ID NO: 93869 - DNA, 1221 bp, Zea Mays
aaacctacatgcagaaattcgtacccagactccatagaaacactgctttggtgccaaatccaaaacacaactgatatgtgcaccatgagaatcgcagttcctcaaggccacatccatatcaatgcgcagagtccgggctggtgggttcctctaccatcgaggggacgcaaagcagtaagccagcaaacagatggatgggatgggggaggggcgcaggtagccagacggtgtgggactggatgctgagaacgcggccggtgtcggacggcagcgcgacggacaggatcggcggccgcgccatcttcgggtacgccgccgccgccctcgtccggcccctccgcgtcagcagcagcgaccaccacccaaacgcctccctgtcggcaggtgaggtcaggcctgctgcgcggctgcgccagcagcggggcacggcggccctcccacgaggcgcgcgcggcggcagtcatgcgacgcaacgcacggagcggcgggcggtggaaccgtacggtcgggacggaccgcttggcgggatctgtgccgtgcgttacagaagggacggatccgatcctcaccgtgctcgtgggggcgccatggcggcgggctcgacgggatggccttggagattttaggctcgccagacagatccggggctccctgaaaggccttagcccacgtagagggtgatgggctcgtcgtcgtcacccagatgttgagcggaatgggagggatggcgccggagcgctagcacgcgttgggctcgcatggcagtgtcacgcacgcatcgcatgctgctgtcctcggcccggcaacagcctaccgacgactcctgtgggctgtggctgtgggagtgagtgggactgggtcacccgtcactgggggctgggctgggcagacgcggtcgtcgctgaccgtgacgcagacggcggcatgtgctgcctgtggctgtgtgcgcactgcatgctgctgcgcacagtacgttgcagatacaacacttttgatggaaatacgaaacgcccacagacgcgacagattcgaacgtcacgctaaaaaaaacggtagtgaacgagctagccagtccatcacatcagtgatcagtctccgtcacggtcacgggagatgacgtggaaatcggagctcacgagtcaagatgcatgccagtttttagtttctcgtttcgaaccaaaagaaacattgcgcgcttcttggcaaaaaaaaaaaaaaaaa

SEQ ID NO: 93870 - DNA, 1699 bp, Zea Mays
attccttcctcctcatccaggcagcacagctccctccccactcgaggctccgagctttattttttcttgttttgttttgttttcttggtaggagtaacaatagtttctggcagccttcttcctcctcgctctctacccgaggagagaggagaggagagaaatccggaggcaaagcttcagggtttgtataaagggattctagatctaatcgactaaccagagagaaaaaaaaacaaaaaataacgcgagaaagcatgagccacttcgccgccgccgccgtgaagagccccctcgccgtggccgcgcccgccgccggcgacgccaagagcccgctcttctgccccaagccgcggcgccccgcggcgcccctgcggtgccaccagggcggcgacgccggcatggatctgctcgacctcctcctgtcaaagcacagtgtttagggtgatgaacagtgacacactgacacgctatatctgggggagagagaaggggaccgacacgtagggggcgctgtaggggcaccgctgcggccataagactgtctgcagcgccgcactctagccctcctctcccctattcctattcattgcttaggggctacaggtgacctctacgtcccgcagcgcagccctctaccgtgcccccttcgtagcggaccgcttctctctcacgccagatcgagaggagcgctgttcaccccctcgcggcattgttttctccctttcgcgcgcgcatcggaaggatcagaagcattttcgttgctgatgacgatggcggtacatcgacggacaaagcccgacgagagattcgtctccatctcgccttgtcttcctccctccttcagcccgaggaaaccgtagctcggggacggcatcttcaactccgacggcgacacctgggtggcgcagcgcaagacggccgcgctcgagttcaccacgcgcacgctccgcaccgccatgtcgcgctgggtctcccgctccatccacgcccgcctgctgcccatcctcgccgacgcgcacatcgtcgacctgcagaacctcctgctccgcctcacctttgacaacatctgcggcctcgccttcgggaaggaccccgagacgctcgcccggtgcctccccgacaacgccttcgcctccgcgttggaccgcgccacggaggccaccctcaaccgcttcatcttccccgagtgcgtctggcgctgcaagaagtggctgggcctcggcatggagacgacgccggcgcgcagcgtccgccacgtcgaccgctacctctcggctgtcatcaaggcgcgcaacctcgagctctccgcctccttgccgccgccgccacgaggaaggacctcctctcggccacgccgcacgacgacctcctctcgcgcttcatgcgcaaggggacctactccgacgaggcgctgcagcacgtggcgctcaacttcatcctcgccggccgcgacagctcctcggtggcgctctcctggttcttttggctggtctccacgcaccccgccgtggagcgcaagaatatttgtaatgaaattgcaaatatcaaaccgtattcgaataataatggaatttgcttcgcaggaaaatatattccagaaccgaagacggataatacgttttcacgaaattatgcaatttcgaatgtattgtaaaataatagttgttatatattatatgtgcaagtaattgtaaactaa

SEQ ID NO: 93871 - DNA, 1682 bp, Zea Mays
attccttcctcctcatccaggcagcacagctccctccccactcgaggctccgagctttattttttcttgttttgttttgttttcttggtaggagtaacaatagtttctggcagccttcttcctcctcgctctctacccgaggagagaggagaggagagaaatccggaggcaaagcttcagggtttgtataaagggattctagatctaatcgactaaccagagagaaaaaaaaacaaaaaataacgcgagaaagcatgagccacttcgccgccgccgccgtgaagagccccctcgccgtggccgcgcccgccgccggcgacgccaagagcccgctcttctgccccaagccgcggcgccccgcggcgcccctgcggtgccaccagggcggcgacgccggcatggatctgctcgacctcctcctgtcaaagggagaggagagcggcctgtcggcggcgtccccgctgttctgcggctcgccgccgcggcgggcgtcgaacccggtggtccacgacagccggttcggcgtggactgcccgcccctgcccgtgcccatgccggtggcggcggcggccgtgcaccggccgtcggcggcgccgcccatgtcgccgcgcggcggcaacgggtgcgcccgcgcccggttcgcgttccagcccgccgcggtccgcgtcgagggttttgactgcctcgaccgcggccgcggcggccgtggccacggcatcaccgccatggcctagatgcacatacaaacgaacaccaagtaacccactcgcatccccctcttctttcgccccctcctccatccatggtgcgaagaaagtgtaaccatccaagcactttgtcggaggagagagggagagagaggatcaatcaattcgtcctaaatttaaccctcctaaaaaccacttatattactacttttatttatataaatccgtccccatcccaaccatccaccagcccgcccgccccgcctgatccgtcccagcgattgctatgagtttaggtgattttaccacagatcttcctcttttttttgtatgtaaataaagtttgaggtccaggctcgtcatgtaaattcgggagcgagtgaaatcgggtacgtaggaattaggagcagagggacaagagggcctggctgcttggcaacagcaacaacagaaaaaatgggggaaagaagagggaagggccttcttgatcaagaatcaagatctcgtctcctgtctgtctcctctctcggggagggagggagggaggattggttagtcgttggattaggttggggagtgggaggtcgtgggagtagttaggtaatctgtcctagttcatcaatcaacgaggttttctttttctctttttgggttttcgatggaattgtttttgtccgtccgtccatgcaaccaaggaagaaaagaaatttccaaggcccatggagaatctgtacaaaagagtggctacgtgcaagagggcaccgttgagtctgtgagcagaagcaagcagcagcagcagctaggttgttcagtcaggcagtggatgagctgtgtgtgagagagagacatttattttgtggcgttttccctttttcccccttttctcatgttgtaatatcctgctgtgattgaaatgaaatcaagctgtataatactggtagtattattaggctatccgcaaccgttacccctaaa

SEQ ID NO: 93872 - DNA, 103 bp, Zea Mays
atctcatccctacgtgattctcatccgaacactataaaaactatggccgctctcttccatcccactatatacatccaaccaaacacacactaaacgccaacgc

SEQ ID NO: 93873 - DNA, 407 bp, Zea Mays
ggtggacttccggatcgttcttagaaattttgcccgaacttcggtaaaggcacctgatctttgctttgagaaacaagggatgtagcagcactgccaccacacttttaaataaaggaataactgattaataatgatgttaaacaggaagggtcaagtctagggaattattacattctaatctttcatggtagttgaactgtgtagtttggtgggctgagttgtctatcttttgtctggtcatgaatgttcatttctaccgctgcattttgattatactatgtcaattatctttcttttatatcctgtataaactatatgcttcccttgttatgctactttcaagggaggtgttgccggattttgcaatactttctttctctatgtgttgcataagttttgtagaaagg

SEQ ID NO: 93874 - DNA, 576 bp, Zea Mays
atggatcttgatccggccaccgaggtggcggagcatgcacttgaggatcacaatgagcagatggatgagatggcgttgtttggacataatgtggatgctgttgtcgacttcgacgcggtggagccgacaccgaccatagccgccctcttgtatgaatgcaagtatggtgacacactcttgcgtggacaacatgtactagcaagtggagacagtgataatgtcacccaatttggtgtagacttcaacattcttaattggtggaagaggcataagcttacttatcctattcttgctcttctagctaaagatgttttggttgttcctgcttctaccatatcttcagaatctacctttagtcttgctggcagggtgctcgaggagcgacgacgacaactaacaacagatatggttgaggtcttatcttgtattcaggattgggagctagaagacaagcatatgcataatactgtcgaaaacgatacgaaggaactggaagcaacctatgagaacatgtaccttgatgttgaagatagagacaaggacaaagatggagaatcaagacctggaagaggttga

SEQ ID NO: 93875 - DNA, 1621 bp, Zea Mays
atggagggcggtaacatactgttcaagggtgaacactttcccccgggtgaacgattccctacctgggacgggatttctactcgttggcttctgtacacggaacaagcaccttctgcatggctgaattttgcattgtgtggcttggtggggatcgtcacagcatatgcttttgtttggatttcgaagtattacacggattataaacacgagccagtccggcttttagctctttcgagttccacaggacatggaactaatattattgctggagtaagcttgggaatggaatcaacagcactaccagttctagtgataagtgttgccattatatcagcatattggctggggcagacctctggcttggtggacgagtctggcaacccaactggtggtctttttgggacagctgtagcaacaatggggatgcttagcactgcagggtatgttctcaccatggacatgtttggtcctatagctgacaacgctggtggtattgttgagatgagccagcagcctgaaagtgtgagggaaatcacagatgttctagatgctgtgggcaacacaactaaagctactacgaaaggatttgccatagggtcagcagctctggcttccttcctcctgtttagtgcatatatggatgaagtagcttcttttgctcaattgccattcaaggaggttgatatagcagtcccagagatttttgttggtggtttattaggctcgatgcttatattcctgttcagtgcatgggcttgctcagcagttggcaaaactgcacaggaagttgttaaagaggtcaggagacaatttattgagaggcctggtatcatggactacaaagagaagccggattatggacgctgtgttgcaattgtggcatctgcatccttgagagaaatgataaagcctggagctctagcaattatatcacccatggccgttggcgttgtcttccggattttgggccactacactggtcagcctcttcttggagctaaagttgtagcctccatgctgatgtttgcgacggtcgctgggattctcatggcactcttcttgaacactgctggcggcgcctgggataatgcaaagaagtacattgagactggcgctcttggtggcaagggcagcgagtcccacaaggctgcggttactggcgacacggttggagacccattcaaagacactgctggaccgtcgctgcatgttcttatcaagatgctcgccacaatcacgctggtcatggctccgatattcttgtgattaaccaaccactcatcaagcttgctattaaccctgcggagatgtacctatgcgaccaggtagatgaggtgtgtgtgtgtgtgtgttacctgcatgtgatgatgtaacggtccaatcggtttgtgtcacgacatgctgtacccagagaaagaagcggcgatctatacccatgtctcacggtagatattatactgatgatgcaaatgccgtgttttgttactgaattagtggcctgaaagttgcgcttgttgattgatgaaacattatggtagcgtacttgtatgctgcatcccacaatggattttatgatgtggaccccgaatgttttgcttatacaatgtttgctatgcataca

SEQ ID NO: 93876 - DNA, 1534 bp, Zea Mays
ctggcctcgcagatccgcggcctgcttcgttgctgccttgccagcaagcagccgcgctcatcctcgcggacgccagcggcggggcagccccctctcctgtgatccactccggcgcccgtggccgcggttgctcccgcttgacggcaaaaggaccctttcaatcaaagagaatttggtcgctgaggctggaaaaaatctggatgtgtttaacttttagggcttactatttttgagaggtggtctgacatagactatccacaattcagcgccaggtctcagggagcgacctaccccaaggtggggagttcgttccttttccagtaacgaggagggcaaactcatattccatcatgatggaagaggacatggaaaatggaaggtcgtatcaagaaagaccaaggactttttcaacagtacgaagcaagtcatctatcccgctggccttacgtttgttgatgaggataaatccccgtgccttgattattctttctcttttggtattcagtggtgtgctatatgtgggagccagtacatcaccaattgtggtctttgtgttctgtatatgtactctcagtctattcttctctctctaccttacaaagtgggttcttgctaaggacgaaggaccaccagaaatgtctgagatatctgatgccataagagatggtgctgaagggttttttaagacacaatatggaactatttctaaaatggcatttattctggcctttgtcatccttggcatttatctctttcgcactactaccccacagcaggaggcgtctggcttgggaagggcaacactagcctatattacagttgcttcttttcttcttggagcattatgttctggaatagctggctttgttggaatgtgggtgtctgtgcgtgcaaatgtacgagtttcaagtgctgctcggcgctctgcaagggaagcattgcagattgctgtccgtgctggtggtttctcagccatcgtagttgtttgcatggctgtatttggcgtggcaatattgtactcaacattttatgtttggcttggagtagattcacctgggtcaatgaaggttactgacttgcctcttctccttgtgggatatggttttggtgcctcttttgttgccctttttgctcagttgggtggtggaatatacaccaaagctgctgatgttggagctgatctggtcggaaaagttgagcagggaatacccgaagatgatcctcgtaacccagctgtcattgctgacttggttggtgacaatgttggagattgtgctgcccgaggcgctgatctttttgagagcatagcagcagaaattatcagtgcaatgatacttggaggaactatggcacaacgctgtaaaattgaagatccctctggctttattttgtttcctcttgtcgtccattcatttgatttggtggtgtcatcagttggaattctctcaatcagaggaacacgtgactctggactcatttctcctatcgaagatcccatggcaattatgcaaaaaggctactctgttactattat

SEQ ID NO: 93877 - DNA, 1658 bp, Zea Mays
gtcggagaacctcccggctccccgcagtccccctggcctcgcagatccgcggcctgcttcgttgctgccttgccagcaagcagccgcgctcatcctcgcggacgccagcggcggggcagccccctctcctgtgatccactccggcgcccgtggccgcggttgctcccgtaggtgccgccgcctcctcctccccctcttcatcctcctcccagatctatccccgtgcccgcggcacctgccggcgtcgtgaaatcaagtggcttgacggcaaaaggaccctttcaatcaaagagaatttggtcgctgaggctggaaaaaatctggatgtgtttaacttttagggcttactatttttgagaggtggtctgacatagactatccacaattcagcgccaggtctcagggagcgacctaccccaaggtggggagttcgttccttttccagtaacgaggagggcaaactcatattccatcatgatggaagaggacatggaaaatggaaggtcgtatcaagaaagaccaaggactttttcaacagtacgaagcaagtcatctatcccgctggccttacgtttgttgatgaggataaatccccgtgccttgattattctttctcttttggtattcagtggtgtgctatatgtgggagccagtacatcaccaattgtggtctttgtgttctgtatatgtactctcagtctattcttctctctctaccttacaaagtgggttcttgctaaggacgaaggaccaccagaaatgtctgagatatctgatgccataagagatggtgctgaagggttttttaagacacaatatggaactatttctaaaatggcatttattctggcctttgtcatccttggcatttatctctttcgcactactaccccacagcaggaggcgtctggcttgggaagggcaacactagcctatattacagttgcttcttttcttcttggagcattatgttctggaatagctggctttgttggaatgtgggtgtctgtgcgtgcaaatgtacgagtttcaagtgctgctcggcgctctgcaagggaagcattgcagattgctgtccgtgctggtggtttctcagccatcgtagttgtttgcatggctgtatttggcgtggcaatattgtactcaacattttatgtttggcttggagtagattcacctgggtcaatgaaggttactgacttgcctcttctccttgtgggatatggttttggtgcctcttttgttgccctttttgctcagttgggtggtggaatatacaccaaagctgctgatgttggagctgatctggtcggaaaagttgagcagggaatacccgaagatgatcctcgtaacccagctgtcattgctgacttggttggtgacaatgttggagattgtgctgcccgaggcgctgatctttttgagagcatagcagcagaaattatcagtgcaatgatacttggaggaactatggcacaacgctgtaaaattgaagatccctctggctttattttgtttcctcttgtcgtccattcatttgatttggtggtgtcatcagttggaattctctcaatcagaggaacacgtgactctggactcatttctcctatcgaagatcccatggcaattatgcaaaaaggctactctgttactattat

SEQ ID NO: 93878 - DNA, 984 bp, Zea Mays
ttgcttgtcgcgggacatgtatatgcatccatctaaactgctcattttgacggtggtggtcaccggcgccgctgcggcgcatgaccacccttccgctagcactccggcggcgcagttctggcagcaggccctcccgggcacgccgatgccggaggccatcgctgacctcgtccagaaaggcatcgaccactcgccgctggtggagcgatacccttcggcgcccggcctcagcgcgtgcggcgcatggagcaacctgtgcacgcgcagcgtggcggcggggacgggcatcttcttccacgaggcggaactgcgtccgggcagcgccatggcgctctccttcccggcggaagtggacacacccatcctcccgcacgccgtcgccgccgccgctccattcgcgaacctgacggccgtcttcgccacgttcggcgtcgccgggggctccgccgaggccgagcacgtgcgggacacgctcaggtggtgcgaggcgccgccgcggccggccggcgagcgcgtggccgcctgcgccacgtcgctggaaagcacggtgcggagcgccacgcgcatgctcggcgccgccggcggtgacggtgtgtgggcggcggccacgtcggcgcgcctccgcgctggcctgccgcgcgggcggtacgtggtcggggcggtcgccccgctccacggagaccaactcgtggcctgccaccgcgtgccgttcccgtacgccgtgtaccagtgccacatgacgacgaggaagacggacagggcctacgtggtctcgcttcgcggccgcggggggccggtgctcgacgacgtgctggcgttctgccaccgcgacacctccggctggagcccggaccatccggcgttccggatactgcgcgtccgcctaggcacgccggtgtgccacttcgtaccgtacgggaatccagtcttcggtaggaaggccagcacaacatagtagtacgttatcgacttgtcgttatcaaa

SEQ ID NO: 93879 - DNA, 1921 bp, Zea Mays
tacttctgtaaggaggtttttgtatttggtctcttcccagacccttactcttttcttcttaatatattgataatgcaactctttcgcgaaataaagtcacggggtagagaaggctgcagctcccccgcgtgggcgactcgagcggcaaaaccctagccgctaccgccccactgccccttctctctgtctcacggctgccagaggggttggccggcatgcccgccgggcccccaggatggtggcggcgacgcatccgcccagttggcgtcgcgagcgcccagatccacgcgggagggaactcgtggccggggcgtggtcatggtgttcgtggcggtgccgtgcgctcgcgtgggcgttgcaggtagaggcgcggtggcggtggtgcaacggcccactgacggcgtgcacgtggaagctcaccgtgtcgacgaagttgggggtgaggagtgcgacgccgacccgaagcatcacaggccgggagagcaaccgcctcccacccgccggtcgtcctcggcctcgttcgctaccttcttcgcgctgcacggtcggtggctgcaccgtgctgcccgccggggcgcgagctggcgccgatcggcagatgcagcaacatgtcgttcagctggctctttgagcggccgttgtggccctcttgcgcggagctcctggcggctcggggaggaggtgcagcgaccgtacctgcacggcggtcatctcctcgtggcgggggtgagaccctcgcagtggccgcgagtgccaggccggcgacgactgccggcatcggcttcggcgcgtgatagcatgacgcacacggcaaggtgaaatcgagctccgtgtgccctgctagagggggtggcgaccgacgcagctttgaggctgttgcggtagccgatgcgtcgagccgtcgatgcccctctagaagggtttgtgcgggatcgcagggcagctacgacgacaaagacaacttgctatggcccagcttcttgacctcacgatgtgttgggagacatcttgggcgaaagtctcggcgacggtgatgtccgtggcgcttctcttgtcgagggtgtcacattccccagcatcgttttttttgggcgaaagctcaatccatctcggacaggcgatggaggtgtccccgacgtcattcccttcctaaaggcgtcactattgaaattcgtcttgaccacgacgtcgcatttagttgatgctttcgcttctcgatgcccgatatgcgggtagaggaagggacttgcaacgtgaggtcggagctgctacgttagaggatgtgactcgacaatgatgacatgaagcaaaaccctccctccttcgtggactggtttgctttggaggttgggcatatgtcgggggcggggcgccagatcaagattggaagtcggagctgctccttggtttgagctcaacaatgatggcctgttgtgacctttcgcttcgggccgcctgcctgttttcgtttggatcatctaagatttgccatggtaagtcagagtcgctggctactttacaaccatgcttggcaatgataactcatggcagctttaggtgctcttctgcattgcgttggtgggtttgcccttcgtggtcttgttagttttggttgtaggagttggtttgtggtctggtgcatgaagtcggagctgctaagcctcggtgctaagctcgacaacgatgacttgagccaggctttagaactgctgacgaggtgagtggagtagagcaaaagtgttgtgtggtcatctgttgatgtcccaatccaaccagcccacttttgttgtttctagttggttcgagtgttgtgtggcacatgttgatgttccaatccaaccatacgctgttgtttggtcgttttgcctagtctgggtctcttcttctttttaatataatcggcatctctgcctagttcgtt

SEQ ID NO: 93880 - DNA, 2522 bp, Zea Mays
ctccctcccttcctcctttcccacccttctctctctctagccgccgtgctctccttttctatctccacggcaggcttctccctccctccccctcatccccattgcctttgggaggctatatagggcgggactggactggattggattggaaagggagctcccggcgagtttgaacccaccccaccccacttttctcgcctcgtcccctcgcgcttcccgccgccgacgccgcgtctatctggtctaggaccaaatgccgcgagatcttcgcgcgtgacgccgtcccccccgccggagccgccctccgagctccgggccacggagcgcttcgtcccggatctctctggtggctcagtagaaaggaaaggagaaaagcttgttgtgtctgtgtgtgagctgcagaccccgagaggatggatcagtatgaggtgctggagcagattgggaaaggagcatttggttctgcactcttggtgaggcacaaggccgagaagaagaagtatgtgctcaagaagatacggctcgcgcggcagaccgaccgcacacgccggtctgcccaccaggagatgcagctcatcgcgacggtccggaatccgttcattgtggagtacaaagattcatgggtggaaaagggttgctacgtttgcattgtcatcggttactgcgagggaggagacatggctgaagctatcaaaaaagtcaatggaaaccatttctcggaggagaaactttgcaagtggcttgtgcaacttctcatggctctcgattatctgcacgcaaatcacattcttcatcgggatgtgaagtgctccaatatatttattgccagagatcaaagcatacgccttggtgactttggtcttgcgaaaatattgacttcggatgatcttgcatcctctgtggtaggaacaccaagctacatgtgcccagaacttcttgccgacataccgtatggtactaaatctgatatttggtctctaggatgttgtatttatgaaatggcagctctcagaccagcatttaaagcctttgacatgcaagccctcattagcaagatcacaaagtcgatagtatcgccgttgcccacgagatattctggttcctttaggggactcatcaagagcatgctacggaaaagcccagaacaccgaccaagcgctgcagaactgctgaagcacccacacctccagccatacgtgctgcaggtccagctgaagtccagcccctctcgcaccacgtccccaatctaccaagctctgacggacaaagtgaagaagatgacgttcgtgagcgacaccgccgattccgcgaggaggagggctgcgagacggagctctctggggagcgagaggaccgtgacgttctgcaagccatcccccgagcgcaactccgtcagctccacgcggagcatcaaggagtacacgacgacgacccagagtgccagggagctctctgtcggcagcagcctgcaggtcgacgacgaggtcacgagtaaggctgttgtgacgaagacggcaggcgttctacggactcccagcaagagccgtgctccggcatctaagacgttggtggcggctagaagccggctggatcctccgaagacgtcctatgccagaacgaaccgtgccgagttggactcaaggacgcctctgagcaagagcagcgcgcggacggcaaggagagcatccctcccgctggcggcgtacagagcacccagcggcggccgcgccggtagcttcctggagcagctggactcgccggacgtgtccgtgaacgcgccgcggatcgacaggatcgcggagttccccctagcctcgtccgaggagcccctggcgcccatgaacaagaagctgtcctgctccacgcctcccttcagcacccggtccatcacgaaggacaagtacacggtgcaggcggtggcgccgcgcgcgggcgacggggacaccgccgcgagcgactcgtcggggcgcaacgccacggctgcgtccagccgtgggtccagcgactcgtcgtcgaggcagcagcagcatcacttgcagcagcggttcgacacgtcgtcgtaccagcagcgcgccgaggcgctggagggcctgctggagttcagcgcgcagctgctgcagcaggagcggtacgaggagcttggcatcctgctgaagccgttcggccccgagatggcttccccccgggagacagccatctggctcaccaagagcttcaaggagacggcgccgtcgtagccgtgggacgagcgggaggaaggggtaggggtaggtaggtagctgccagttttgtaacgtgcgatgtactactagctcaggtagtttaagctaatgttaggacataaaagttctcgtgttgtattagctattctccagtttccagtaggaattcgagcgatcagtggtagcattagagaggacactgcaagctgagcccaggatctggcaaagatcttgaaaccttgatgtatcgaatcatgtgtcacttgcaatgcaatgtgtgtatgtagtacgtactaaaca

SEQ ID NO: 93881 - DNA, 2145 bp, Zea Mays
cgtaatttcaggccgcttgtcctttcttgcgttttccttccttccctttcgtttccgaaaccccgcaccttccccatttcatttcccccgcagagtagtagttttttactggaatttgtaccggaaccagggcttaatggatgctgtttgcttgttagttcagcttcaccaatttctcaacagtgtgtttgttcttctccaggacagtagaaaggaaaggagaaaagcttgttgtgtctgtgtgtgagctgcagaccccgagaggatggatcagtatgaggtgctggagcagattgggaaaggagcatttggttctgcactcttggtgaggcacaaggccgagaagaagaagtatgtgctcaagaagatacggctcgcgcggcagaccgaccgcacacgccggtctgcccaccaggagatgcagctcatcgcgacggtccggaatccgttcattgtggagtacaaagattcatgggtggaaaagggttgctacgtttgcattgtcatcggttactgcgagggaggagacatggctgaagctatcaaaaaagtcaatggaaaccatttctcggaggagaaactttgcaagtggcttgtgcaacttctcatggctctcgattatctgcacgcaaatcacattcttcatcgggatgtgaagtgctccaatatatttattgccagagatcaaagcatacgccttggtgactttggtcttgcgaaaatattgacttcggatgatcttgcatcctctgtggtaggaacaccaagctacatgtgcccagaacttcttgccgacataccgtatggtactaaatctgatatttggtctctaggatgttgtatttatgaaatggcagctctcagaccagcatttaaagcctttgacatgcaagccctcattagcaagatcacaaagtcgatagtatcgccgttgcccacgagatattctggttccttgggactcatcaagagcatgctacggaaaagcccagaacaccgaccaagcgctgcagaactgctgaagcacccacacctccagccatacgtgctgcaggtccagctgaagtccagcccctctcgcaccacgtccccaatctaccaagctctgacggacaaagtgaagaagatgacgttcgtgagcgacaccgccgattccgcgaggaggagggctgcgagacggagctctctggggagcgagaggaccgtgacgttctgcaagccatcccccgagcgcaactccgtcagctccacgcggagcatcaaggagtacacgacgacgacccagagtgccagggagctctctgtcggcagcagcctgcaggtcgacgacgaggtcacgagtaaggctgttgtgacgaagacggcaggcgttctacggactcccagcaagagccgtgctccggcatctaagacgttggtggcggctagaagccggctggatcctccgaagacgtcctatgccagaacgaaccgtgccgagttggactcaaggacgcctctgagcaagagcagcgcgcggacggcaaggagagcatccctcccgctggcggcgtacagagcacccagcggcggccgcgccggtagcttcctggagcagctggactcgccggacgtgtccgtgaacgcgccgcggatcgacaggatcgcggagttccccctagcctcgtccgaggagcccctggcgcccatgaacaagaagctgtcctgctccacgcctcccttcagcacccggtccatcacgaaggacaagtacacggtgcaggcggtggcgccgcgcgcgggcgacggggacaccgccgcgagcgactcgtcggggcgcaacgccacggctgcgtccagccgtgggtccagcgactcgtcgtcgaggcagcagcagcatcacttgcagcagcggttcgacacgtcgtcgtaccagcagcgcgccgaggcgctggagggcctgctggagttcagcgcgcagctgctgcagcaggagcggtacgaggagcttggcatcctgctgaagccgttcggccccgagatggcttccccccgggagacagccatctggctcaccaagagcttcaaggagacggcgccgtcgtagccgtgggacgagcgggaggaaggggtaggggtaggtaggtagctgccagttttgtaacg

SEQ ID NO: 93882 - DNA, 2424 bp, Zea Mays
cccctccctcccttcctcctttcccacccttctctctctctagccgccgtgctctccttttctatctccacggcaggcttctccctccctccccctcatccccattgcctttgggaggctatatagggcgggactggactggattggattggaaagggagctcccggcgagtttgaacccaccccaccccacttttctcgcctcgtcccctcgcgcttcccgccgccgacgccgcgtctatctggtctaggaccaaatgccgcgagatcttcgcgcgtgacgccgtcccccccgccggagccgccctccgagctccgggccacggagcgcttcgtcccggatctctctggtggctcaggacagtagaaaggaaaggagaaaagcttgttgtgtctgtgtgtgagctgcagaccccgagaggatggatcagtatgaggtgctggagcagattgggaaaggagcatttggttctgcactcttggtgaggcacaaggccgagaagaagaagtatgtgctcaagaagatacggctcgcgcggcagaccgaccgcacacgccggtctgcccaccaggaggttagcatcttcagcttcatccatgccacctttttccggcgtttggtacatcggcaggattcctaggaatgaaaggcccttttttttcaccaggcttgggttttgatgccattcttcttgatgcagctcatcgcgacggtccggaatccgttcattgtggagtacaaagattcatgggtggaaaagggttgctacgtttgcattgtcatcggttactgcgagggaggagacatggctgaagctatcaaaaaagtcaatggaaaccatttctcggaggagaaactttgcaagtggcttgtgcaacttctcatggctctcgattatctgcacgcaaatcacattcttcatcgggatgtgaagtgctccaatatatttattgccagagatcaaagcatacgccttggtgactttggtcttgcgaaaatattgacttcggatgatcttgcatcctctgtggtaggaacaccaagctacatgtgcccagaacttcttgccgacataccgtatggtactaaatctgatatttggtctctaggatgttgtatttatgaaatggcagctctcagaccagcatttaaagcctttgacatgcaagccctcattagcaagatcacaaagtcgatagtatcgccgttgcccacgagatattctggttcctttaggggactcatcaagagcatgctacggaaaagcccagaacaccgaccaagcgctgcagaactgctgaagcacccacacctccagccatacgtgctgcaggtccagctgaagtccagcccctctcgcaccacgtccccaatctaccaagctctgacggacaaagtgaagaagatgacgttcgtgagcgacaccgccgattccgcgaggaggagggctgcgagacggagctctctggggagcgagaggaccgtgacgttctgcaagccatcccccgagcgcaactccgtcagctccacgcggagcatcaaggagtacacgacgacgacccagagtgccagggagctctctgtcggcagcagcctgcaggtcgacgacgaggtcacgagtaaggctgttgtgacgaagacggcaggcgttctacggactcccagcaagagccgtgctccggcatctaagacgttggtggcggctagaagccggctggatcctccgaagacgtcctatgccagaacgaaccgtgccgagttggactcaaggacgcctctgagcaagagcagcgcgcggacggcaaggagagcatccctcccgctggcggcgtacagagcacccagcggcggccgcgccggtagcttcctggagcagctggactcgccggacgtgtccgtgaacgcgccgcggatcgacaggatcgcggagttccccctagcctcgtccgaggagcccctggcgcccatgaacaagaagctgtcctgctccacgcctcccttcagcacccggtccatcacgaaggacaagtacacggtgcaggcggtggcgccgcgcgcgggcgacggggacaccgccgcgagcgactcgtcggggcgcaacgccacggctgcgtccagccgtgggtccagcgactcgtcgtcgaggcagcagcagcatcacttgcagcagcggttcgacacgtcgtcgtaccagcagcgcgccgaggcgctggagggcctgctggagttcagcgcgcagctgctgcagcaggagcggtacgaggagcttggcatcctgctgaagccgttcggccccgagatggcttccccccgggagacagccatctggctcaccaagagcttcaaggagacggcgccgtcgtagccgtgggacgagcgggaggaaggggtaggggtaggtaggtagctgccagttttgtaacg

SEQ ID NO: 93883 - DNA, 2406 bp, Zea Mays
cccctccctcccttcctcctttcccacccttctctctctctagccgccgtgctctccttttctatctccacggcaggcttctccctccctccccctcatccccattgcctttgggaggctatatagggcgggactggactggattggattggaaagggagctcccggcgagtttgaacccaccccaccccacttttctcgcctcgtcccctcgcgcttcccgccgccgacgccgcgtctatctggtctaggaccaaatgccgcgagatcttcgcgcgtgacgccgtcccccccgccggagccgccctccgagctccgggccacggagcgcttcgtcccggatctctctggtggctcaggacagtagaaaggaaaggagaaaagcttgttgtgtctgtgtgtgagctgcagaccccgagaggatggatcagtatgaggtgctggagcagattgggaaaggagcatttggttctgcactcttggtgaggcacaaggccgagaagaagaagtatgtgctcaagaagatacggctcgcgcggcagaccgaccgcacacgccggtctgcccaccaggagatgcagctcatcgcgacggtccggaatccgttcattgtggagtacaaagattcatgggtggaaaagggttgctacgtttgcattgtcatcggttactgcgagggaggagacatggctgaagctatcaaaaaagtcaatggaaaccatttctcggaggagaaactttgcaagtggcttgtgcaacttctcatggctctcgattatctgcacgcaaatcacattcttcatcgggatgtgaagtgctccaatatatttattgccagagatcaaagcatacgccttggtgactttggtcttgcgaaaatattgacttcggatgatcttgcatcctctgtggtaggaacaccaagctacatgtgcccagaacttcttgccgacataccgtatggtactaaatctgatatttggtctctaggatgttgtatttatgaaatggcagctctcagaccagcatttaaagcctttgacatgcaagccctcattagcaagatcacaaagtcgatagtatcgccgttgcccacgagatattctggttcctttaggggactcatcaagagcatgctacggaaaagcccagaacaccgaccaagcgtactttctcagttcctcttctttttttaactgatgtaccattcatgcttatgtacatttgtttgctcaaataaaaacatttttgcatatttacgtatgcaggctgcagaactgctgaagcacccacacctccagccatacgtgctgcaggtccagctgaagtccagcccctctcgcaccacgtccccaatctaccaagctctgacggacaaagtgaagaagatgacgttcgtgagcgacaccgccgattccgcgaggaggagggctgcgagacggagctctctggggagcgagaggaccgtgacgttctgcaagccatcccccgagcgcaactccgtcagctccacgcggagcatcaaggagtacacgacgacgacccagagtgccagggagctctctgtcggcagcagcctgcaggtcgacgacgaggtcacgagtaaggctgttgtgacgaagacggcaggcgttctacggactcccagcaagagccgtgctccggcatctaagacgttggtggcggctagaagccggctggatcctccgaagacgtcctatgccagaacgaaccgtgccgagttggactcaaggacgcctctgagcaagagcagcgcgcggacggcaaggagagcatccctcccgctggcggcgtacagagcacccagcggcggccgcgccggtagcttcctggagcagctggactcgccggacgtgtccgtgaacgcgccgcggatcgacaggatcgcggagttccccctagcctcgtccgaggagcccctggcgcccatgaacaagaagctgtcctgctccacgcctcccttcagcacccggtccatcacgaaggacaagtacacggtgcaggcggtggcgccgcgcgcgggcgacggggacaccgccgcgagcgactcgtcggggcgcaacgccacggctgcgtccagccgtgggtccagcgactcgtcgtcgaggcagcagcagcatcacttgcagcagcggttcgacacgtcgtcgtaccagcagcgcgccgaggcgctggagggcctgctggagttcagcgcgcagctgctgcagcaggagcggtacgaggagcttggcatcctgctgaagccgttcggccccgagatggcttccccccgggagacagccatctggctcaccaagagcttcaaggagacggcgccgtcgtagccgtgggacgagcgggaggaaggggtaggggtaggtaggtagctgccagttttgtaacg

SEQ ID NO: 93884 - DNA, 312 bp, Zea Mays
tatctctgtcctgataatcacgcaactctgtttttttttggcaggacatgcaagccctcattagcaagatcacaaagtcgatagtatcgccgttgcccacgagatattctggttccttgtaagtttgtcattgagttaatattaatactcccctttacttacatctcgtccatcgtcctacctgaatggagcatgtttttgaaacattttgcttcatgcagtaggggactcatcaagagcatgctacggaaaagcccagaacaccgaccaagcgtactttctcagttcctcttctttttttaactgatgtac

SEQ ID NO: 93885 - DNA, 1485 bp, Zea Mays
atccagattccagagaacaggagaaagaaaagttgcgaaaaaagaacaacaaaaaaggaaacgaaaacgagcgggggagctcgcggaccccaaaaccctaaccccgcggacccacctggcggcggcggcggcggcgatggcggacggcggaggagaaggaggacctcctgcggcgtcggcggcgctcaaggaccaggggaatgagcagttcaaggcggggagctacctcaaggctgccgcgctctacacgcaggccatcaagctcgaccccgacaacgccaccctctacagcaaccgagctgcagcattcctgcagttggttaagcttagcaaagcgcttgctgatgcagagacaacagtcaggctgaagccacaatgggagaagggtcatttcaggaaaggttgtgttttggaggcaatggagcgctatgaagaggcgatagctgcatttcagatagctttgcagcacaattcacaaaatacagaagtctcgagaaaaatcaagaggctatctcagttggccagggaaaagaagcgagcccttgatgtagagaacatgcgttcaaatgttgacattgcaaagaacttagaatcactgaagactgagttggctacaaagtatggagatgcagaaacagggaaaagtagatccaagggtccattttcttctcgatgatcagaagaccgatactgaaaaatatgccccagtagttaacattgacaaggcatttgagtcccccaacactcatgctgagtgcttcacatatctgcggcaatacgcggagaattgttctgcgaaggctgcttgtatggtggcacctaagagcatcatctcctacccacaggtctggaaagggcaagggtcgaggaagtggaagcttgaccagagcgacgggttcttcgtgcaattcgaggcaccggcgctgaggaagatatggtttgtgccaagcacaaaagagaagggacggacattgtgcaggagccctgaggccttggacatcggcatccatgaagtgctcccccgtatattcaaggaggcagcttaagcccaataatggaggactgtccatggattcctgatcctgcacagcgcttgctggatgttctccctgggacctgggaggaggaaagagctcgcccgacatacatttgtgtaaccagtggaatcggctacgctggcagacgcagactcggaagatttgatgctgtcactgtgctatgcaatgagcgtgttgtgtttcgagtggcaccgtctcgtggttagtgcgggtgttttgtttccattttcttttgattatctacctatttaccgaatgatccctgtcaagagctatgctcctttttttttcttcttcaccggaaggacaagatcgctgttggtgcccctgtgggagtggcaagcacacgggaggaagggtgggtgtgatgtaaagcgggatgaacagctatatacctaggtggattgggtgagacagaacagcaacc

SEQ ID NO: 93886 - DNA, 1557 bp, Zea Mays
atcttgcatccagattccagagaacaggagaaagaaaagttgcgaaaaaagaacaacaaaaaaggaaacgaaaacgagcgggggagctcgcggaccccaaaaccctaaccccgcggacccacctggcggcggcggcggcggcgatggcggacggcggaggagaaggaggacctcctgcggcgtcggcggcgctcaaggaccaggggaatgagcagttcaaggcggggagctacctcaaggctgccgcgctctacacgcaggccatcaagctcgaccccgacaacgccaccctctacagcaaccgagctgcagcattcctgcagttggttaagcttagcaaagcgcttgctgatgcagagacaacagtcaggctgaagccacaatgggagaagggtcatttcaggaaaggttgtgttttggaggcaatggagcgctatgaagaggcgatagctgcatttcagatagctttgcagcacaattcacaaaatacagaagtctcgagaaaaatcaagaggctatctcagttggccagggaaaagaagcgagcccttgatgtagagaacatgcgttcaaatgttgacattgcaaagaacttagaatcactgaagactgagttggctacaaagtatggagatgcagaaacagggcagagtgtcttttctttcattgttaatgtggtagaatcagcagtaaaggtttggcatgatacaggaaaagtagatccaagggtccattttcttctcgatgatcagaagaccgatactgaaaaatatgccccagtagttaacattgacaaggcatttgagtcccccaacactcatgctgagtgcttcacatatctgcggcaatacgcggagaattgttctgcgaaggctgcttgtatggtggcacctaagagcatcatctcctacccacaggtctggaaagggcaagggtcgaggaagtggaagcttgaccagagcgacgggttcttcgtgcaattcgaggcaccggcgctgaggaagatatggtttgtgccaagcacaaaagagaagggacggacattgtgcaggagccctgaggccttggacatcggcatccatgaagtgctcccccgtatattcaaggaggcagcttaagcccaataatggaggactgtccatggattcctgatcctgcacagcgcttgctggatgttctccctgggacctgggaggaggaaagagctcgcccgacatacatttgtgtaaccagtggaatcggctacgctggcagacgcagactcggaagatttgatgctgtcactgtgctatgcaatgagcgtgttgtgtttcgagtggcaccgtctcgtggttagtgcgggtgttttgtttccattttcttttgattatctacctatttaccgaatgatccctgtcaagagctatgctcctttttttttcttcttcaccggaaggacaagatcgctgttggtgcccctgtgggagtggcaagcacacgggaggaagggtgggtgtgatgtaaagcgggatgaacagctatatacctaggtggattgggtgagacagaacagcaacc

SEQ ID NO: 93887 - DNA, 650 bp, Zea Mays
atcttgcatccagattccagagaacaggagaaagaaaagttgcgaaaaaagaacaacaaaaaaggaaacgaaaacgagcgggggagctcgcggaccccaaaaccctaaccccgcggacccacctggcggcggcggcggcggcgatggcggacggcggaggagaaggaggacctcctgcggcgtcggcggcgctcaaggaccaggggaatgagcagttcaaggcggggagctacctcaaggctgccgcgctctacacgcaggccatcaagctcgaccccgacaacgccaccctctacaggttccttccggcgcccccactcctgttctttctccgccgtgccggtggtaaaaaccctagttgcgcgtgcgcccatcctgcgtttggggaagctatggatagctgcggcctgggtgtgtcaaatacgcgtggggtgggagacgaagaaccgtgcgcccccaccgcgtgcgtgatcactgatcagtgtttgactcctgcggtttgagtgtacaacggtagtggggattgcagattgtgtgtgtgtttggtggtggggggtgctgagaggctctgtaagtgagatggagtgtttgtggttgatttgcggcaccacagcggttgttgcgaatatggtgtgatgatttggtggctt

SEQ ID NO: 93888 - DNA, 324 bp, Zea Mays
tctttttttctgtattgtttcttgtctattctgtattgggttgggtctattctgtatttttagctagactataaattatgcatatgcaatcgtgtgtatgtctttttatgtattaaagctctctgaacttcatgtagatggatgcaaatgaaataagaagatctttaattattaaagttgttgctctagccgctgctacattttattatattctgattgtgaggaggaagatgaaaaggaaacggatttcatatgccccaatgattgatatggaaatgaaacgaaatgactacctttctagtatttaccataaagatgatacga

SEQ ID NO: 93889 - DNA, 5260 bp, Zea Mays
gcccaggagtgagtgacagcctctctctctctctgtccctctgttcgtgatacgagatggtgcggtgctaatgtggtggtggtgagaatgatgatggaggtttagggctagctagtgtgagtgtgaggggtgaggaaggagcagccggagctggatctctctccgtctcggggctgcagctggccaagaccctcccctcctccgccctgcatcgtagtaggttggtgccagactcttgaacagattcaactctagttgcttgggtctactgcatcagctttgaagccacagaagttttctcaagagcccaggagtgctgttctgctctcttagctggcctcaatggccatgtcgccatccaatccaatgcgcaagtactcatggtggtgggatagtcacatatcccccaagaactccaaatggctccaggagaatctcaccgatatggatagcaaaatcaaagtgatgatcaagattattgatgaggatgctgactcgtttgccagaagagcagaaatgtattacaaaaggcgcccagagctgatgtctttgcttgaggagttgtaccgtgcttatcgagctttagctgaaagatacgatcatgcagctggagaactccgacaggcccataaaaagatggcagaagcatttcctgatgagtttcagttggactttgatgatgacttgcctacagaaactgtaactactgaaactgaagcagacaatcgtgatatgactccatttttcctttcattcatcaaggctggtgattcgaaaaaacgtgctaaagaggatcaagaccatgagaagctgcaaaaagagatatcgagtttgtcacaggaaaatcaagaactcaagaagaaaattacatcagtgttagaaaaaggcaatatggctgaatttgaagttctttctctcaaggaggcccttgcagaacaagaagcggagaaggaagctgcattttcacaatgccagcaatccagtgatcgattacagagcctcaagtctgaaatattgcatacccaggaggagttcaataaactgaaagaggagatgcaaaatggactgcagaatttgagcactgcagaggagaggtgccttctgcttgagacagctaaccagaatttgcttctcgagctagataagctgaagcttgcctcaaaagaaaagcatgacgagctaaatgaaaaacacattgaattggagaagcttagcatctctatacaagaagagcaactcaagagcatgcaagcagaaatggcccggctatctgtggagaagcaattgacacaagcacaggagaagctaagacttatgtctcttgaaaagcatggggaaacaagtaagattgagaacattgaatcaaccagagttcaacttcaaaaggaattagacagtattcgagaagagaaccggaaactggatgatcaaaaccactcctctacctctgtgataatccgtcttcaagatgagataatttctttgaagaatgcacagcggcgtcttgaagaggaggtatctcggcatgtggaggataaaaaggtgcttcagcatgagctttcacacctcaaagatagcaagggtgacatggacaggaagcacttttcgatcaaggagcaaatacaagaggtgaatttcaatgtagaatcactccaatcacttgctcaagaggtgagggatggaaatgttgagctaaaagagaccataaaaaatcatgatggtgtaaaagccttgtacgttgataatctgatgttgctggagagaacgctggagaaaaatgctcatttggagagatcactttcagctgccactaatgaaattgaaggattgcaggagaagaagtctgcattggaagaatcatgtaaacaccttcattccaaggttaatggccatcagtctgagagggccatgtttgttgcacggattgagggtatttctcataccgtagagaagctatcagaaaagaatgtcttcttggaaaatttgttatctgataagaatactgagctggagttgcttagaaggaagctgaaagattcagaggaatctactcatgcattccgcaaccaaaattctgtacttcgatctgaaaaaagaactcttatgcgtgaggtggatagcatcaatagtgctctactcagtttggaaacccaatatgcagagttagaagggcgatatttggatcttgagcaagacaaagacaaggccctcaatgaagtgatcaaactacgagacctgttgaggctagaaaaagaaaaacacaaagaagccaccaactcagacatgactaaattcagtgctatacagaagcagataggccttctgctaaaagaagttcaccgcagggaggaccagcttcaagaggaggagcacaggattgttgaagctcagactgaaatttttatcttacagaggtgcttaggtgacatggctgaagcaaatgctgatgtcttggcacaattgcagaagcaacaagtggtatgcaaggatcaagaggagaaagttgatttcttgtcacagaacaaccagcagctgactgaagggataggttctgtagtggaagtactgaatctggatgagaaatacgaatcattggatctgatgaagattgatgttgttgtgcagctcctcttgcatgagatcaagtgcctactgaatactatttctgatgctcaggatgtgaagcagaaccagatccttgagaagtcccttgttgtcacgcttcttgagcactttgggcgagaggtggctgacctgaggtcggaaaggagtgttctgaagcaagagtggcaagcaaagagtgaggagctgcagcagctgcagagtgaaaagcatgacctcctaaagataagctgtgagctacggaaggaaatggaggctcgtaaccgcaaagtggatgaactgaaatctgaggcaaagttcttggttcgacaactgtcggaattgcaagagtcacggcagtcgttgcaagcagagattgtcaagctgattgcagagaactcttcactctctagcaaagtttacagatccagagagaaagagacgtcatttgatgaggatttcagcacacttgttgatgaagcgatcaggacagatattcttggtgtcatttttagaagcctttatgaagagaggacatcacaattgcagcgtttgcatgaggattttgggtctctacatgcagcaggcaatgagctgtatcaggaaatcaagctgatgaacaagaagctcggagacctacagcttgagaacaactatcttgagaaggaactcagtagaactctaagcatctgtgatggctctggtacagaaatttcctccggaagaaggcgtgctatgaggagggacacgaagctattaaaatctggcaggaaaagccaagagggtggccagaacatggaacaacgaaaagaagttgacaatgctggcctcgagaaatcgaacgaaatgcttagagtggagctccagaagttgaaaaatgaactgcaggtccttaaaagcaaggaacagcctgtgattgacgtgaaatcttgtgacgcagagatcactaaactgctggccagcatgcaattggccacagcgaatgcgtctctcttcaaggagaaggtgcttgagctcatcgtgacatgcgagagttttgagatcagtgacatggtgcagaaagaggtgctgaaagaggagatcactcggaggaactcttacgtggatgagctcaaggacaagcttaatgccattgagattgagaacagaaggctgaaggttgatctgaacggcgacttcacactgctcggagcattgcaaactgaagttgatgccctggagaaacaaaccttgtctctagccaaggattgcctaccaccaagcatgctcaagaaggaggagaatccactatcacctcagctgtcaaagattgctgtgaggccaagtgaagatcagaacaccacaaaggtggtgaaggacatggagctgcagaaactccacgggaccatcaaagcacttcagaaagtggtgtcagataccggggtggtcctggagcaagagcggcttgacttcaacagcaacctccaggacgcgaggaagcagatcgagatgctgaagctgaaggagatcctggacagcgacgccagcgacgtgaactacgagcggatgatgaaagacatccagctggacctcgtccatacgcctagccggcgagccgccgcatcctcacacgggcgccacaggaagaagaactcagtagccgcgacggcgcagtctgacgacaacaagatgctcgcgctgtggagcgtggacagggtgagcagcggcagccggcggcacgacatggacctgcggccgccgcagagcgaggctgccgagaccgagaagggaaagaagcggccatcctccgagccagtgccagttgtgaccgtgaaggacctcagcgtggacaagcaggaggtcctctcacggcccacggtgatggcagtggcggcgacggccaccacgacggagccacaccgggagtggaagaagaaggtgatcgaccggctatcctcggaggcgcagcggctccgtgacctccggaccatcgtccaggagctgcgcgccggcgtggaggcgtcgtcggacgcggagctggacggcgtcaaggcgcagatggccggcgcggagggcgccatcgcggagctggtcgacgcgaacgctaagctcctgaagaaggcggaggagttcacgtcggcgggcgacggcggcggcgacgtggacctgcgcagccggagccagcgcaagatcctggagcgcgtgcgcaagatgtcggacaaggccgggcggctggagctggagctgcagcggttccagcacgcgctgctgcggcacgaggaggagcgcgcggcgcggcgcgcggccaaggcggcggcggcgagcaccaccgtgcaggtgcagcggcggtcgcgggtgcagcttgtggagtacctgtacgggcggcggcgcgacagccggcggcccaagcagaaggcccgcggcccgtcctgctgcatgagggccaaggccatcgacgactgacgtgacgtggcgtcctaggtaaataatttaattactggactgatcttagttacgtcggaggttctttttcctaccctaaagtaaagtaaggtcttaagatgtaaatcgtacgtaggcaactcttgtgttcctcgtctgcaaatttttcgcatgtaaaattccagacggtaatcttcggtctcgttgctttccagttcttagaaaaaaatatttacaa

SEQ ID NO: 93890 - DNA, 464 bp, Zea Mays
taacgaacttaccataggaagaactccaatataacagcatgcaccataaattagcactaaggtatattacacccatcggtccagaactcaactctgaatctaaggcacatatattatatatctacagtacagcacgggtttattaggtatacgccgacgacgaaaattcctcaggctatctctgttgtagcgtctagctagacaaggctcttcatcttgcgcctcagccagattggcctaatatctacactcagcgagaggaagatctcccggttgctcgcgtccaagaagacgtcgggcgccagcgacttctccaccggcgacagctccgccatggcgctcatcacctcgatgcaccgcgggatgccgaacctgtccccgcggacctctgccgccttcttgctctctctcggggcgacggcgtgcacttccatggcatcagaggtcccgtcctcgctcggcct

SEQ ID NO: 93891 - DNA, 1053 bp, Zea Mays
ttttgaaacccgtttcaaggggcttctgtgttaggcataggggaacctaaacagggattggaagaaaagtatgtttgtgtgaaagaagaaaaaagtgaaatcgataaacagcttgttgtctaccagactactgacgctgctcctgctgaaaatgtactgaccacaccttccatggtggagtgcagacccttggcttgtcttccacccgcaagctccaagaaaagctccaaaaaaccacggtcttcaacaaagctcacaggacatccttctcggccgtgcaacttacaagctcctccaaagaccgacgttgtgctctccccattcgaaaactacgcggaaatggtcctcggtgatagcacatcagatatcctgaagggaaattcatctcctcatacttctgttaaagttgtgtcaccgaataagaagcgaatctctcccccacggatgggtatcgggctatctccaatctgtaggagtggcaggaagctgattctcaagtccatcccttctttcccttcccttggtggtgatgtaaacaacgaggatccgaaggccaagctcccagcgccttgaatttatcatgttttgtgtcactcgtggcccttcccgttggttctcgaaatcgcccacgcgctgactgcaccagactgtttctaccaccataccatcagatagtggatggacaaccaagcgtgcaccgtttcatcatttgtgtaattgtgtttgcttcgattaataattattcacgtactgctataataacccactgtgatggcagaattctacctacctcccagaaccaccagtggcatttggtttgctggtaagttatgtctcggctcaaggacgttgctgtgttgcctgtgcctgtatgtctgtataatttatgttcattatccgggatcaagatgtggaacctctatgtacctgatggcagaactgttaagacatattttattttatttttatctgaggttaaactgtgagacttatttgtgtaaggtcatactgttttttacattttttccaggaacgtgcctgagcatgtctttc

SEQ ID NO: 93892 - DNA, 507 bp, Zea Mays
atgtggatcgagtcgacgaccagcgacggggggattggcggggagggtcctccggaccggcaacccccgcgggaagcacatccgccacagccacaagggccgaagcagtgcccgcagcggggagggccccaccggtggcggtgggccctgccccccacgccggcccgagcgcacgggaggcgggaacggatccccacgcccctgccaccagcgcctgcgcacctgcaggggaggcagcggcggcgggtggggaggggccaggggaacgcgcccacccacggcggccgcagcagcggcagggcccgcgcggcccccaccggcggcggcggcaccactgcccgcacgtctaggagcgacggcggcgagcgtgccaggggaggcggcccgcacccaggaggagaggggagggaaggtggagggagagagagggtgttgctcgccagccatgggagggaagcggtggtcgagggcgcctggacgcgatctggtgcggcgcggtctggctag

SEQ ID NO: 93893 - DNA, 1898 bp, Zea Mays
ttttttgatgcactattagtagtagtgccgctgcccgctggtgctgggagctcatcatcattcgtcggtagcaggaaggaggcggcgtggaaggggaggcagatgcgggaggcccaccgcagggtcgtcgcaccagatggacacgccggataggccccgcgccgccgccgccgccgggttcgaggattctcctgtcttcaatttcatcaacaatctctcgcctataccaccacctaaacctttagactcagcacataatgtgcagctattcaagtcatcagacttggcacctgtttcttcgatctttgcctcaccacatgttaatccagtgaaggaaactaaagttttgatcagggatgaatctgttcaccttcctcaagaattgcactcgcctagcagtgtcaggactcgaatagacacctcaggctcttttagaatgatcagatgcaaagacattgtgtcggacaattgcaatatcacttgtcaactaaacgaggcatctattgattcttctgatcatacatcaaactctacaggccaattgactcaatccatacaggatgctgctggcagtatggaaagcgataaggatcaatgcgatgccaataaaacagaccttaccatatcccaggagtgcacaggcctagaaggtatgaaccttgatgagagtggcccagacaaaatggattcgtcacattctgggattgttgttcatgaaaaccagctatctgaacaaaacaatgacgaacctgcagcatataatgagggttacattattacacaccaatcaactagtgatatgctcactttagccataccatctggaacagaaacacaaccagtgaatgatacacaaatggctgataacccctactcttgtgaatccttgttggatgatcagtcaagtggatattgcacccagaattctgtgcatgaaccccatttgtactggactggggcagttgaagggtctgcagtatcctatactccccaaacactccctggtgctttgcaaagtcagctgatgccatgtaacaagctcagtgaaccaaaagattacgtgcctactgagcaaaatgccttgtcacagcacttacgtggcatgcgtaggcgcagccttttcaatgaaaaggctggaattagtaataaaggtgtagacaaaacttcggatcatcatcctgtaaattcaactacccccaaatgcaaaactatttctggtgacaactcaaagcctctaagaacccctccatgcgcattacctggtattggcttgcacttgaatgcccttgctacaatacctaaagagaaaatagtccctcgagagattcagtctactataaatgaatcaagtaacttgataggccctgctggatcttctccagcaccttttgagcaaaacattataaatgatgatttcactcaaacaactgatgttgcaactgccgaagcttctagtcagggtagtcccaagaagaaaaggcataagtttgacaatggtgatggcacttcatgcaagcgttgtagttgtaagaagtcaaaatgcctgaaactttactgtgagtgttttgctgctggagtctattgttctgagccttgttcgtgtatcggctgtcagaacaaccagagtcatatggaaacagttctgtctacacggcaacagattgaatctcgcaatccattagcatttgctcctaaagtcattcatacatctgagcctggtatggacttaggggacttttccaataaaactcctgcttcagctcgtcacaaaaggggatgcaattgcaagaagtcgtcgtgtctaaaaaaatactgtgaatgttttcagggcggcgtgggatgctccgtaagttgcagatgcgagggctgtaagaatgcttttggaaaacgggagggtg

SEQ ID NO: 93894 - DNA, 94 bp, Zea Mays
accggaccagacccagaggccggacatcaggcatgccctcaatgtgctgcgcctcgacgcgccgttgccaatcctcccggccaagttgtcggcc

SEQ ID NO: 93895 - DNA, 510 bp, Zea Mays
atgtcggaggtgaggatcatcagccgactccggccctggaacctcgtgctgctcgtcgggtggtgcttcggcggcggcggtggcgacgacctcctgctcgtctacgagctggtgcgcaaaggcagcgtggataggcacctgtacgacacagacaagaagctggcgtgggggcgaggacgcgaggagacggagtcgtgcgtcgtgcaccgcgacgtcaagccaagcaacgtgatgctggacgcgtcgttcgccgccaagctcggggacttcgggctggcgagggcggtggtcgaggacggccgatggtcacggacgacggcggcggcggcgggcacgaccgggtacgtggacccggagtgcctgagcactgggcggacgagcgtggggtccgacgtgtacagttttggcatcgtgctcctcgagatcgcttgtggccggccagtgccccgtggtgacgctgtcgaacgggaacacgctccacctggcgcacagggtctgggagctccgtga

SEQ ID NO: 93896 - DNA, 108 bp, Zea Mays
ttgaactgcaagtcactcgaaacttggaaaaccgtgcatgcaaaaatgatattcatgctatttagcacaagttacgaccgatttcaggaggggaccggtaacttcgag

SEQ ID NO: 93897 - DNA, 1242 bp, Zea Mays
ttctagaaccccgtccagaaccctacccaaccatggcggcggtgcaacgccacgtcgtcttcgtccgcggtgtccgaggccaccggcgtccacacagtgcccccgacggagcccgtggtgtcggccgagtggctccacgccaacctcaaggaccccgacgtcaaggtacttgatgcctcttggtatatgcctgcagaacaaaggaatccattacaagagtaccaggtggcccatatccctggtgctttgttctttgatgttgatggaatatccgacagaacatctagtttaccacacatgctgccatctgaaaaggcattttcagctgctgtatctgctcttggcatctacaacaaagacgggatagtagtttatgatggaaaggggctgttcagtgctgctcgtgtttggtggatgttccgtgtatttggacatgataaagtttgggtgttggatggaggtttgccccaatggcgcgcttctgggtatgatgttgaatcaagtgcctctagtgatgccatcctaaaggccagtgcagctggtgaagcaattgagaaagtttaccagggtcaattggttggtccaaccacatttgaagcaaagttgcagcctcatcttctttggagtcttgatcaggtgaaagagaacatcaacacccagacacatcaacttatagatgctcgatcaaaacctagatttgatggtgcagttcccgagccacgaaaggggattagaagtgggcatgtgcctgggagcaaatgtgttccgtttcctcaggttcttgacagctcacaaaagctattgccttcagatgagctccgtaaacggtttgagcaagaaggaatatcacttgatcagcctcttgttacctcttgtggcactggtgtgacagcatgtgtattagccttgggccttcatcgacttggcaaaaccgatgtcgcaatttatgacggatcgtggaccgaatggggcgcccatcctgacactccagttgcaactgctgtttagtctcttcataataggacgcccgtgctcttcatagaggacctcttgattgtatttgccccgtgctgtgattctatggaggttggttggatgcttggatgtaaggctggggaagcgaagccttttggccttcactgtaaaagctgcaacagaaaaactgtcacatgcactgaattataagataactccccttgatctctcgtcttggttgattaataatgctaaagtttgtctgct

SEQ ID NO: 93898 - DNA, 1495 bp, Zea Mays
ccatctcctccttcacgaaccttctagaaccccgtccagaaccctacccaaccatggcggcctccctcctctcccgcgccgccgctgccgccgcggcgctgcgcggcgcggcccggccgaaccacctcctcgctcgggcctccctccccaaggaaaccctccttcctcccctactactactcatcatcatcatcaccgccgctacgcccctcgcgggtcgggtcgggtgggcggcgcgcgcggcggagggcgccggtgggccccggtgcggcccgtcgccactgctgggcgcgttcgggatcgcggcgcggtgcaacgccacgtcgtcttcgtccgcggtgtccgaggccaccggcgtccacacagtgcccccgacggagcccgtggtgtcggccgagtggctccacgccaacctcaaggaccccgacgtcaaggtacttgatgcctcttggtatatgcctgcagaacaaaggaatccattacaagagtaccaggtggcccatatccctggtgctttgttctttgatgttgatggaatatccgacagaacatctagtttaccacacatgctgccatctgaaaaggcattttcagctgctgtatctgctcttggcatctacaacaaagacgggatagtagtttatgatggaaaggggctgttcagtgctgctcgtgtttggtggatgttccgtgtatttggacatgataaagtttgggtgttggatggaggtttgccccaatggcgcgcttctgggtatgatgttgaatcaagtgcctctagtgatgccatcctaaaggccagtgcagctggtgaagcaattgagaaagtttaccagggtcaattggttggtccaaccacatttgaagcaaagttgcagcctcatcttctttggagtcttgatcaggtgaaagagaacatcaacacccagacacatcaacttatagatgctcgatcaaaacctagatttgatggtgcagttcccgagccacgaaaggggattagaagtgggcatgtgcctgggagcaaatgtgttccgtttcctcaggttcttgacagctcacaaaagctattgccttcagatgagctccgtaaacggtttgagcaagaaggaatatcacttgatcagcctcttgttacctcttgtggcactggtgtgacagcatgtgtattagccttgggccttcatcgacttggcaaaaccgatgtcgcaatttatgacggatcgtggaccgaatggggcgcccatcctgacactccagttgcaactgctgtttagtctcttcataataggacgcccgtgctcttcatagaggacctcttgattgtatttgccccgtgctgtgattctatggaggttggttggatgcttggatgtaaggctggggaagcgaagccttttggccttcactgtaaaagctgcaacagaaaaactgtcacatgcactgaattataagataactccccttgatctctcgtcttggttgattaataatg

SEQ ID NO: 93899 - DNA, 1465 bp, Zea Mays
cttcctctccagtctccacgacaacaaccccacccatctcctccttcacgaaccttctagaaccccgtccagaaccctacccaaccatggcggcctccctcctctcccgcgccgccgctgccgccgcggcgctgcgcggcgcggcccggccgaaccacctcctcgctcgggcctccctccccaagggtcgggtcgggtgggcggcgcgcgcggcggagggcgccggtgggccccggtgcggcccgtcgccactgctgggcgcgttcgggatcgcggcgcggtgcaacgccacgtcgtcttcgtccgcggtgtccgaggccaccggcgtccacacagtgcccccgacggagcccgtggtgtcggccgagtggctccacgccaacctcaaggaccccgacgtcaaggtacttgatgcctcttggtatatgcctgcagaacaaaggaatccattacaagagtaccaggtggcccatatccctggtgctttgttctttgatgttgatggaatatccgacagaacatctagtttaccacacatgctgccatctgaaaaggcattttcagctgctgtatctgctcttggcatctacaacaaagacgggatagtagtttatgatggaaaggggctgttcagtgctgctcgtgtttggtggatgttccgtgtatttggacatgataaagtttgggtgttggatggaggtttgccccaatggcgcgcttctgggtatgatgttgaatcaagtgcctctagtgatgccatcctaaaggccagtgcagctggtgaagcaattgagaaagtttaccagggtcaattggttggtccaaccacatttgaagcaaagttgcagcctcatcttctttggagtcttgatcaggtgaaagagaacatcaacacccagacacatcaacttatagatgctcgatcaaaacctagatttgatggtgcagttcccgagccacgaaaggggattagaagtgggcatgtgcctgggagcaaatgtgttccgtttcctcaggttcttgacagctcacaaaagctattgccttcagatgagctccgtaaacggtttgagcaagaaggaatatcacttgatcagcctcttgttacctcttgtggcactggtgtgacagcatgtgtattagccttgggccttcatcgacttggcaaaaccgatgtcgcaatttatgacggatcgtggaccgaatggggcgcccatcctgacactccagttgcaactgctgtttagtctcttcataataggacgcccgtgctcttcatagaggacctcttgattgtatttgccccgtgctgtgattctatggaggttggttggatgcttggatgtaaggctggggaagcgaagccttttggccttcactgtaaaagctgcaacagaaaaactgtcacatgcactgaattataagataactccccttgatctctcgtcttggttgattaataatg

SEQ ID NO: 93900 - DNA, 1122 bp, Zea Mays
ttctagaaccccgtccagaaccctacccaaccatggcggcggtgcaacgccacgtcgtcttcgtccgcggtgtccgaggccaccggcgtccacacagtgcccccgacggagcccgtggtgtcggccgagtggctccacgccaacctcaaggaccccgacgtcaaggtacttgatgcctcttggtatatgcctgcagaacaaaggaatccattacaagagtaccaggtggcccatatccctggtgctttgttctttgatgttgatggaatatccgacagaacatctagtttaccacacatgctgccatctgaaaaggcattttcagctgctgtatctgctcttggcatctacaacaaagacgggatagtagtttatgatggaaaggggctgttcagtgctgctcgtgtttggtggatgttccgtgtatttggacatgataaagtttgggtgttggatggaggtttgccccaatggcgcgcttctgggtatgatgttgaatcaagtgcctctagtgatgccatcctaaaggccagtgcagctggtgaagcaattgagaaagtttaccagggtcaattggttggtccaaccacatttgaagcaaagttgcagcctcatcttctttggagtcttgatcaggtgaaagagaacatcaacacccagacacatcaacttatagatgctcgatcaaaacctagatttgatggtgcagttcccgagccacgaaaggggattagaagtgggcatgtgcctgggagcaaatgtgttccgtttcctcaggttcttgacagctcacaaaagctattgccttcagatgagctccgtaaacggtttgagcaagaaggaatatcacttgatcagcctcttgttacctcttgtggcactggtgtgacagcatgtgtattagccttgttgcaactgctgtttagtctcttcataataggacgcccgtgctcttcatagaggacctcttgattgtatttgccccgtgctgtgattctatggaggttggttggatgcttggatgtaaggctggggaagcgaagccttttggccttcactgtaaaagctgcaacagaaaaactgtcacatgcactgaattataagataactccccttgatctc

SEQ ID NO: 93901 - DNA, 1234 bp, Zea Mays
ccaactgcactgcactgcacccaccttttcaatccaatcctgccgcattgcataattcgcatcgaagatcgatgtgaatccgtggaagggagggcggaggagaaggaagaagaggggtcgaggccgaatccgccggtgagaaggggagcgatggcgaggctggcggtggccgcgagggcgttctccgctgcggcctccggcggcggcgtgtccttggtgcagggggcgtcccgggggatcggcctcgagttcgtgcggcagctgctgcgcagaagcgatggaggccgcgtcgtcgctacgtgccgcacgccgggttccgcggccgagctccagaagctcagggaggagcacgcgcccgggcgcctcaccgtgctgccgctcgacgtcaccgacgagagcaccatagaggcagctgcggcctcaatcacggagacccacggttctcttgaccttctgatcaactccgccggcatcctctcgatcccgaacgtgatacagccagagactacgctaagcaaggttcagaagtcgtccctgatgctggcatacgaggtgaacgcagtcggccctatcctagtgatcaagcacatgtggcctctgctgaagatcggaggccgctccgagactaggagagggttcgcgcttgttgcaaacatgagcgctcgagtcagctccataggagacaacgctctgggtggctggcatgcgtacagagcttctaaaacagcgctgaatcagttgaccaagacagtgtcggtggagttcggcaggaaggacaacatcgcctgcgtcctgctgcatcctggaaccgtggacaccgacctctcgaggccgtttcagaggaatgtccccgagggtaaactcttcacgagggagttctctgtgcagaggcttctctccgtcatcgacagcgtcaagaaaggcgacaacggcaagttcttcgcgtgggatggccaagaaatcccttggtgaacggtcatcgtaactcgcttgagtctatagcacagcacacagcagtcaacaacgcccctggttttaatccaacgttgtttttttttcaacaagccaagcgaacagatgcattatttctagctaaagggtcctctttttgtgttatcaccgacctaaagttcaagatgttttttttcttcttctaagtgttgaaatattagacatttttaaatcaaattctgaatataaatcatgactaaatcaaaagaactgaagtataaag

SEQ ID NO: 93902 - DNA, 1286 bp, Zea Mays
ccaactgcactgcactgcacccaccttttcaatccaatcctgccgcattgcataattcgcatcgaagatcgatgtgaatccgtggaagggagggcggaggagaaggaagaagaggggtcgaggccgaatccgccggtgagaaggggagcgatggcgaggctggcggtggccgcgagggcgttctccgctgcggcctccggcggcggcgtgtccttggtgcagggggcgtcccgggggatcggcctcgagttcgtgcggcagctgctgcgcagaagcgatggaggccgcgtcgtcgctacgtgccgcacgccgggttccgcggccgagctccagaagctcagggaggagcacgcgcccgggcgcctcaccgtgctgccgctcgacgtcaccgacgagagcaccatagaggcagctgcggcctcaatcacggagacccacggttctcttgaccttctgatcaactccgccggcatcctctcgatcccgaacgtgatacagccagagactacgctaagcaaggttcagaagtcgtccctgatgctggcatacgaggtgaacgcagtcggccctatcctagtgatcaagcacatgtggcctctgctgaagatcggaggccgctccgagactaggagagggttcgcgcttgttgcaaacatgagcgctcgagtcagctccataggagacaacgctctgggtggctggcatgcgtacagagcttctaaaacagcgctgaatcagtgtgagtgttccatcgtcctgttccaagtttttaacgatctgtgtgcattgatctctcttgaataatctggtgcttgtgcgctgtcaaaatttatctgccatgcccatgctgaatcgtgcagtgaccaagacagtgtcggtggagttcggcaggaaggacaacatcgcctgcgtcctgctgcatcctggaaccgtggacaccgacctctcgaggccgtttcagaggaatgtccccgagggtaaactcttcacgagggagttctctgtgcagaggcttctctccgtcatcgacagcgtcaagaaaggcgacaacggcaagttcttcgcgtgggatggccaagaaatcccttggtgaacggtcatcgtaactcgcttgagtctatagcacagcacacagcagtcaacaacgcccctggttttaatccaacgttgtttttttttcaacaagccaagcgaacagatgcattatttctagctaaagggtcctctttttgtgttatcaccgacctaaagttcaagatgttttttttcttcttctaagtgttgaa

SEQ ID NO: 93903 - DNA, 1410 bp, Zea Mays
atggcgagggacgagcatgttaaatttacactaaaatttgagacaactgttgaaacggacagcacacaagctccaatttctcaggttctctacacattccactcagttcatcactctatgcctaaattggagtattcgagttctaaaatggatatggagaaagaaatcaggaaacaagtagatgacgccattgctaaagcaaagttagatgaggcgtccagggctctcctgatgaaggtactagaagatgccacccaggacgttgtgcagaggcaggcaaagatgttggtgctcttcgagacccccgcggggttcaccctattcaaggtgctcgacgaggggaagctcgacaaggtcgaggatctatggaaggagttcacgacgtcggactcagcgagaaaggtggtcgagctgaaggctttcaacaagtttgagaacacatctgatgccctatccgcggcaaccctgattattgatagcaagcctagcaagggtctgcgcaagttcttgcagaaacattgtgagggtgaaacattagtagtagctgattctaagcttggaaatgctataaaagaaaagctgctgatgagaggactgagaaatcagcttaccgagcttataactgggttgggtgcacaagaccttggtccaatgagcttgggattgtcccacagcttgtctaggtataagctgaagttcagccctgagaaggttgatacaatgatcattcaagacattggattattggatgatcttgacaaggagcttaacacttatgccatgagagttcgtgaatggtatggctggcactttccagagctcaccaaaatagttacagataatatacagtatgccaaagttgtgaagatgatgggcaacagagttaatgcagtcaaccttgacttctctaagatattgtcagatgaagagctagaaacacagctaaaggaggcagcaataatatccatgggaacagaagttagtgaccttgacttatcgaatatcagagagctatgtgatcaagtgctggccatttctgagtacagagcccagctgtatgactatttaagaagcaggatgaacactattgcaccaaatttgacagcactggtgggtgaattagttggcgctcgccttattgcacatggtggaagtttgctaaatttggccaagcagcctggtagcacaattcacatacttggtgcagagaaggctttattcagagctctaaagacaaagcattctacacctaagtatggcctcatctaccatgcatccttaattggcaaggcttctcaaaagcacaagggaaaaatctcccattctcttgctgcaaaaacggctcttgccatccggtatgatgcccttggtgatggtgaggacaaaatagtatcaacaattcaaaattaa

SEQ ID NO: 93904 - DNA, 1585 bp, Zea Mays
aaccagagcaacgcagccgcaggctgggtgagcggcgcgggtcttcgtcggccggccccttcaccggtggcgagcatccaccagaccaccaggtacgcccccactcctttcgcttccctgtgcggaaccgaggcaccccaaatctaaatctacactttccgattcgcaaccgttacatgcatattatacccagtaattacaatttcacccctccaaacagtggatgcgcccctgccccccatgccccaggtcgagtcggccactgcctcggaggcgccgccgccgcaggacgcatggctcgtcgagctcggcagtcgcctcccgcagtgggagtcgctgcgggattcctccaaggtcattatcccgatttcaatatctagggtgaaccagtttgatgctgcaaggctagatgttgagatgtcggccatgttgaaagagcagctagtcaaagtgttctctttgatgaagccaggactcttattccaatatgagcctgaacttgatgctttccttgagttcctcatctggaggttctcaatttgggctgacaagcctacccctggcaatgcactgatgaacctgaggtacagagatgagcgggcagcacccatcactggaaaagaagttagaacaggtttggaaggacctgggctttctgtttctcaaaagatattttattgtattagctttgttggtggccaatatgtatggtcacgattacaatctttttctgctttccgtcgatggggcgattctgaacagagaccactagctcgccgtgcttgggcgttgatgcggaatgctgaagtattttatagggctgcttcattctttaacctattattgtttctttatggtggaaggtacaaaactgttgtagaaaggattctgaaggcaagacttgtttatgggagccccaacatgaatagagctgttagttttgagtacatgaatcggcagctggtctggaatgagttttcggaaatgttgcttttgcttcttcccctcctaaactcgtcttcggtaaagaagttccttctccccttctccaaagataagtcaggaggttcttctggtgatgaagcagattgtcctatatgtcggtccagtcctagcattccatttattgctcttccatgtcaacacaggtattgctactattgcctacgcacacgttgttcggctacgacttcttacagatgcacacgttgtgacggggcggtggttgcaattcaaagactaggatcaggttagttttacgacctagttgggttaaagaattctcgcccgtttctacagagaatcagcacttcggtgtttcatacggttacaagtttggatacgcgtcattcactgtatgtacatgtaattgccccaagtgtggacagttcggatgccatgagcccataactgacttgttgtatatcgaatgaatagtccgtcacaaaactaacacggattcactatgcgttttcttttcgattcgtctatttcaaaaatcgtgtattgaaaaatgccaaaacaattattggaaagagcaactgattcactgattatgtattgaaaagagattaggtttttaagt

SEQ ID NO: 93905 - DNA, 1521 bp, Zea Mays
catgcacccccccaccccgcacccaaccccacaaaaaaaaaggccgtgtaaaaaagggaaaaagaaaaaaccagagcaacgcagccgcaggctgggtgagcggcgcgggtcttcgtcggccggccccttcaccggtggcgagcatccaccagaccaccagtggatgcgcccctgccccccatgccccaggtcgagtcggccactgcctcggaggcgccgccgccgcaggacgcatggctcgtcgagctcggcagtcgcctcccgcagtgggagtcgctgcgggattcctccaaggtcattatcccgatttcaatatctagggtgaaccagtttgatgctgcaaggctagatgttgagatgtcggccatgttgaaagagcagctagtcaaagtgttctctttgatgaagccaggactcttattccaatatgagcctgaacttgatgctttccttgagttcctcatctggaggttctcaatttgggctgacaagcctacccctggcaatgcactgatgaacctgaggtacagagatgagcgggcagcacccatcactggaaaagaagttagaacaggtttggaaggacctgggctttctgtttctcaaaagatattttattgtattagctttgttggtggccaatatgtatggtcacgattacaatctttttctgctttccgtcgatggggcgattctgaacagagaccactagctcgccgtgcttgggcgttgatgcggaatgctgaagtattttatagggctgcttcattctttaacctattattgtttctttatggtggaaggtacaaaactgttgtagaaaggattctgaaggcaagacttgtttatgggagccccaacatgaatagagctgttagttttgagtacatgaatcggcagctggtctggaatgagttttcggaaatgttgcttttgcttcttcccctcctaaactcgtcttcggtaaagaagttccttctccccttctccaaagataagtcaggaggttcttctggtgatgaagcagattgtcctatatgtcggtccagtcctagcattccatttattgctcttccatgtcaacacaggtattgctactattgcctacgcacacgttgttcggctacgacttcttacagatgcacacgttgtgacggggcggtggttgcaattcaaagactaggatcaggttagttttacgacctagttgggttaaagaattctcgcccgtttctacagagaatcagcacttcggtgtttcatacggttacaagtttggatacgcgtcattcactgtatgtacatgtaattgccccaagtgtggacagttcggatgccatgagcccataactgacttgttgtatatcgaatgaatagtccgtcacaaaactaacacggattcactatgcgttttcttttcgattcgtctatttcaaaaatcgtgtattgaaaaatgccaaaacaattattggaaagagcaactgattcactgattatgtattgaaaagagattaggttttt

SEQ ID NO: 93906 - DNA, 1546 bp, Zea Mays
catgcacccccccaccccgcacccaaccccacaaaaaaaaaggccgtgtaaaaaagggaaaaagaaaaaaccagagcaacgcagccgcaggctgggtgagcggcgcgggtcttcgtcggccggccccttcaccggtggcgagcatccaccagaccaccagtggatgcgcccctgccccccatgccccaggtcgagtcggccactgcctcggaggcgccgccgccgcaggacgcatggctcgtcgagctcggcagtcgcctcccgcagtgggagtcgctgcgggattcctccaaggtcattatcccgatttcaatatctagggtgaaccagtttgatgctgcaaggctagatgttgagatgtcggccatgttgaaagagcagctagtcaaagtgttctctttgatgaagttttgatgccttcttttcatatcagccaggactcttattccaatatgagcctgaacttgatgctttccttgagttcctcatctggaggttctcaatttgggctgacaagcctacccctggcaatgcactgatgaacctgaggtacagagatgagcgggcagcacccatcactggaaaagaagttagaacaggtttggaaggacctgggctttctgtttctcaaaagatattttattgtattagctttgttggtggccaatatgtatggtcacgattacaatctttttctgctttccgtcgatggggcgattctgaacagagaccactagctcgccgtgcttgggcgttgatgcggaatgctgaagtattttatagggctgcttcattctttaacctattattgtttctttatggtggaaggtacaaaactgttgtagaaaggattctgaaggcaagacttgtttatgggagccccaacatgaatagagctgttagttttgagtacatgaatcggcagctggtctggaatgagttttcggaaatgttgcttttgcttcttcccctcctaaactcgtcttcggtaaagaagttccttctccccttctccaaagataagtcaggaggttcttctggtgatgaagcagattgtcctatatgtcggtccagtcctagcattccatttattgctcttccatgtcaacacaggtattgctactattgcctacgcacacgttgttcggctacgacttcttacagatgcacacgttgtgacggggcggtggttgcaattcaaagactaggatcaggttagttttacgacctagttgggttaaagaattctcgcccgtttctacagagaatcagcacttcggtgtttcatacggttacaagtttggatacgcgtcattcactgtatgtacatgtaattgccccaagtgtggacagttcggatgccatgagcccataactgacttgttgtatatcgaatgaatagtccgtcacaaaactaacacggattcactatgcgttttcttttcgattcgtctatttcaaaaatcgtgtattgaaaaatgccaaaacaattattggaaagagcaactgattcactgattatgtattgaaaagagattaggttttt

SEQ ID NO: 93907 - DNA, 1517 bp, Zea Mays
catgcacccccccaccccgcacccaaccccacaaaaaaaaaggccgtgtaaaaaagggaaaaagaaaaaaccagagcaacgcagccgcaggctgggtgagcggcgcgggtcttcgtcggccggccccttcaccggtggcgagcatccaccagaccaccagtggatgcgcccctgccccccatgccccaggtcgagtcggccactgcctcggaggcgccgccgccgcaggacgcatggctcgtcgagctcggcagtcgcctcccgcagtgggagtcgctgcgggattcctccaaggtcattatcccgatttcaatatctagggtgaaccagtttgatgctgcaaggctagatgttgagatgtcggccatgttgaaagagcagctagtcaaagtgttctctttgatgaaggactcttattccaatatgagcctgaacttgatgctttccttgagttcctcatctggaggttctcaatttgggctgacaagcctacccctggcaatgcactgatgaacctgaggtacagagatgagcgggcagcacccatcactggaaaagaagttagaacaggtttggaaggacctgggctttctgtttctcaaaagatattttattgtattagctttgttggtggccaatatgtatggtcacgattacaatctttttctgctttccgtcgatggggcgattctgaacagagaccactagctcgccgtgcttgggcgttgatgcggaatgctgaagtattttatagggctgcttcattctttaacctattattgtttctttatggtggaaggtacaaaactgttgtagaaaggattctgaaggcaagacttgtttatgggagccccaacatgaatagagctgttagttttgagtacatgaatcggcagctggtctggaatgagttttcggaaatgttgcttttgcttcttcccctcctaaactcgtcttcggtaaagaagttccttctccccttctccaaagataagtcaggaggttcttctggtgatgaagcagattgtcctatatgtcggtccagtcctagcattccatttattgctcttccatgtcaacacaggtattgctactattgcctacgcacacgttgttcggctacgacttcttacagatgcacacgttgtgacggggcggtggttgcaattcaaagactaggatcaggttagttttacgacctagttgggttaaagaattctcgcccgtttctacagagaatcagcacttcggtgtttcatacggttacaagtttggatacgcgtcattcactgtatgtacatgtaattgccccaagtgtggacagttcggatgccatgagcccataactgacttgttgtatatcgaatgaatagtccgtcacaaaactaacacggattcactatgcgttttcttttcgattcgtctatttcaaaaatcgtgtattgaaaaatgccaaaacaattattggaaagagcaactgattcactgattatgtattgaaaagagattaggttttt

SEQ ID NO: 93908 - DNA, 1635 bp, Zea Mays
gacaacatgcacccccccaccccgcacccaaccccacaaaaaaaaaggccgtgtaaaaaagggaaaaagaaaaaaccagagcaacgcagccgcaggctgggtgagcggcgcgggtcttcgtcggccggccccttcaccggtggcgagcatccaccagaccaccagtggatgcgcccctgccccccatgccccaggtcgagtcggccactgcctcggaggcgccgccgccgcaggacgcatggctcgtcgagctcggcagtcgcctcccgcagtgggagtcgctgcgggattcctccaaggtcattatcccgatttcaatatctagggtgaaccagtttgatgctgcaaggctagatgttgagatgtcggccatgttgaaagagcagctagtcaaagtgttctctttgatgaaggtgcttgctttattaactttgctgatttttgtgttgtttgaggcttgcatagaacttaagtgtgctgctaactgttgctttcagttttgatgccttcttttcatatcagccaggactcttattccaatatgagcctgaacttgatgctttccttgagttcctcatctggaggttctcaatttgggctgacaagcctacccctggcaatgcactgatgaacctgaggtacagagatgagcgggcagcacccatcactggaaaagaagttagaacaggtttggaaggacctgggctttctgtttctcaaaagatattttattgtattagctttgttggtggccaatatgtatggtcacgattacaatctttttctgctttccgtcgatggggcgattctgaacagagaccactagctcgccgtgcttgggcgttgatgcggaatgctgaagtattttatagggctgcttcattctttaacctattattgtttctttatggtggaaggtacaaaactgttgtagaaaggattctgaaggcaagacttgtttatgggagccccaacatgaatagagctgttagttttgagtacatgaatcggcagctggtctggaatgagttttcggaaatgttgcttttgcttcttcccctcctaaactcgtcttcggtaaagaagttccttctccccttctccaaagataagtcaggaggttcttctggtgatgaagcagattgtcctatatgtcggtccagtcctagcattccatttattgctcttccatgtcaacacaggtattgctactattgcctacgcacacgttgttcggctacgacttcttacagatgcacacgttgtgacggggcggtggttgcaattcaaagactaggatcaggttagttttacgacctagttgggttaaagaattctcgcccgtttctacagagaatcagcacttcggtgtttcatacggttacaagtttggatacgcgtcattcactgtatgtacatgtaattgccccaagtgtggacagttcggatgccatgagcccataactgacttgttgtatatcgaatgaatagtccgtcacaaaactaacacggattcactatgcgttttcttttcgattcgtctatttcaaaaatcgtgtattgaaaaatgccaaaacaattattggaaagagcaactgattcactgattatgtattgaaaagagattaggttttt

SEQ ID NO: 93909 - DNA, 243 bp, Zea Mays
tgtgcagactgtgcagttttcaacttgtttcttcagttgtttaagattgtgcagacatgtgctcgtctctactttgtcaaaaaaagatagcgttattcagactgcagttttcagcttgtttgttgattgggtttattcagttttcagttttgagatagcgttattcagttttcagtttttagatagtgttattcagttttcagttttcagattattatggaataaacgaacaaatatttgttg

SEQ ID NO: 93910 - DNA, 100 bp, Zea Mays
cggcatagtttcgtactatagccatcacgctatcggcctaggctgcctcgccatggttagtaacaccatgcgggcgtggtgtcgtgggcacaagttctag

SEQ ID NO: 93911 - DNA, 428 bp, Zea Mays
gctgctttcttccttcctgttcctactcgtcgcctctcgaaagccaggaggaccctcgcctccccctccgcgcgcgcgtggcagctatggcgatggacgacctcgcgggcacctcctcctcttccatggcggcgactgcctcctccgacccctcgtacgactggcagacgatgttgtaccccaagcgcaaccgcaagcaggcgcagccgccccgcgccacggcgctcgatctggcgctgcagtccaacggctgctgcagtgctgccccgcggcaggagggagaggtcaagaagccgaaggtgatggtcgccgaggccgccgtcctgatcgacgccgagaacctcgcagcgcacctcttcgagatctcggcatcgtacgagaatcaacaggacattcagctcatgaggtttgctgattactttggctga

SEQ ID NO: 93912 - DNA, 603 bp, Zea Mays
agaatcactagcctgctggcatacacatttgtggcttctcttccggtcttcccgcagggctatcaatatgagtaataggagctaataatatccaaccatcaaaccagcagaatctaataggatatgagttgatatcaaatgcagagtttacattttcaccgtggacaccttttcctaccaagagaatgcatatggtctgaaaatggagaattgaaggagtagggaaggcactgtcgatctcttcttgaagtcagctgagtatttggactgtgtagttcatcatgtactcatacatataccacctcaaagacgccttattaattctgtttttattgcattaattcggagcactgaacacagaaaaataaccgtagaagtttagtggcaacaatgatgatgactacatactcttttatgaaagccttgccaaaagatgtccttctcatagttgagtacaagaataattatctcttgtatcttattgtaatatctaaaacatttgttctgtagatggttagcttgcattttatgctataattacttgaaatcacgtgttaccttttttcaccaatttatgacatctattgatatgttttactttaa

SEQ ID NO: 93913 - DNA, 2571 bp, Zea Mays
tttatctcggccaacgtggacggcgcgtgattttctcttctctcgcagtcgcagcacggcagtcggcagcaggcaggcagccagccagcagccagcagctgcgaatcgaagcggaatcgaagcccaccaccagcagcagtgcccacttgcttggagcgcgagtttaccccgagcaaatcgcggcggcgctcgtgcccgtgcctcccgcgtcgaaccctagtgcaactaccagatccggagatcccgcgcgggcgcgggcgggacaccaagcttctgactcaactcaatccccgcacctgccaatgccaccccctcggcgctgatccgatcccgccgccgccgacactcgcgggcccgccccatggattccgcccggagctggctccagaagctgcagccgcgggacaaggacagagagcggggcgccaagacgccggcgccggcgtcgcccaacggtggcgccggcaactccgcgaggatggccgccgcggcgggggaggaggcgctgtctagcgccaccaagcagaaggtggcggcggcgaagcagtacatcgagaaccactacaagtcgcagatgaagtcgcttcaggagcgcaaggagaggcgttggatgttggagaggaaactagcagatgcagatgtatctgaagaagagcaaaacaatatcctgaaagatttagaaaaaaaggagacagaatacatgcgcctacgaaggcataaaatgggcgttgatgactttgaattgcttaccattattgggagaggtgcatttggggaggtgagactttgtagagaaaaagctacatccaatgtgtatgcaatgaaaaagcttaagaagtccgaaatgttacgaagagggcaggttgaacatgtcagagctgaaagggacctccttgcagaggttgatagtccttacattgttaagctgtactgctcatttcaagatgatgagtttctgtacctcattatggagtaccttcctggtggtgacatgatgactttactcatgcgcaaggacacactgactgaggacgaatctaagttttatgttgcagagacaatactagcaattgaatctattcacaaacgcatttatattcatagggatatcaagcctgataatttgttgctagatcgaagtggccacttgaagctttcagattttggcttatgtaaacctctagatagcagttgcttcccaaatctgagtgaccttgactatgcagcaggtaagagcaccaatccatcatcagatggtgataagcaatccagtaactctactgcccccaggcggacacaacaggaacaactactacattggcagaagaatcggaggatgttggcttactctactgttggtacacctgattacattgcacccgaggtactcctgaagaaaggatatggaatggaatgtgactggtggtcacttggtgcaataatgttcgaaatgcttgtggggtatccgccattttattctgaagacccaatgtcaacatgtaggaagatagtgaattggagaagtcatctaaaattccctgaagaggccagcctttctctagaagctaaagatctcattagcaagctattgtgtaatgtggatcagagaattggaacaaaaggtgcacatgagataaaggcacatccatggtttgcaggtgttgagtgggaaaaactatatcagatggaagcagctttcattcctgaggttaatgatgagttggacacacaaaactttgaaaagtttgaggagactgctcctccaatgcaaacttcatcaaaggcaggtccttggagaaagatgctttcctccaaggacgtgaactttgttggctatacctacaagaactttgaaattgtgaacgatcctgagcttccaggaattgctgagctaaagaaaacgaacaacaagccaaagcgaccaaccatcaaatcattatttgagactgctgatagtgaagaccagccttctgatggcagttttctgaacctattacccacacaactggagctgccagagagccttgagccctctcctcactccagtatctcttctgaggattcccaagcacggaataggtagcaggtgtgttttctggcacctgccagcttagtccaacaaaagcaagacatagaggcctttcacctagtgatggattgctatctgcaggtctctattcagaggacaagctccataaagtttgcttttgaagagatgtttgtggtgctcagcagccatctaatgtacattgtcctgtacattgttactggtttccaaagttcctttggcaacgacacgaggaggttggttgtcatatagaggaggaggtatttgttctctcctgtaaatccttggattctttgagtttctgagatttattctttcgatatagcatgccaagggggtatgctgcctgtttcctttttacgtgcagaaatctgcatttctacatcgttgttgtaagatttgagacagtgtaaagaaattgcaagtgataaacaagcgaccgaaaatgataatgaaaatgctatttttcttctatacagccttttttctttgcccttgtactt

SEQ ID NO: 93914 - DNA, 2391 bp, Zea Mays
cagcaggcaggcagccagccagcagccagcagctgcgaatcgaagcggaatcgaagcccaccaccagcagcagtgcccacttgcttggagcgcgagtttaccccgagcaaatcgcggcggcgctcgtgcccgtgcctcccgcgtcgaaccctagtgcaactaccagatccggagatcccgcgcgggcgcgggcgggacaccaagcttctgactcaactcaatccccgcacctgccaatgccaccccctcggcgctgatccgatcccgccgccgccgacactcgcgggcccgccccatggattccgcccggagctggctccagaagctgcagccgcgggacaaggacagagagcggggcgccaagacgccggcgccggcgtcgcccaacggtggcgccggcaactccgcgaggatggccgccgcggcgggggaggaggcgctgtctagcgccaccaagcagaaggtggcggcggcgaagcagtacatcgagaaccactacaagtcgcagatgaagtcgcttcaggagcgcaaggagaggcgttggatgttggagaggaaactagcagatgcagatgtatctgaagaagagcaaaacaatatcctgaaagatttagaaaaaaaggagacagaatacatgcgcctacgaaggcataaaatgggcgttgatgactttgaattgcttaccattattgggagaggtgcatttggggaggtgagactttgtagagaaaaagctacatccaatgtgtatgcaatgaaaaagcttaagaagtccgaaatgttacgaagagggcaggttgaacatgtcagagctgaaagggacctccttgcagaggttgatagtccttacattgttaagctgtactgctcatttcaagatgatgagtttctgtacctcattatggagtaccttcctggtggtgacatgatgactttactcatgcgcaaggacacactgactgaggacgaatctaagttttatgttgcagagacaatactagcaattgaatctattcacaaacgcatttatattcatagggatatcaagcctgataatttgttgctagatcgaagtggccacttgaagctttcagattttggcttatgtaaacctctagatagcagttgcttcccaaatctgagtgaccttgactatgcagcaggtaagagcaccaatccatcatcagatggtgataagcaatccagtaactctactgcccccaggcggacacaacaggaacaactactacattggcagaagaatcggaggatgttggcttactctactgttggtacacctgattacattgcacccgaggtactcctgaagaaaggatatggaatggaatgtgactggtggtcacttggtgcaataatgttcgaaatgcttgtggggtatccgccattttattctgaagacccaatgtcaacatgtaggaagatagtgaattggagaagtcatctaaaattccctgaagaggccagcctttctctagaagctaaagatctcattagcaagctattgtgtaatgtggatcagagaattggaacaaaaggtgcacatgagataaaggcacatccatggtttgcaggtgttgagtgggaaaaactatatcagatggaagcagctttcattcctgaggttaatgatgagttggacacacaaaactttgaaaagtttgaggagactgctcctccaatgcaaacttcatcaaaggcaggtccttggagaaagatgctttcctccaaggacgtgaactttgttggctatacctacaagaactttgaaattgtgaacgatcctgagcttccaggaattgctgagctaaagaaaacgaacaacaagccaaagcgaccaaccatcaaatcattatttgagactgctgatagtgaagaccagccttctgatggcagttttctgaacctattacccacacaactggagctgccagagagccttgagccctctcctcactccagtatctcttctgaggattcccaagcacggaataggtagcaggtctctattcagaggacaagctccataaagtttgcttttgaagagatgtttgtggtgctcagcagccatctaatgtacattgtcctgtacattgttactggtttccaaagttcctttggcaacgacacgaggaggttggttgtcatatagaggaggaggtatttgttctctcctgtaaatccttggattctttgagtttctgagatttattctttcgatatagcatgccaagggggtatgctgcctgtttcctttttacgtgcagaaatctgcatttctacatcgttgttgtaagatttgagacagtgtaaagaaattgcaagtgataaacaagcgaccgaaaatgataatgaaaatgctatttttcttct

SEQ ID NO: 93915 - DNA, 1492 bp, Zea Mays
ccttgccctgctgcaacttgaacctcctggcagctcctgtttcaggcaggcagcaagtagggaagaggctctgcagatcagttccatgcagacagcgatcgagcacgcctgctcggtggtggaatgcgctgcgacagcccgagccgccatggacatgagccactacatccccgattggagcagcagcatgggagacaccttcgcgccactgggcggcgaggacgacgacgggctcatcgagctcatgtggcgcaacggccacgtggtcatgcaggcccaggcgccgcggaagccgccgagacccgacgacgacgaggcggcggcggcgcaggcgcaggcgtggttccagtacccggtggaggagagggccgacctcttctcggagctcttcggggaggcgcaggcggccgtcggcggcgcgcgcggggaggccgcgcgccagagtatccggatgatgccgccgccgccgccgccgccgaggcccgcgcaagcgccgcgggaggagaaggcgtgcccgggagacggcggcacggcgacggcgacggacggcgccggctcgtccgtgctcacggtcgtgtccagcctctgcgggagcaacggcaaccacgtgcaggcgacggcgccgggggacgtcgccagggcccgcgacgtgctgatggtgacctcgtcgtcgacgacgcgttccaggtcatgcaccaccaagagcgagcagccgggtcccgggcccggcgctgcccgccggagcggcaagaggaagcataacgacgccaccgatgccgaggacgtggggctggagtgcgagccggcgcagaggacgacgactgccaagcggcgccgcgccgcgcaagtccacaacctctcggagcggaggagacgggacaggatcaacgagaagatgaaggccctgcaggaactcataccccactgcaacaaagcggacaaggcgtcgatgctggacgaggcgatcgagtacctcaagtcgctgcagctccagctgcaggtggtgtggatgggcggcggcatcgcggcggcgggggtgcaccagcggacgatggtggccgcgcccgggcgtcctccccacgtggcttccctgccggcgtcggcgcccgacctctatacgcgctacctcgccgtcgaccacctgccgccaccgcccttggtgccaccgccacgcacggcggcggcgatgggcttgtacccgcgccagaaccccgtgccggcgacgtcgtctccttccttccgaacgaccgaaaatacgcgaaaactatggcaagcctgagattcagatccggggtatggtgaccagctgatgggtcatctagctgcatgcatgtgtgtatgtgttggtagtatggttaagccttgacagagacttgtgatcgagaccgagatcgaccgataggccgtcacttcttttttcttccatctttcagtttttggttgataggccggagtgtaatttgaccagtggtcgagatttgtcaagcgacac

SEQ ID NO: 93916 - DNA, 1051 bp, Zea Mays
gaatcccacacgcgtcctgcagcagcaactgactgctcgtccgttctacgtttcttggccaccatggacctggagcgcggcgacaagaagccgccgccgcccgctccacggaccgctgctacgaccactacgacgacgacgacgtcggcctgcagcggtaagaagcggccgccgctcagggacagcctcgtggcgctgcagccggtgctgctgcgcgcggcggcggccctggccgcggccgccgccgccgcggtgatggcgctcgacgcccagtcctacaccgcggtggtcgccatcgtcggcacccgcccgctcacgcagaccttcaccgccaggttcagcgacacgccggcgttcgtgtacttcgtcatagccaacgccatcgctgccgcgtacaacctcctggtgctgctcgtccggcggcggaggactacggcgagcttggtcgtgcgcatgcttgacatggtggtcatggcgctgctggcgaccggcgccgcggcggcggcgtcaatggccgagctaggaaggaacggcaacgcgcgggcgcggtggaacccgatgtgcgacaggttcggctccttctgccgccgcggcggcgccgcgctggcgtcgtcgttcgtcggcgtcgcgctcatgctggcgctcaacctgctctcagccgcgtccggtgccgggtgctagctccgcggggcagtgagtggcacgtgccgacttgccggtgccgtcccagacagctctgtacactggagttctgccggtgcacgtttgatgtagaattatttgcatttcttcaacatgtgagtttgaaatgggtttcttggttcttacaaaaaaaacataataaaccatctcatacctctgcatctgaatataaagtcaaacacaacaattttcttatccgttcagaagcaagaggtgtcgtggtgtagttggttatcacgtcagtctaacacactgaaggtctccggttcgaacccgggcgacgccatgtttttgtctgattatttttttgttccctgttttgcgctgtcggctgattttccccccctga

SEQ ID NO: 93917 - DNA, 1630 bp, Zea Mays
tttacggttcttaccctgtcaagttgcgggaaaaactgagctctccgaggtcagaagggagcgagcccggtcagtcccagtgggtctcttcccttgcctggatcgccacgtatttatggcacaagccacgcggtcttcttcttctcctcccgcggccattgcaggtcttgcagcaacgtctctctcctctgggcggtgggcgctcgatgttcttggctccttcacttggacttcgccccgtcggcgtccactgatcaattgatcatctgcaggtagataagctaccagcatctattttgcgtatctgaactccaaaaaggagagctcgaaactacagcaatgggttgctaccctgtgttctggaggaagaagaactccagaagccaggttgtgcagcttgaccaagacatcccaatcgcgggcaacgtgaaaatctactcgtccaaggagctgaggaaagccacgggaaatttctgcccgggaagcaagcttggacagggttctttcggccgtgtatacctgggaaaactgaacaatggcgagaaagttgccatcaaggtgctctcctcagagtccaggcaagggacaaaggagttcttgaatgaactgagtgtcatatccaacataactcaccacaaccttgtcaaactgcatggctgctgcatcgacggaggccagaagatgctggtctacaactacgtggagaacaacagccttgcacaaacccttttcggtaattcccgcagcggcatcagatttgactggagaacaagggtggagatctgcgttggcgttgccgatgggctcacgtacctccacgaagaagtccgtccaccgatcgtccaccgcgacatcaaagcgagcaacatccttctcgacagaaatctgagacccaagatagcagactttgggctggcgaagttcttccctggcaacatgacacacatcagcaccagagttgcagggacgctaggatatcttgcgccagagtacgccatccgagggcagctgaccaagaaggccgacgtctacagctttggtgtactgctgctggagatcgtcagtggcagatgccacactgatcccacattacctcttgacgagcagttcctcctagaaaaggtctggacactctcggagtccgatgatcttgagagcatcatcgacggtaccatggagcgcgatttcgacaccgaggaagcacgtcggttgctgaaaataggtcttctgtgcacccaggatagccccaagatcaggccctccatgtcaatggttgccaagatgctgaagggtgagtgtgatgtgagtgaaaagatcatgcggcccagcctgatcacagacgtcatggacctgaaagtcaggacagtagagccgatccagttcagtttatccccatcgatgtcacctgcgctgagcagctcactggtgtccacacttgcattagctggtagcacagttgtagagagccgctgaaggaactagttaaaggaccaggttcctacaaaaaatggtttgttagaagcagcatgaattgtttttttgtttgtgttttagtacattgtaaggttgtcagtttgtatatataacatcctagtttgattatcgagattagagattttggccatatgaa

SEQ ID NO: 93918 - DNA, 2250 bp, Zea Mays
cttgttgcctcgcttcgtgctccccccttcccacactcccgtcccaaaaccctaaacccagcgccgccgccgccgccgacgcggaagcggtacagccatgtacgccgtcctccgccgcgcggcgccccttcggcggcgcgccgtgtccgcgctcgcgaccgcgctgctccagcagcagccggcggcgctggatgcggtggcccggcgggccccgctccctgcggccgcatggttccactcttctcccgcgtggctggggttccgggagacgggggccgcaggggcggccgcgcgcgcggagttcgcggcggacaacgggtcgttctacgaggaggacaagagggcggcggccggcggcggcgcagcggcggaggggctcgagattgccaagcttgggatctcgtccaagatcgtcgaaaggctcgccagcaagggcatcaccaagctgttccccatccagagagctgtccttgagccagcaatgcaaggaagggacatggttggccgtgccaaaactgggactggtaaaactttggcatttggaatccccataatggatgcaattatccgccacaacgagaagtacaagcctggtaagtttcccttggctattgttttggcgccaacaagagaacttgcaaaacaggttgagagggagttccttgattcctcccctttggaaacactatgtgtatatggtgggactccaattatgcagcaaataaggaaacttaattatggcgttgatgtggtcattgggacacctggacgtgtgattgatctgctaaaaagaggttctcttagtttggcagagatccgttttgttgttcttgatgaagcagaccagatgttgtctgttgggtttgatctagatgttgagacaattttggagagggtgcctccgcaacgtcagacattgatgttctctgcaacaatgccaacatggatacggaagctcacacagaagtacctcaacaatcctgtcacagttgaccttgttggtgaggatgaccagaagcttgctgaaggaattagtcttctcgctgtctcttcggagaaccgtgaaaaaccagctgtccttggggaattgattaaggaacatgccaaaggtggtaagtgcattgtttttacacaaacaaaaagggatgcagatagattgtcacacaatatgagtcgaagtttccagtgtgaggctcttcatggggatatctctcaatcccaaagagagagaacactggcaggatttcgagatgggaggtttaatatattgattgctactgatgtcgctgctcgaggattggatatcccaaatgtagatctggtgatacattttgaattgccaaactcgtcagagttgtttgttcacagatctggccgaactggccgtgctgggaagaagggcactgcaattgtgatgtacaactatgaccaaagtagagctgtacgggtcattgaacgtgacgttggatgcaagtttacagagctgccaaaaattactgttgatggatctgacttgctgagtggtggatttgactccttcggtggcgggtatagcggttcaaactatgggcgctcaggtggattcggtggacgtggtggttttggccgatcaggcggtggcggcggatatggcaattctggatttggtcactcaagcggtggatatggacgttctggtggtggaggattcggtgactcagggtttggtggtcggtcaggtggcggtggaggattcggtgactctggattcggtggccaatcaggcggcggtggaggattcggcgactcagggtttggccgcacaagcggtggtgggtcaggttttggtcgttctggtggtttcggcgattctggttccggccggttcggtggcggtttcggcggttctggctcgggtggtttcggtggctttggcgacaagaactcacggtagactcttgcaagtaatagcagaaagtgcagaaatctgtgttttgcggtagcaagaacatctggagagacgatccgccggatctcagaaggcagaaggaaataatcacgtgcctttgcttattagtgttcttctctgtttgcattttgatcgttcaagctctagctctagaccatacctgtaaaatattccgtggctcctctatctactgtatgattattgtggcgctgtcttttcttgtaggctgttttaacctgaatgacggcctctatataagcatgtcataaatcgactttattcgtcacaaaaaatgaaaaaaa

SEQ ID NO: 93919 - DNA, 2324 bp, Zea Mays
cccccttcttgttgcctcgcttcgtgctccccccttcccacactcccgtcccaaaaccctaaacccagcgccgccgccgccgccgacgcggaagcggtacagccatgtacgccgtcctccgccgcgcggcgccccttcggcggcgcgccgtgtccgcgctcgcgaccgcgctgctccagcagcagccggcggcgctggatgcggtggcccggcgggccccgctccctgcggccgcatggttccactcttctcccgcgtggctggggttccgggagacgggggccgcaggggcggccgcgcgcgcggagttcgcggcggacaacgggtcgttctacgaggaggacaagagggcggcggccggcggcggcgcagcggcggaggggctcgagattgccaagcttgggatctcgtccaagatcgtcgaaaggctcgccagcaagggcatcaccaagctgttccccatccagagagctgtccttgagccagcaatgcaaggaagggacatggttggccgtgccaaaactgggactggtaaaactttggcatttggaatccccataatggatgcaattatccgccacaacgagaagtacaagcctggtaagtttcccttggctattgttttggcgccaacaagagaacttgcaaaacaggttgagagggagttccttgattcctcccctttggaaacactatgtgtatatggtgggactccaattatgcagcaaataaggaaacttaattatggcgttgatgtggtcattgggacacctggacgtgtgattgatctgctaaaaagaggttctcttagtttggcagagatccgttttgttgttcttgatgaagcagaccagatgttgtctgttgggtttgatctagatgttgagacaattttggagagggtgcctccgcaacgtcagacattgatgttctctgcaacaatgccaacatggatacggaagctcacacagaagtacctcaacaatcctgtcacagttgaccttgttggtgaggatgaccagaagcttgctgaaggaattagtcttctcgctgtctcttcggagaaccgtgaaaaaccagctgtccttggggaattgattaaggaacatgccaaaggtggtaagtgcattgtttttacacaaacaaaaagggatgcagatagattgtcacacaatatgagtcgaagtttccagtgtgaggctcttcatggggatatctctcaatcccaaagagagagaacactggcaggatttcgagatgggaggtttaatatattgattgctactgatgtcgctgctcgaggattggatatcccaaatgtagatctggtgatacattttgaattgccaaactcgtcagagttgtttgttcacagatctggccgaactggccgtgctgggaagaagggcactgcaattgtgatgtacaactatgaccaaagtagagctgtacgggtcattgaacgtgacgttggatgcaagtttacagagctgccaaaaattactgttgatggatctgacttgctgagtggtggatttgactccttcggtggcgggtatagcggttcaaactatgggcgctcaggtggattcggtggacgtggtggttttggccgatcaggcggtggcggcggatatggcaattctggatttggtcactcaagcggtggatatggacgttctggtggtggaggattcggtgactcagggtttggtggtcggtcaggtggcggtggaggattcggtgactctggattcggtggccaatcaggcggcggtggaggattcggcgactcagggtttggccgcacaagcggtggtgggtcaggttttggtcgttctggtggtttcggcgattctggttccggccggttcggtggcggtttcggcggttctggctcgggtggtttcggtggctttggcgacaagaactcacggtagactcttgcaagtaatagcaggtataaaattatggacgtcctgagccaggttcagcattggtaatgcacatcactctctgaccccctatccatgaccccctcagaaagtgcagaaatctgtgttttgcggtagcaagaacatctggagagacgatccgccggatctcagaaggcagaaggaaataatcacgtgcctttgcttattagtgttcttctctgtttgcattttgatcgttcaagctctagctctagaccatacctgtaaaatattccgtggctcctctatctactgtatgattattgtggcgctgtcttttcttgtaggctgttttaacctgaatgacggcctctatataagcatgtcataaatcgactttattcgtca

SEQ ID NO: 93920 - DNA, 476 bp, Zea Mays
caactagaacaggcccaagggatacacgtcccggtgcccccttggtcttcacctctacctatacctacatctccatctactaaacatcagacccctctagctaccttgctgacgcatgaacgagaagacgggttagactttgtcgaaaccctcttcgctagtggaggtatcgaccatcactcgtcactgtaacccgatggtgatcggcgaccgtgaggttccatgttattgtgttctgatacttgagacttttattatgactatgtatgagatattgtctcttattagtactggatgatgagatgtgtcttattataactatggatgagacttttgtgatgtaattgatgagactatggatttaaatattgttatgtgattgtgtgtgagacgttttatgtgaaaatatgttgtgctatatagctattgatatatttgttatgttgtggaatgtggtgtaaaataaaaataaacaa

SEQ ID NO: 93921 - DNA, 357 bp, Zea Mays
tcgcaggacagttctgacattgaagtaaatgatctactatctgagttgaaggttatgaagttaagtttgcctgaaagatcaatgtcttctatggagatttttgagtatgttgggcaaatggattcgtatccaaatatttcaaacgcttatcggatattatttactgtgcctgtgactgtggcatcggccgagagaagcttttcaaagttaaaattgttgaagaactatttaaggtcaacgatgtctcaagatcgactcaacggattggctactttatgtattgagaaaaaattattaaacgaggttgatagcaacactattatcaatgaattcgcatcaagaaatgttacaagaaat

SEQ ID NO: 93922 - DNA, 3390 bp, Zea Mays
aagcacataaatgaactcagttgtctttctaccatgttttctcattatatattggcataccagtttttttgaagcagtattaatttccattctcatcatcattaattaaaacaaaatagcgattttttcccgaactgttggtgccactgttactcattcaattgaaccaaacactttcttttccctctctataaccacccatcccatatccatcagcactgagttgagcacccctgctggctgcttgccctgctcctctcttctgcccatgtcttctccctcccccattccactgacgacagtagcaaccaacggtgtctcctctgtcctctctcctaagttacttgcagccctatcctgtctatcctcatcttcctcctctccctgccatcttttgcaagatctctccttcgtcttctctttccccttttaaatccaccggaatccctcttttgtcacgagccaagccgccgagcgcagcataaagcgagcgaagcaccagcaaaagagagcgacgccgcctgcgccaaagcttcggattcccgtctattttaccccccaccctcgccgactcaccggcgcgagatccatccgcaggtgtcggcggcctgcagccccccttgaaagatggcgcctttctgaggctccccgggggtttctcgtcgtttcttgcttggcccctaaagcgggagagcggcttccagggagctcctcccgttcccggccaattcagctgaagtggcggcaagtgggtttagggctcgatccggttttgtgcccgggcgtgtctgactctgacccgggctagggagcggtggttcttggctagttcttgagctggttgcggcgcttatccctcttcttggagctcttggattggtttgggggaaagcaggttcttgcaagcagctgcttcggttctcgaggatgttaattttttgaattcagtcggggggaatggggctctcgcggtctctggattgagcatttctttattggaattcgacatttcgtgcggcctccagtccatggaggatttggggctgtggaagcaggcgtggatgtgggtgttgtcccagaagcacatcctagcgtgggcgcacacggctgcgtgcggcagcagggagcgcctcgccttcctggtcgatcggcactggcccgccgtgtcccgggcctgcgccacctcctcgcgactcgcgctcgccgcgctgcggcaatggcgcgggtgcacggcgcgcggggtgctggcggtggcgagcctcggccctgccgccgtcttcgtcatcctctggagcttcttcgtgtgcatgacctcgccggcgtgcgccctctacgcgcttcttagcctgggggctgcagcagcagttgttcactatatgggctatacacctggccttttcattgttgggctgtttggaatattaattatgtggatgtatggctacttttggattacaggaatgcttctagttgctggaggttgtatgtgctctttgaaacatgctcgatatgtgatacctgttttgacttcatatggtgtttattctgtggctgttcgtgttgggtggcttggagtcttcttgacactaaacctttctttcttgacaaatgatcttcttaataagttagtgcaaggatacgaaggaagcactgaagaaagccagtttgaagacatgaaggattctgatccagttatggatgagttctatcgtagttgtgaattcccatcagttcctgacagtgaacctgagaccgtgtcttgcgcgaagccatactgctcagcacccatccaagatgtattacatgtacaaaaagaggaacctcctagtaaagtagtgaaatctgattctacttcattggatgagattaagaggataatggatggttcaaaccattatgaagttttgggtgtacctcgtaatagaagcattgatcagaagacactgaaaaaagaatatcacagaatggtcctgcttgtacatcctgataaaaatatgggaaatcaattggcttgtgaatcattcaagaagcttcaaacagcttatgaggtcctctctgatttcacaaagaaaaacagctatgatgagcaactgaggaaagaagaatcacagaaaatgaccccaagatcatgtgttgtctctcaacagagtggtggtgtggagtttctctcagaagagtccaggcgaatacagtgcactaagtgtggtaatttccatatatggatatgcaccaagagaagcaaaacaagggcacgattctgtcagggctgtgatcagtttcatcaagccaaggatggagatggatgggttgaaaccagattttcgacctccatcaagatggaaataccacgggcttttgtctgtgctgagagcaaaatatttgatgtgtctgagtgggctacttgccagggaatggagtgcaagcctaacactcacggtccaacgtttatggtaaacatggttggcgcagataggatgcctcagagatcctacagttcccggtatcccttcagcttggacgcagagatgatcccggaagacgagttcgagctgtggcttcagcaggcgctggcgtcaggcgtcttcgctgacagccccaagcgcaggaaaagttggagcccattcaaactgcctcaaaagggaattaaaagttggcgaagatcgtcatgagggtgcagcaggcattacacagcgaggggtgtaggcgactacatcattggaaagaaggcaatggtgcagggcttcatgaatgtaaataaactgaccaacaatttgcccggatggacaagtgatttttgttcgaagggaaatttggatccataccattaaaagatcaccactttggatccataccattactatctcacttacatgtgggtccacatgagtcaatgacatgtggggtccatggtatatatctaaagtttggatcttttaatggtatagatccaattgttccttgttcgaaaggagaaagagggtggagaagaaacactcatgaataggtataacacataccactgctgaacttggttccctctgcagcaatcccacgagtttagccgtgaaccagtggtgctatcccccctacgatcaaagtaccggtggatctgtggtgtgttagtttcagtagtttagggatctgacatggaagaacgccaagacatcgttcctaagacggctgagatatggagcggtgttcattttaatcgtcaataatatttctgagaagcattgtctttgtgtagaagggaaggaaagaaggatgaaagtgatattggggactggctgtaaagtgtaaatacactaaaagctccctcctgtggaattactgcttgtaacattgtatacactgactgattaacctagtaaaaaacttccatgtttcaaa

SEQ ID NO: 93923 - DNA, 2774 bp, Zea Mays
gtgggtgtggctaagtaggtaaaagccttgcctttgaccctttgtgagcagggcctggcgtacctccccggcggcgtgtgcaggtcgagcatggggcggcaggcgtcgtacgagcaggcggtggcgtggaaggtggtgggcgacgacggcgcgccgcagtgcctggcgctcatgttcgtcaactggaccttcatctgatgctcctccgctcttgacgttcacagcctcgtgcctcgctcggcagcgctagatcggttgccgcctttatcctatcctatccgactacgtattactagttgctttccgttgcacctgtgtgctacaactgctcgagacaatgcccctgctgtctgtttatggcctaagtctactgtggtggatcgggagttggagaacaatgcccctgctgtctgtttatgtgtgagacttaaccctattactactgctgttatcattgaatctttgtgatcttttgtgtcattgtgtgacctgcaaaggttaatcctaaccacggaaaatttaacattttagcatcatttaggactgatttagtgaccagcggatttagatgagatccctagggtttgaataggaagaggtttctccccagagatcccaccaccaaatcctggtcacaatcatccgttagcgtgagtgacacctggacctgcaactccgatctgacgaggtggacggatttcaggcctgtcaagtcaacgctggcgagctagtaataattacactgatcaatggcgctggccggcggccagcgccgcagaggaacagcggcaactgcagcgacggatggagatggactactcgggctcaccgcgtactgtgctgtcgtcgtctctccgccgctgctccgtggcgtttaaactccgcccgtgaccgactgaccggtcgatgacgctccattgctgttctgctcgccggggatttccctgatccgtcgggagtcgggacccattcctgcctgcgtcaccacgctcaggctgaaaaaattgctattttgtcactctcaatgtgggctatttgctattatgtcgcctgtgggctgtggggtttgcgcctgcggcctgtcggccgctcccgtcgtgtacgcgacctacctggaccggctcaattgtaacgttaatgggccgaaaagctggcgcttgggcccgactagcccatctccgtccgtccccgtccctcacccgcgactccgcgagccaacccgaccaccacttccgccatggccatgctcgctctctcctcccgccccctctcctcctcctccttcctccgctcgaagccgcgcgcgctccacctccaccgccacctcctccccaaacccctcggctccgcctccccgctcacgccgcctactccccgcgccgaccccgccccggcgccggacgcggaccccaccccgctcttcctccgcccagcgtcccaccgggtcccacgcgccgccctcgccgcgttccgccgccgcgcggccgcgctcgtcccgcccaccgcgccgcacctccaccgccacctccgctggctcctcgccgacgccaccggggacccgtccgccgccaccacctcgtcctccgaaggcccagcgctcctccgcgcgccgctcgaggacctcgaggccctgtggctgcgccacgtccgggagcgcacgccgttccagtacgtggtcgggaacgagcactggcgggacctggtggtcgccgtcagggagggcgtcctcatcccgcgcccggagacggaggccatcatcgacatggtgcgcgccgtggaggacttcgccgacgggtggtgggccgacctcggcaccggcagtggcgccatcgccgtggcgctcgccagggagctcgccgggcaagggagggtgttcgccacggatgtcagcgaggtggccatcgacgttgcgaggctcaacgtccagaggtacggtgtgcaggataaagttgaaataaggcatggctcatggtttgaacctctggaagatttgaaaggaaaacttatgggtgtgattagtaaccctccgtacataccaaccgacgacctacctggtctgcaacctgaggttggttggcatgaaccaaagttggcgcttgacggcggcaaggatggccttgaacatctgctgcatctctgtgaagggttatcctcagttctgaaacctggaggcttctttgtttttgagacaaatggcaacaaacagtccgagctccttgttgatttgataagcacaaagtggagttgttcttttcacaatgtcaaagcagttttagactttgcagacatcaagcgttttgtaacgggatatcgaagatgaacaataaagcacagatgtttgtgtaatcatttggagacatgttttgtttccttcttacttaaggacctcccccaattgaaaaaaacgagatcagtctgggctggcttgggcagaaagcgaacaacacatgcagttgccccctttgcagagctcatcgcttggagttaaagcctgctggtggcaacaatatgtctcagagttaatcataaattcatattcgttaaaaaaatgtatcctctaggcatgcgaggtagtaatatgtttgtttggcagagccaagctgcgcatccaactgctcaagaaagctcgacggcagtagacgagagagagtgctgtggcagttgggctttcaggagactgtagctcgtatgtatctggccactagttttctggccgagttgggtggtgattgtgatttaattaaagtggaagcttttgtgcctgccttccaaaa

SEQ ID NO: 93924 - DNA, 3104 bp, Zea Mays
tggctggcttgccgctgctcctctcctctcctctcctcgctagctccccccaagcgagcacgccgcccaccacgatgccagcgcgcacgggagccggctgctccgcctccgcctcctctccgctcccgcaccactagcgcgggagcccgatggcgagcagcagggggaggctgaggctctccccgcgcgcggcggcgccgcagctggacgcgggcaagtacgtgcggtacacggcggagcaggtggatgcgctggagcttgcctacggcgagtgccccaagcccagctcgctgcgccggcagcagctcatccgggactgcgccgtcctcaccaacgtcgagcccaggcagatcaaggtctggttccagaaccgcagatgccgggagaagcagcggagggagtcctctcgtctgcagaccgtcaaccggaagctgggtgccatgaacaagctgttgatggaggagaacgaccggctgcagaagcaggtgtcccgtctcgtcttcgacaacgggtatatgaagaatcggctccacagtccttctgtagccaccaccgacacaagctgcgagtctgtggtgacaagtggtcagcacaagcagcagcaaaacccagcagttctgcatcctccacaaagggatgcgaacaacccagcagggtaataagtctggaacacggttgcatttcgttttcaaactctatgcctgctctaatgctagtttcccagtctactcgctattgctgaggagacattggcggagttcatgtccaaggcgaccggaactgctgtcaactgggtgcagatggttgggatgaagcctggtccggattccgttggaatcatcgctgtttcgcacaactgcagcggcgtagcagcacgagcttgcggccttgtgagcctcgagcccacaaaggttgccgagatccttaaggatcgcgcatcgtggtatcgcgattgtcggcgtgttgatatcctccatgttatccctacgggtaacggtggaacgattgagctgatctatatgcagacttatgcactgacaactctggcggaaccgcgcgacttttggacactacgatacactagtggtcttgacgatggcagtcttgtgatctgcgaaaggtcattgacccactccactggaggtccttctggacctaaaactccagattttataagagctgaggtgcttcctagtggttatctgattcgaccttgtgatgggggaggttccatgatttacattgtggatcatgttgatctgaatgcttgtagtgtccctgaggttcttcgaccgctctatgaatctcctaagatactggcacaaaagatgactgctgcggcgttgcgtcacattaggcaaattgcacacgaatcaagtggtgaaacgccctatggtgctgggcgacagccagctgttctcagaactttcagtcaaaggctcagcagaggcttcaatgatgctgtgagtggctttccagacgatggctggtcttctttgttgagcagtgatggtgctgaggatatttcaattacaatcaactcatctccaaacaaacttattgggtctgatgtcagcccttccccattcttttctgccatggggggcggcatcatgtgcgcaaaagcgtcaatgctactgcagaatgtgccacctgctctacttgtgcgatttttgagggagcatcgctctgaatgggctgaccctggtgttgatgcttattccgctgcctctctgagggccaacccatataatgttccgggtttaagggctggtgggtttatgggcaaccaggttatactaccccttgcacgcaccgtggagcatgaagagtgcttggaggttattcgacttcaaggacatggctttagccatgacgaggttcttatgtccccggatatgtttcttctgcagttgtgcagcggcatcgatgaggatgcgccgggtgcttgtgcacagcttgtcttcgctcctatcgatgaatcttttgctgacgatgcaccgttgctaccctctggcttccgtgtgataccgcttgatgctaagacggatgtgccatctgccacacgtacccttgaccttgcttctgcgctcgaggtcggatcaggcggaggtctgtgtgctttaagcgatagcgggtcaggcacgcgcagcacgaggtcggtcctgaccatcgccttccagttctcgttcgagaaccacctccgcgagagcgtggcagcgatggccaggcagtatgtcagggcagtgatggcgatcgtgcagagggtggccatggcgatttctccctctcgccttggcccgcatgtcgaactgaagcatccgccaggctctcccgaggcactcgcactagcttcgtggattggcaggagctacagggcgcacactggaacggagatccgctggtcggacactgaagacgcggcgggctctcccctgacgctgttctggaagcacagcgacgccataatctgctgctctctaaagccggctttcacactcaagttcgccaacagcgccggcttcgacatactggagacgacggtcgcgaacgtccaggacctgcagctggaggcggtccttgatgacgggggacagaaggccctggtcgcacagctccccaagatcatgctgcagggcctggcgtacctccccggcggcgtgtgcaggtcgagcatggggcggcaggcgtcgtacgagcaggcggtggcgtggaaggtggtgggcgacgacggcgcgccgcagtgcctggcgctcatgttcgtcaactggaccttcatctgatgctcctccgctcttgacgttcacagcctcgtgcctcgctcggcagcgctagatcggttgccgcctttatcctatcctatccgactacgtattactagttgctttccgttgcacctgtgtgctacaactgctcgagacaatgcccctgctgtctgtttatggcctaagtctactgtggtggatcgggagttggagaacaatgcccctgctgtctgtttatgtgtgagacttaaccctattactactgctgttatcattgaatctttgtgatcttttgtgtcattgtgtgacctgcaaaggttaatcctaaccacggaaaat

SEQ ID NO: 93925 - DNA, 1225 bp, Zea Mays
gaggcccaaagccccgtcggcccccatcgccacgccgccggccacgccccagacgaccccgcccgccgccgccgcctcccgctccctccgcgcgcagccctcgtccggccgcccgggtccgagcgcgctcgctcctcctccccacgtcgtttaagtgtggcttcattgcatgagtagttgcagttagcgtggcttttctccgtgcttgctcctggtcgtgctttgccttgcaaaggaaggaatcatgacatctgttgttcacagtgtttcaggtgaccacagggctgaggatcaaaatcaacagaagaagcaagctgaacctggggaccagcaagaagccccagttactagttcagatagccaaccaacagtaggcacaccatcaacagattatgtggcaccctatgcccctcatgacatgagccatgcaatgggtcaatacgcttatccaaatattgacccatactatggaagcctttatgcagcagcttacggtggacagccattgatgcatccaccgttagttggaatgcatccggctggcttacctttgcctaccgatgcaattgaagagcctgtgtatgtaaatgcaaagcaatacaatgccatattaagacggcgtcaatctcgggctaaagctgaatcagaacgaaagcttatcaaggggcgtaagccctatctccatgagtcacgtcatcagcatgccttgaaaagggccaggggagctggaggtcggtttctcaactcaaagtcagatgacaaggaagagaactccgactcgagtcacaaagagaatcagaacggagttgcgccccacaggagcggccaaccgtcaacccctccgtctcccaacggtgcatcgtcagctaatcagggcaggcagtcgtgaatgatggatgattcaaaactcacagctgaagagatttcagcccctgagctagatatggcagcagttttgtacagaaaacgctagcaacatggtgtcggtcggtcggtcggttgttgtaggacatgttccatagaaaaagcatagacgagtctacaggttttggagccttggtttggtcctctgtgtattcacctttctgtacaatcttagtagcgttgtgtaccttcccctggaaggaaggatagcttcagttagcgcttcagaaagtcaagtgtgtagcatattggcttattgtttgctttgcttggacaatggagatttgggagtggagttcat

SEQ ID NO: 93926 - DNA, 1065 bp, Zea Mays
gaggcccaaagccccgtcggcccccatcgccacgccgccggccacgccccagacgaccccgcccgccgccgccgcctcccgctccctccgcgcgcagccctcgtccggccgcccgggtccgagcgcgctcgctcctcctccccacgtcggacagtttaagtgtggcttcattgcatgagtagttgcagttagcgtggcttttctccgtgcttgctcctggtcgtgctttgccttgcaaaggaaggaatcatgacatctgttgttcacagtgtttcaggtgaccacagggctgaggatcaaaatcaacagaagaagcaagctgaacctggggaccagcaagaagccccagttactagttcagatagccaaccaacagtaggcacaccatcaacagattatgtggcaccctatgcccctcatgacatgagccatgcaatgggtcaatacgcttatccaaatattgacccatactatggaagcctttatgcagcagcttacggtggacagccattgccctatctccatgagtcacgtcatcagcatgccttgaaaagggccaggggagctggaggtcggtttctcaactcaaagtcagatgacaaggaagagaactccgactcgagtcacaaagagaatcagaacggagttgcgccccacaggagcggccaaccgtcaacccctccgtctcccaacggtgcatcgtcagctaatcagggcaggcagtcgtgaatgatggatgattcaaaactcacagctgaagagatttcagcccctgagctagatatggcagcagttttgtacagaaaacgctagcaacatggtgtcggtcggtcggtcggttgttgtaggacatgttccatagaaaaagcatagacgagtctacaggttttggagccttggtttggtcctctgtgtattcacctttctgtacaatcttagtagcgttgtgtaccttcccctggaaggaaggatagcttcagttagcgcttcagaaagtcaagtgtgtagcatattggcttattgtttgctttgcttggacaatggagatttgggagtggagttcat

SEQ ID NO: 93927 - DNA, 589 bp, Zea Mays
gaggcccaaagccccgtcggcccccatcgccacgccgccggccacgccccagacgaccccgcccgccgccgccgcctcccgctccctccgcgcgcagccctcgtccggccgcccgggtccgagcgcgctcgctcctcctccccacgtcgtttaagtgtggcttcattgcatgagtagttgcagttagcgtggcttttctccgtgcttgctcctggtcgtgctttgccttgcaaaggaaggaatcatgacatctgttgttcacagtgtttcaggtgaccacagggctgaggatcaaaatcaacagaagaagcaagctgaacctggggaccagcaagaagccccagttactagttcagatagccaaccaacagtaggcacaccatcaacagattatgtggcaccctatgcccctcatgacatgagccatgcaatggtaccacacttgtagaactctttacttatcgatatgtacggttcttttcattgagttatgtctaggaaaaggtagaggttcggtcgtagcatgatgtctaagtgatagcatatgttgtgtcacatctccttccctgctccaaactctacttcaaaa

SEQ ID NO: 93928 - DNA, 3951 bp, Zea Mays
gtactccactccactctcgtcccctcctcgatccagccatggcggcctagcccccccccctcccctagggttctctgccagcccccacccacccaggcgcctcttgccgctcccacccggtggtcgcgctgcccgcgtcgaatgggaggccacccggcgctcggagtcgggcgtgaccgcgcgctgccggaggttccctgagctcggcggcggcgggagcgtggctggtccggagcgcgccgcgcgtgcaatgggaggttcgagtggggttcctgcgagccgccgcggcggtctcggttctgcgagcgcgtggcccatgcttcgcgaagggtagggttgtctgtctgtctagctagctgctagctgcttggtctgatgagctcagctccggcgccccgcctcggcttccccgcgcgcttgctccgtcggctgcccagaacccagcttgcccgctccggcgcttctcttcgcttcttcggggaaaggttggagctttgaggtggtgcgggtgctcagccgaggactccgggcgatgacgcccgcagtggcgcgcgtttgccgcgacagtcctgggttcgggtagcgagttcctcgagcggatttggctgctgctgcgtcctgcgtgggaaggggaggcggcggcggcggcagcagcagaggaaggggaacggttgctctgaagcggagggggagcgggctgacattgcttctgggagcatggcgagcttctaaggacgcgcagctcccgcagcccagccattctcatcgccgcaccttggtgttcttgcccccaggtcgtactggttggtgggagggaacatgaacctctccccgcccaagatgtcggagccatcacctgaaagtgacggggaacaaaggtgtctgaactcagagctatggcatgcatgcgcagggccccttgtgtccctgcctgtggttgggagccgggtcgtctactttcctcagggccatagtgagcaggttgctgcatcaactaataaagaagttgatgctcaaatcccaaactatccaaacctacctccacagttaatatgccagcttcataatgtcacaatgcatgctgatgcagagactgaagaggtgtatgcccaaatgacactgcaaccattgagcccggaagagcaaaaggatccttttcttccaattgaattgggtgctggtagcaagcagccaaccaattacttctgcaagacgttgactgcaagtgatacgagtacccatggtggattctctgttccgcgccgagcagctgagaaagtcttccctccattggatttttcacaacagcctccagtgcaagagctggttgcaagagatctgcatgataatgaatggaaatttcgtcatatttttcgtggtcagccaaaaaggcatctactgacgactggttggagtgtttttgtaagcgcgaaaagactagtagcaggggattctatcatatttatctggaatgataataaccagcttctcttgggaattcgccgtgcaagtcgtccacagactgtaatgccctcttctgtgctatcaagcgatagcatgcacattggtcttcttgctgcagcagctcatgctgcagccacaaacagtcgtttcactattttctacaaccctcgggctagcccttctgagtttgtcattccactggctaagtatgtgaaagctgtttaccacacgcgcgtatctgttggaatgcggtttcggatgctttttgagacagaggaatcaagtgtcagaagatacatgggtacaatcacaggcataagtgatctggactcagagcgctggccaaactcgcactggcgttctgtgaaggttggttgggatgagtctacagctggtgataaacagccaagagtttcactctgggagattgagccactgacaacctttccgatgtacccaactgcttttccattaaggctaaagcgtccgtgggcttcaggactacctatgttcaatggtgggaggagcgacgagttcgctcgttattcttctctcatgtggcttcgagatggaaaccgaggggctcagtcactgaacttccagggacttggagcatcaccatggcttcagccaagaatagataatccattgttgagtctgaagccagatacttaccagcagatggctgccgccgcactagaagaaattagagctggggatcatttgaagcaggcatcttctctcctgccagttcagcagactcaaactttgaatggtggattagatcatttgtatggaaatcctgttctacagcagatgcagttccaatctcagcagtcaacactgcaagctgtgcagcaaggttatggtcagaatgcaaacgactctgggtatgttcaaaatcaactgcagcagctgcagctgcaaaagcagcaggagccaccaccaccacagcagcagcagcagacacaagtccttcagcgacaagcacatcaggaaatgcaacagcacctctcagctagttgtcatgatattgctaatgtagcttctggtgtgtccatgtctggatctgcttgtcaatcacaatcttctctgctttctgggtcatcgttctaccaacagaacatctttgatggaaatggtggtccagatctgcatctgcacaacagtttccacaacttttcaagccaagagtcctccaaccttcttaacctcccaagaagtggccaattaatggcatcagagggatggccttcaaagaggttggctgtggaatctcttgctggtcatgagatccaacctctgcagcacaagcttgagaaagttagtcaccagagtactgtgtctcactgttctggcaccttgccgccactatcagcaagagacggttctagtgcccaggcttgtggtacaaatgttcagagtcacctgcttccatcatcatttgcaatccatgatggattgtcaaccatcaggagtggtggtgttggcagtggaactgatgcgataaccatagcttcgttgagatatagtgatgcgaatttgctacctgaaaactccatagcaacttccagttgtttgggtgaatcaggaaccttcaattctcttgacgatgtttgtggtgtaaacccatcacaaggtggaacctttgtgaaggtttacaaatcagggtccctcgggagatcgctcgacatcaccagattcggcagctactacgagttgcgtgtcgagctcgagcggttatttggtctcgaaggccaactggaggaccctgcaagatcaggctggcagcttgtattcgtcgaccgggaaaacgatgttcttctcctcggcgacgacccgtggcaggagtttgtgaatagcgtagggtgcataaagatcctctcgccgcaagacctgcagcagatggcccgcggcggcggaggtgaccttctgtctgcgcctggagcgaggatgctgcagggcagtgtctgtgacgactattctgcaggccacgacgtgcagaacctcaccggcagcattgcgcctgtggtgcctctggactactgaagaggactgaggcgaaggccgggatctgaagctctgaaccaaaaccggcaatccagcatttgcaggatttgccatccgcaagtcgtttcgttcctgtgttatgatcctctcagtctcaggccctgttgatcgggaataacctagtcgtttaatatagctagatgatgatccatgtatcattatggtaatggacatgctgtacgatagctactgtagctctaaatgcaggcaaggcaagaattgatctatcaaagaacgaatgaatgcaggcactcactgtagaggtgatgtagccctgtactcctaagtcctaagatatattctcatagctaaaactgatggttccatgtggcattggcacccaagctattgaaaccagtcacctttgccgattctttcttcacctcaatttgcggttgttcggtcctgctgcatgcc

SEQ ID NO: 93929 - DNA, 1053 bp, Zea Mays
gtactccactccactctcgtcccctcctcgatccagccatggcggcctagcccccccccctcccctagggttctctgccagcccccacccacccaggcgcctcttgccgctcccacccggtggtcgcgctgcccgcgtcgaatgggaggccacccggcgctcggagtcgggcgtgaccgcgcgctgccggaggttccctgagctcggcggcggcgggagcgtggctggtccggagcgcgccgcgcgtgcaatgggaggttcgagtggggttcctgcgagccgccgcggcggtctcggttctgcgagcgcgtggcccatgcttcgcgaagggtagggttgtctgtctgtctagctagctgctagctgcttggtctgatgagctcagctccggcgccccgcctcggcttccccgcgcgcttgctccgtcggctgcccagaacccagcttgcccgctccggcgcttctcttcgcttcttcggggaaaggttggagctttgaggtggtgcgggtgctcagccgaggactccgggcgatgacgcccgcagtggcgcgcgtttgccgcgacagtcctgggttcgggtagcgagttcctcgagcggatttggctgctgctgcgtcctgcgtgggaaggggaggcggcggcggcggcagcagcagaggaaggggaacggttgctctgaagcggagggggagcgggctgacattgcttctgggagcatggcgagcttctaaggacgcgcagctcccgcagcccagccattctcatcgccgcaccttggtgttcttgcccccaggtcgtactggttggtgggagggaacatgaacctctccccgcccaagatgtcggagccatcacctgaaagtgacggggaacaaaggtgtctgaactcagagctatggcatgcatgcgcagggccccttgtgtccctgcctgtggttgggagccgggtcgtctactttcctcagggccatagtgagcaggtcggtcactcagcagtatctttgaataaactagatacgtccgagtttgttgactggagagttgagactatc

SEQ ID NO: 93930 - DNA, 1308 bp, Zea Mays
accactattctgcacagggttttgatagcagagaccgtctgtctccttttaagttttaacagcaaattacaaggattggaggtagagctaggaagtgttaactaactccattccccatctcatcggttttggagctcttgtgctgccgtaagttgaccatccatgttaaaaacaaagaggcaaattttctctatgaaagctattgtatcagcaagaaaataatagcagtgtgctaccttactcttcttgtgcttatgcacatctactgaatcttctgttccctcatgcttcctcttctgatacaaatggtgagcattgtccatcaaaggtatatatggtttaaaatgaagctattcagagtttttgaccatacagaaaatggactaaccttttcatgatggccacttttatcttttttcttatccttgtctttgtctttatctttgtccttactccgatccttatgccgatgtttgtgcttcttgtgttccttgtctttgtctttgtgccttttatgcttcttctctttgtccttggactcactttttggtttacccgaaatagtcggtatacctttttcagtctaaggcaaatccacaagagctgtttctcgaagttggaacgcttgccccagagtttccatatcaaagggctgaatataagcaggtttatccctcagatatgcattatgaacaagttgatctaactccattccttctcctttgcgaatttcagtgtctcccacaacattgtgaagataatgtgtatctgatattgccagcggcaaaggtttcttgcaaaagaaatcatggtgtggcagcagtttgtagtggctgatcaaatcaacagcaccagtgagctcccttggtcctgaaatacagagatcgtattatcaatcaaccacatagcagacaaataaggtttcagaaaagataggtgcactgatatatctatgatacaaaatttattctagcatacaatagacattagatgcagtaatgcggctcataaaacaactttgtgcactatgacacaaaatattaaccgtccaagttccaactaacgcattgtgaactgtaaataagtaaataaaacagttaaaattttgccattgtaaaaagaactgtagtaaacagctgactacaagacatactggcctcaactggcaaaaccgcaaaagaatcagcaccagaagtttgtatttaaaattccaagcatataattattactaatttttttgcaaactaatgacgataactaataatcaagcaagctgtgatactaatataactctgttgctttgtgccc
